United States Patent Application Publication US 2014/0057251 A1 - sequence listing, part 59

SEQ ID NO: 82851 - DNA, 1376 bp, Cannabis sativa
  modified_base (1326)..(1327): a, c, t, g, unknown or other
tataaaactaaataatagaagttcctttcatagaaacttctctaaaaataagcgtatgccattatagacgaagaacacgccgtattctttagtaaaaggcgaaagaatagttcgcaatgtgctcaccgcatgcatggctgcgttgtaataactgggttagatttttgttcttatagcctcatcttgcttaacttgtgtgttcagcgtttgatgtggggtttttgttaacaaacatgataaactatactagagtaacctaaatagctatttgctttctattagctttttacaagtaattttttagttgtatgtaattagtttggtgatatttgtgattcatcttttctgtaaactaaaataaaactgactaatatgaacttggtattcggaacatgtatttttttttggcaattttctaataataaattaataagttactaactaatttagacaattgtatttattctaccctttgtgcttttgctaatttgaaagatactttgttactcgctgtggtcccagtccagagagaagactggcgccatcctccccaggattggctgaagttgaactgtgatgtaagagttgggttgggtagttcctgtattgctgcggttattagaaaccatttgggtgaggtggtctgggttcattcaggtagattggactacgcagatgctctttgtagtgaggcggtatagctgtttgcttaggcccggaaactgcaaagctcaacggtcacaagtttatcatcgtggagagtgactctagagtcgtgatcaactctctcaaccgcgtttcatcttgttgggagattgagaactactcaaatcgttgtttagaactctctggattttttcgatggttgcttgttttcgtgtattcccaaaatttgtaattttgttgtccataatgtggctaagtgtgccttcacccacaattgatttggttgcttacctatttctcacattctgaaagacttattatgtaatgaccacgtagtctagttttctcaaaaaaaaaaaaaaaaaaaactaatattgttttttctctttatgaaattcatacagaatagttcgttgttattttacctctttaaaataataataataatacttaccgtattactcttcaagtaaattaaactagattttataatattatattatcattctttttagcaaattaaaaattaaggaaacaaaagcaagaaaaaaagtataatttattttttaaatattaaaactgagtgtaaaaaccaaaacatagattaagttcatgggaataaacatgtgagaaagtataggtggcgtttggtaacacttnnttaatcagttttttgtttttaaaagtagaaaagtgaaaatatttttcaa

SEQ ID NO: 82852 - DNA, 1218 bp, Cannabis sativa
tactttactaattaacttctaaagatcagaacatttaagttgagttttgggtggactaacttgactaagaaaagttctatttgtggaataattaatatggctacttaaccatgcaattagagttatatgagcatattttatatttataaataggattgtgttaataaataattgatttcaatcatttcagtaataataataaattaaaatattttttaaaattgtatataaataattgatttcaatcaattttaaattccttacaaaaaaaatcatttttaaattaataccaaataattattatctagtccaattctaaaatacaattcaatctaattacgccagtctattacaccaaacacagtgtggtactaatcacaattcaatctaattaattcaatacattaatctaatttcgtccaatcctaaaataataatcagtccagtcttacataccaaacgagccataagagaactataatttagtttcattaaaaaaaatttaccatggaccccttaaaagagtacaccgatgtacccctatctattttggcatttggaacaaaaattagtttattttttttttatagtagtgtacattatatttatttaagatttcatgtaaaattttgagaaatttgaaaaaattaacacataaaaaaataagattcaaagagtttgttgcaggcgtgattcttttatttaatacgtatgtgaaaacactacttttatattgtaaaatattttaaatttctcaaaaatttatagcattttttaaagaacatacacgactataaaaaaattaaactattttttttctagatatctaaaaaacaatccaaaaaactcctgctcatttaaattcaaaatttattagcaggggtcccctttgccactaatacccttatatattgtagtgattaggggtagcaaaacatatcaatgaaactactcgaacacgataatgtaagttaaggacaaaacaggttaggtgcagatcgaaagtaagttcttatgcaaaataaaaaacagattaattgcgatacaagatgcttattaataggatgatactaatttaccaagtgacaacaaatgaaagagctacataatattttgaaaagagcattgttattggacattaattgcacttcatgattggttaataatggtattccctaaaaattatattttaagttatatagaatttgatatttaatt

SEQ ID NO: 82853 - DNA, 528 bp, Cannabis sativa
ttggtggggttctttaagaattgtgacagcttatttacagcaaaacaaatgtcaggcctagtcagagttaagtattgaagggcgccaatggcacttcgatagagagtaggattctccataggtgtacccattataaagccaagtttggtattgggacacattggtgtgggagtgggagtaaaactagccatgttggtacgatgaagaagattagaagtgtacttggcttgggtgagataaagatcagtagctgtgcgagtgacttcaaaccccaaaaagtatctaactggaccaagattcttgagggcaaattattggtgtaactgagagattaaatgatgaatgtaggcactatcttcacccgtgagaagtatgtcatcgacatagatgagaagaagagtgagtttgccttctctcttgagaaaaaataatgaagtgtcagctcttgaattatgaaaaccccactgaaggagagcatgtttgagtttgtcaaaccaggctcggggagcttgttttaagccataaatg

SEQ ID NO: 82854 - DNA, 1947 bp, Cannabis sativa
tttttttttaagaaaatactatatttattaaaaaaaattgaaaataaaataacaaatttcattgaaatattaacattcagagtacaaaagagcttttaaatcagcccaaatatcgtgttcaaaaatgctgcgaccaaagaaaaatcaagaatgtcttgccacagcatgagcaactcgatttattgatcgcctaataaaacataactaacattttgtaaagatgagagcaaaagctgacaatcatgaatgttcaaattgaaaatagaagtcatcagttgtttattatgaatgtcttgaactgcgatcatgttatcaatctcaatctctacattttgccattgcttgctttttaccaaactaagagcctctttaatacctatagcttcaataacctcagcatcataaatacctttttagcttttataagattgccagaactatcacgagctacattcccaaaattatagctttcatgtgcaaataaggcggcatcgaccactaatcttaatgtagttaatttctagtttagcccaaagcttagcaccatctcctttattttcaaaaaacataaataataaacatgtgttatcttgaaccttacgcaaatgatcaagaattacaaaagtcgatgtgagaacctcattttttgaggaattttttcttcttccaaacagtgacattttgggcctttcataatacccaacataacatggcagcacaaaaaacttgcacttgctcttcataaagagtagtaaatagcttatccaaccaactttcaaatgttgacaatgatgccgattcaatacctgaacccaacgtgatccaacatgagtgtgcaaacgggcatgtaagcttgagaattataaataagttattttgaagaaagtttcacatgctttgtcacaagctgaaaacacgttagtaaacaatcggaagtagttcgccccaaagaaagttttttactttgggagggatctttagttgttacaacctgcaccaaaaaccaaaattattaggtctcgagtgattatactattttgcaatgattactatatttatttaaataaaaacaatacaagattttaagcatcattaccctaagttgtatggctcttgttataccctaattttacaaaaatagcaatcacaatcataacatttcacttaggtacctaggtggtgaaaccaccatgcctcatcaccttaacctacacctaggtggtggcacgacgtcaactcaccttccccaaggtcgaggtactcttcatcagggcatcatctcggtcgtagccaagatgcacatcctcataaggacatcatctcgacatcctcaaacatcctcacttcggctccaaaagaggcttatcaccttagctagctccaagccttgttcatctcaacacaccgaattcttcattttggctcaaggctaaagtatcatcttctcagactaaggctgagatcatcacctcgggttgataccgagatcatcatctcgggccaaggctgagatcatcaccttagaccaaggctgagatcatcatcttagaccaaggtcgagatcatcacctcagaccaaggcagggatcatcaccttagacaaaggccaagatcatcacatccgaccaaggttgaaaacaccacctccttggctcaaacaccatcacctcgtaccaaagttcatcacctcgtaccaaagctcatcacttcgtaccaaagcttatcatctcagccctagccgagatacacaccattagtacctcatctcggtcgtagccgagatcaccacttcaagtcatcatctcgggccttagccaaaatcacaacacaaagtcatcatcttggtcgtagccaagatgctccttacctcaacacatgcttcttacgactcattagcattatgatctcggcatgtgctcttcatcaatatgcatatgctcctcgtga

SEQ ID NO: 82855 - DNA, 896 bp, Cannabis sativa
acttattctaatgttattgaggctcattttagggctggtgatgttgatggggctaaaggggccttgttggaaatggatgaaaagggttgcagcccaaatgtggttacatacaacgtgatgattagcggtttatgcagagctgggcttgttggtgaagcagttgagatgaagaagtcaatggctgaaaagggtttagttcctgacaagtatacttatgtaacccttattaatggatattgcaggaaaaggaaactggcagatgcaagtaagttgttaagtgaaatggttaatgcaggattgaagcctgatgaaattgcctacaatcctctaattgatgggtttatgaaaagtggtaatgtggaagaggcttttaggattaaagatgaaatggttaagcatggtataaggttaggtcttgtcaattataacactattctgaatggagtttgtaaggccggcttgatgtccaaggctagagatattgttgatgagatgattagaatgggtagcagaccagattctagaacttatacctcgttgattgagggctatctccgggaacgtgatactgtcaatgctttcaaaatatttgatgagatgaagaagagaaacttggcacctacaattgtaacatacggaatattaattaatgggttatgtcgtggtcgaaatcttgatcaagctaatgattttctaaaggaaatggtttcatttgggttgaaaccaaattccgttatctataatactcttatttcagcccaagcaaaggcaggtaaatttgaagaagcaagagagattttagataagatgaaggaacaagggatttcaccggatgtattttgctacaattctttaataatgggtttgtgcaaagaaaataagttggaagcagctag

SEQ ID NO: 82856 - DNA, 901 bp, Cannabis sativa
agctgcctatcatgaagtgaaaaccataaaatgaaaacaataaaatgaaagaatattattttgacaataccaacagtaagctgcctatcatgaagtgaaaacaataaaatgaaagcaatacctggttggaatttagggtctggatgactgttttaatctgttctgtcatctgctccaattccctctccataaactcagcctgctcatacctgcaatcaaaatagaaagtaagtgaaaaatagcaaaaacagttcttataaatatatatggggacttgaaccccagacccctcagccacccactataggagcactaattgcaacaagaactccataggatctaaatcaaaaattagagcgaagaaggttgcagaatctttattactcttcaagaaggacaagtacagaaaaacccaaactattcgagtcagtttggaaactccatggaaagtattcactttcttacgttacacaaaaaaatctggaccctctaagaagataggcatggcctttatatagacagccattaactaaaagcaataaaagagttctaactaacaagcaatacaaccagccctaagcataagctgtactaactctccaactagcttgtaacttattcttacagtggctatatagtaggcatgtaagcatatttgcggcctaagaccatctccaatgggagatgtaaaaattgtgctatatttagtacaaaaaatgagtttgtgatatatttgcaaaaaaagaatatacatactttataatttaatgctaaaactaaatatactaagaaaatagtctgacataaaagtaaataaacagtagtgcattaatggtgatacaaattttgcatcatagcaaatgttgtgtgaactttagcacaagatttgctatgtgctgaa

SEQ ID NO: 82857 - DNA, 1039 bp, Cannabis sativa
  modified_base (32)..(35): a, c, t, g, unknown or other
  modified_base (150)..(153): a, c, t, g, unknown or other
  modified_base (259)..(275): a, c, t, g, unknown or other
ataaaattatgccacgtgtatattgtgtccannnngacaagccaacctgacacttaacagctaaatttggacggaaagagtaaattgttaacagaatacgagttttggggtttacccacacaaatttaggttttgggggtttagtgaaannnnaacgaaagtattgggggttttaccaccatttactctaataatatataagagtaatttgcgatattaagacttaagtttaactactagttgtaaataaatacctaannnnnnnnnnnnnnnnnaataatacttaagttatatttctgtaactctgtagtacctaaacgttaaatgttaagacattaaattcacatgtcattttcttattggtatatttaaattaatttttttaaaataataaaaatttaataatttagaccaaaaattaaacttaactatttatttgcaactgaaattaaatttatcccgcaaattactaaatatataattatatacatgaccatatttagagaataaattcgatccgttctactttacttgtcaaagtttttctggtttaatcatgcctggttagtactgcgcgttaatggttgcaaggtcatactgggttgctcatccttcattttgaatgccatgcccatccaattttggctatgaacctagttagtaattagggatgagcttttcaatccccacaccatggtggtgtggagtttcagaacttcttcagtaacccgatccggtttgacttgaaccgtaatccacttctgtaattaatatcgcacctcacacataatattaattagcaaagagttcttttcttttgtatcacactgaatttttgaaaagtcttaagtttttttttttttttttttaattttgattgagaaattagttgacctccgaatatgatattatatcttatttgatacatatttatcggaacatgcatactgatttttttatagggcatatgatattttagtatatataaaaatttcaaattcaaattaagtgagattttttagtatttagataacattat

SEQ ID NO: 82858 - DNA, 596 bp, Cannabis sativa
tttcatgttgtgtgttaaaaaattagactcttatcctaaagctataaaaccgtggaacttttgtcaaatttttcttaagaggagaaataagttgagattcttgataagaaagataaagttattaaccgtacttcgaataatagtaaggtggaaaaccaccatgaggactcagtttctggagtattccagatgagattttgaggacgaaatccttttaacggggggataattataatgacagcatagttaaatcatggaaattatcagataattaatggttaaattattaatttattattatgtacttcttagtagaaattaaaatttactgtcagaaataggccttaagaatatattttctcaattatggagaaatattttaatactagatgtaatgtatatgttatatatgaaattttacaattttcatgttttctgaccagtaacggtgaaatgcgacgatttgactaataagagaaacttagatacagttgagtgttgtagaattagtggggcaagatagttggactttgatgttttcggattattcggtgttatagttttggataattttaccccaaagtgattagattaac

SEQ ID NO: 82859 - DNA, 657 bp, Cannabis sativa
atatatatatatatagctagacataaaagtatatcctgatcacatctcatcttataatgttatagtttcgaaaagacttgaaatcataatttgtatatgtctaaacttctgtatttccttaaaaatacttaaattaattagtggccacaagtttatttatattttataaaccacatatataagtaccaatgaatatattatttcattaaaatattatatggatcatgaagatataataattgaagtggttaaagagaataagtgagatgattaggtcatgcgttctcactatgattacgtacatcaatatatatcaacaggaaaaaattgtaccaaaaataggatattggaataaataaacaactagctagggtacatatatatattctttttgaaatttgtatttttagatagttttcaagaaatataagagatgttcaattaatattttctaaattcaatttttcaatagagaaaattaataaatatacatgtggtttgaaaaaagatatcttataatttaattttaactataaaacgtctaacttttagtcacaacttgtgactaaaaataaaaaaaaaaaaaaaaatgtgattaattataaatcttcattcattattattaaaatatccgtgactaatgtaaataatcacaaa

SEQ ID NO: 82860 - DNA, 1687 bp, Cannabis sativa
attatgtcttatttatgaattttcactaagcaatgacttaattgtgaagaaaagaagtttttggaatttatttgttaattaagagactttataagacctaattaattaataaggtaaatgataattttatttgataattaattctaattattaaataaatagttttgacatctataagattgaaatagaaaaatatggcattattgaaataaaagatgaattatgaaataaagtgataaaattgtaactagtgaggcccacatgtgtgaccgaccacttagtgtatttttccaatttttttttttaatctttataattaattcgtaaaccgtagaataaatgctataaaaggaataagatactctctttctcatctaaacctatctaaacctaattttcattatctgtcagacaactagtaaatgagaactccttctatagtgattttgaaccccttttattgttcttcatcaattcgagccattagtgatagagtaccatgtccactcatagtaagtcaagtactcaatcatagtgtggaagactgtggttaaccaaactgaaggagagaagatctaggttcagatcttaataatgctctgtggtagtaaggaacaacaagggctagagatctgaacggaaggagtcatattatttcgctgccatccatttaaggttttccaaactttatatatttttattttatcgtattaggatattcatatttagggtgttagattatagttaacaatcaaacatatatgttagtaaatttagatcctggtaaaataattttcagcaaatagtttataagtgttttatccgtagccccagaaagacaatccaaaactgctttgaaaattaaaggaccaaccacatcccaatgttgctcataaaacatagcattcataccatgaggatttggacttttatcaagagtcatactaaacactacatttttaaattctttcattgtgaaaggggccaacaaactcatgttcatctcatttataaccacttgttgtactgcttgtaacatctcttcaatttttagcgcagaagagaaatagtactaaaaagagaattatagtaccttttagtgtatttctatgtttacacatttatactaatataaccaatgtattttttttacttcccatcaataaagttttgggtcattgtaataaaaaaaaaaaacacaaatttcccttttgtaattaaacaataaaaaatattagtagtgaactgcagtaggtattaacatcaagcggggatagctcagttgggagagcgtcagactgaagatctgaaggtcgcgtgttcgatctcaccgcattcgtttttttctctcttttttggtgcaatttttatacttagcactacaaataaactttataaacgacaatagttttaactaaaaccacatacatacatacacgaggagtacgaccaatagatcttgtcccagtctcactctcaccctccgctatttgaagtccaaacccagagaaatgtgtgctgttttcttttactgaagggttttagagtttgttaactgtaacgaaaagaagacaatcatggcggtagagctagagcagagcggttcatggtgtctccaaagtagccaatacattggtgaaatttcagcactttctcttctccacttcccgcatcgtctttcttctct

SEQ ID NO: 82861 - DNA, 994 bp, Cannabis sativa
aaaaaaaaaaaaaagaccaaatatatataaatttatggtatattttaagccaaattcaacccaaaatatacatcaatatccattgaagatggtcatagtttttgtaattagtatatgtatatcatgatttttttattatcccattaattaatgcatgctactcctaacggaaacacatgcttgtagagacataagtcatacaattatactaatcatatgatctcttagctcgtagtttacgctctaacaaataaaatctcattaataatacacaaacgtataattaaagaaaataaatattactattgataactttcatgcattatttcgtacatacagtcatgatacacttcttaattattcacacatgtgatctatatgatatttattatatcttgtcgtgtagcttaggccttaatttattgactaataatgaatatataataatcaaacttataataataatatataattaaagcattaatttgatacacaaattaatgactcccctttgcaatactatatatatatatatatatatatatagtagctataggtagtgcgtttattgatcaagaatgggtaattataaaccagttttgtgtatggttatgttgcaaggtctatatgcaggacttgctctgttcaccaaagctgcactaatgcgtggtatgagccctagggttttcatggtttataggcagattgttgccactcttctacttgctccacttgtttctctctctagatggtaaactctactctctccctctctctctctctctctctctctctatcatctgatatattttctctattggcaggaagaaaccaaataaagtttcattggggttgaagggatttgccttgatatttttgaatgctcttattgggtacgttaattcgtgtattgttaatataaaaagaaaataattaatgttaggttatactaataaaaattagtgatatatattgctatatatatattatatat

SEQ ID NO: 82862 - DNA, 1483 bp, Cannabis sativa
tgaaccgctgtgacctcctgggaagttttcccgtgaagcgtgcgagtgaggacaaagctcgctggaaacacttgtgttggtttgtaggaaaattcatcaatcctggaagcagccagagtggcgtactcatgtataagagccatgagtctgtgagtgtaaggcatgagtctgtgagtgtaagggccctctgtgagtgtaagggcccaatgtgagtgtaagggcccaatggaggcttgaagcagggacgttacaagtgtgtattcggcgtgtcctccaaaaatttcctgggattcatggtcaatgagagaggtatagaagcaaaccttaaaaagattaaagcattaatagacatggaatcaccgaagtataggaaggatgtccagtgtctaaccgagagagtaccgctctgaatatgtttattttgaggtccaccgacaaatgtctcccattctttgacaccctcaaaggaaataagaagtttgtttgggacgagaattgcaagagagctttcacgagcttgaaggagcacctgggaaatctgcctttgttggccaaaccaaaaaggggtgagaagttgcacatacattttgcaatctctgaacacgccttaagcgatgcccttataagagggagggaaagtaacaacagcctgtgtactacatcagtaagcattttgtggattctaagacttgttactcgaagatcgagaagttggcttacgctttcatagtggtgtcgcaaaaaatgaagccatatttccacgtgcatgcaattgtggtgttgaccaataaccctttgagacaagtcttgcacaaacctgaaacctcagggcacttactcaagtggttgatagagctatgtcaatttgacatcacttacacctcaaaagtgttgatcaatgggcaagcgatggcagatttcatggtagagttcacctactatccaaacgagagagaccaagagcaagaaattgatggagagtcagaagaaaatggagaaggagaggccacttgggagttgcatgtggacagatcctggaatgataacagagtaggagctggagttgtgatgatagcccttggagggaccaaaatgtattgtgcgataatgttcaacttcaaggcatccaaaaacgaggctaagtatgaagcagtgttagccagactgagagtcaccaaggaattaaaagttacgtggctacggattttcagtgactcgcaattggtgattttctaagtgaggggagaatactaagcaaaagggccaaggatggtggcatacttggttaaggatatgagttacctagagtagccacaacacttcacagttgaacaaatcccaagggagagcaacgccaagaggatggtatcttaaagtctatgcgggtcgagttcttagcctaaccaactattgagtgtgatcaagtgttacaagtagagggtgttgggttttatgccctagataaaactcatttcaatataat

SEQ ID NO: 82863 - DNA, 2397 bp, Cannabis sativa
  modified_base (29)..(29): a, c, t, g, unknown or other
  modified_base (551)..(552): a, c, t, g, unknown or other
aaaaaaaaaattaaaaaattttttttttnttttttttttttgtatatttacaatttcacgtacgacctaaaatttttatttataaaaatacgcttataaagtttaaaattataagaatacaatctgctcaagaaaaagtaagaaagctgttaaaaataacgagaaatcaatctcacgacaattataaatcaactataaataaactaaaaaataatctcatgacaactataaataaagtataaaacaaaaaaaaaaaaaaagatttattgattttactggagaagtattttggtaaataaaaaagttcaaagcgtaaaaataaaataaaaaatcgtgttgatatatttttgtaattcttttaaaaattttggtctatatgtaaatttttcaaaaaaaaaaaaaatcacacttctttacacccacccattgtattatatttgttaccatcatcgtccgatgaccttcatgcaactgctgccgcactattcatcgacaacctatagttgccattacccatcacaaccacaaaaataataaatcttctaaaaaannagtttctttcttgctttctgaaaaaataaacttaagcaatttcatgtaccgtttatcaccatttaaattatgcttttttttttattctttttcatatcagtagccaaataaaaaaagaaaaattaaattggcctcatttatcaaagtcaatgttagatataagttagttatttatgtattgttcatgactatgttttcttgtagtttatttcagatcatattttagaattttattttagctttaataatagtgatagttattttttttttcaattaatatttttaaatgaatttagtgaaaaaaaattattcaaaagaatttcataagtaaaaaattgaatgaattaaaaaaatggttatcttattttaaaataataataataatctcttaattgttagctgttatttaaaatattttaaaaaaaaaatctcagtttttatttatatattaaatataaaatttattaatagtataatgttataaatttatttatgttttaaaagggaaaaaaacttttttttgttagtttaggtatagttaattaattacacattaattagtatttatatgattaaaaaataaagtataacaaatataaagaaagatacaatatgtttaaagttaattaatttagcactacttttaaatatattatttgatacttatatttaataggttataggtgtcagaatttttcttaggctcaatactatttcaataatttaatattttgattgggtatatgaaagtctatattaattaatgtacacaatcaaaagtcatacacatcaatgattaaaaaatattcctatactatgagaacaaaataagggcatgtaccatacaattattctatatatactatttcacttctaatattagtaatgtatatatatatatataaatatatatatttactaagtggaagttatttgtcgagccacgtaaatattagtttttttggttttttttttagatttctataactaaaagtatgattatatgaatgatttattttattaaaataatctttgtgttattttatattttagactcatcgttcgttttggatctacatacaactgagtagaaaacaaccttcaatgtgatgtgttaggttatttttagtattatttttagattaattttagtgtgtttttaatttagttttactcgtgtttggagtaatttatgattgtattatcttttatttttgcagattttaaataaaagaatattagaaaatatcaaaagaataagatcaaaaaaataaaaaaatgataaaaagatcaaataaaagataagtgtacaagatgaggaccatgtcgcggcatggaaaagagcatgccatggcccgtgtcaaagaagcctgaatccgtgtgtgaaaaatgcaacacgggcagcggcatagggagagcatgccgcggcccgcccccataattcaaagggaaataagacttttcagcgtgggcttatcttccctttctaattcgaagctgaataggttttctgcaaaggctatactatgctatcttttctatccctcattggctatataagaagtgaacttcagttgatttcggtaggcaattcagaaggaaatcagaggcatgcaacggagtacgaattttagagattgaaattaatactggaaccatttttcagagggttttcagcattctcttcttctatattttcttctcttttctaaaattaatgtgttaatttgctaaaatgaacatgaataactaaatagttaattagggtctagatggagattgtttgatattgttttgtggttttaatatgatttaattttctctcaatttctatgtattctattt

SEQ ID NO: 82864 - DNA, 620 bp, Cannabis sativa
aagttgaatatttcatcatcgttaatagtttgaaaaaaaatttaacgggaataatattggaaatttgtcaagtcatcacataaaatgagaaaaaaatattggaattttgaagttacttttattggaataattcctttaaatattgtagctgacaataattttaattaaataaataaataaaatgaactattgtgtatgtacactttatgtactatatttttattaataatattaactaaatattaaaaaaaattcaagtaaatctatgtagttttaatctcatattggtgagagagaattgagattcggataatgaatttaaatagttcgtagtgaaataaagttatatatttttagattaatagctgctagtacagtccactaatattattaatacatatggcctaaatttgggttagcagtatgatcatatataaattgatcttaatcttgaagttactacgaagacttatatatgttatctgatcctttgattcacgcgttacgatttttctaaatgactaggctaagaactattattttggagactcaatgatgtatatgacttgggacatagcttaatagatatgcgatatatacctttttatcgattgaatgat

SEQ ID NO: 82865 - DNA, 1911 bp, Cannabis sativa
cttctttattctcaattcaagtctaaaattcatatgttgaaatcaatcaacctaaagataatcaacttggtaatctggatcattaaaatcaacaagttttactttcatgctcgagttttaattaagatggatgttttgaaaagtttttcgaagaatatacgatttgaagatgaaaaagactagatgaattatcttgatattttgtatgcaacaaattgtgaataatatcatgatatgtcaggacatggtataagaggttatgacaggaaaagtgtcaccactttgcagttctccttcatgattgatggatctttacacggctacattcagtctcgtagaggtcttagacaagggaacatattgtctccattactatttgttattggcatggaatatctgacaaggatcgtgatgagaattgggaagctatttgatttttaatttcactcgagatgtcaaagattaagcctaaatcacctctgctttgctggtgactttcttcttttctataaaggatacattaaatcggccactcttatgctaagaggctttatgctcttctcggtttcctctacccttaaagcaaattttatgaacttggcaatttatgttgatggtttggactctacttctcttgatagaataggtgatatgtctagctttaatttgaaaaaattaagccacatttcatttaattatcttgggctgaaaattcgtgccaagagaatttagtggaaaaatgacgaaccgaattcatgtttggagttctagaaatctttcctatgcaggaagaatagtttttaattaccaattcagttttgctttctatatattcttattggtcccaaattctgattttacataaagcaatggtgcaaaaaattattcagatctgtcgtaattttttgtggataggtttggatttctgtaaggtctaggaaatgttgcttgggcgaatatgtgtcggtccaagaaagatgagggtttaggcttcaaagacacctctctttggaatcttagtccaattgggaagcatgtttgggttatatccacaaaaaaaggcgtcaagtgggttaatgaagtctacatcaaagatcaaaattggtgggattactctattcccactgatgctagttagtattggaggaaaatagttcaaacaaaagagaataagttgaagcttattttctctcaaaataatttccaaaactttaattacactatagctctcttctataataagtttcagcaagaaagatccgaaagatggaagtatgctaatatttcagatcgaatttcagtccgtatttagttggcttgctttgaagcaacatcttactacaagagaccgacttttcaggtttggagttattgatattccatagattgtattgtctgcggaaatggattggagagtcattgacacttattttttgagtgctcctacagttttaagttgctggaaaaagtttgtaattcgactggaatggccctcaacacaaagcttcacccgatcttaaaatagattcaggattgtaaagctttaaggggtaaaaggaagatttttgtgagtgtaatatcaatgctttgatatatagtatttggaattgtagaaacaaagttttgtagaatttttccctttctactgtacatgtaatgttcaaaaaagtgaaacatgatgtttgtaatagattagactttatcagtctaaaaaagttgagcggtagatagaaattgggtggaaggtttttatgttttttttttttttttatgaataaattgggtggaagctttaaaataaagctttgtaaaataatctatttgtcttgtattagttttgtttaggtaatatatttgaagaaaaattgaatatagatcttaaagtataggaagacttttctttttggtaat

SEQ ID NO: 82866 - DNA, 565 bp, Cannabis sativa
caccatcaatctcaactcaagctgcttagcctaacattttgttgataaactaaatcattgaagcctccgtagttgttggggtacatcacaacaagcacaaacaaaccaacagcaattgcattacatagagggaaacccataaaacaagaatgaacccaaaaggaaattataaccaaaatatagttgtttgctaaatggaaatcagagttgaggtgcatgctaggtgagtagtatctgactagcatgtactcatacaaatcataccacgaacacctccatgtcagggttcttatacagtttttcttaactcactctcctgaaccccactccacttgcatcaagtccaaatatatttctttggacacaacggatcaaaatttaatcacttatttcttattgctgacccaaaacaaagtaaacaaaaaacaatcatttagataaaacaaaaaagaaaaagaaatgattaatcagactagttcagtaaaacactagagtaatcccaaatgagattgtgcagatcataatttcaaacagagccaagaatcatcaccatcatcattatcat

SEQ ID NO: 82867 - DNA, 670 bp, Cannabis sativa
ggtaaagtaggcatatttttcatagtataaaatttattggttcaaaaaaaaaattttgaaaacttttaagtatagaaaatcaaatttcccaaactaaatccaaatgtatagctttttaagcactttcaattctaagcactttttattattgatttcccattatacccttccatatatatactacttgtactactgcagcagagcacttagccacttcttccataccatcgtctttgctctaactctctcctctctctgtccaaccattgcagctatttacaccagtcggaggatttgaaggtatttcattttagatttacactcaatttcgtggtacttcattacgattttattttattttttttttaaattaattttacgcaacagctgagcagacagagtgaagcacatttccaaaaatggaggtatcaatacttggttgtccattaccatactcaattataccaacgaattcttgtttcatttatgctaaagcttcaccaacaacaacttttgttaaaggaccaaacatagaaaaacccaacaatgcccaactcaaactcaaacataacaagcttcaggttccttcaaaatcttactcacccagaaagtctgctattctagaaatccaactttcctctgatttggattctgctcttacaaggtaatc

SEQ ID NO: 82868 - DNA, 811 bp, Cannabis sativa
tatatacaactgacatttgcaaaaacacggtttttcaccttgctagagagtcttgtttttggtcagattgtatttttagtcagcataatatttctgctgctttaaagtcttttataatggctgaaagtattttattaaattttacactttgactcaaaataataaaaataaaaaatttaggaagagatataaggactataaatgatacctatatatatactcaagaaagtaaaataattattagatgctcttctaatcaaattaaatcaattgcagtgatttgtgaaaaagctgtaacaagtcatttcaggttgatttataattatatataaaatcaccacataaaaactagttagaaaacgcacaaatttacactattcaaaaggccttctgcatacaatttttctttacttgttttgttatttaagaggtttctaattttagttttgtttttttataagatgcatcttgttaatatttaaaattttgagaaaatttgaaatgatttacaatgttaatatctatttagaaatttttaaaaatttatatgtggtctaaaataagcaaaatacgtacgtgattataataataataataataaaaaaaaaaaaataacaaactttcaaaaatatagaaacagatacaaatacactaaaatgatattttaggaggtattataaaataacatacctattacctaatatcttattggaaaagttttagtctaccctcttaaataggtgttttggtaaataatttttatatccaatttgacattttggagaatttttttaaattaattttcgttttt

SEQ ID NO: 82869 - DNA, 2021 bp, Cannabis sativa
cccgccttgggtgacttcctattgggcaatacttttccccttgtccgaactctggccagaggaattttccttttttgccttggtcagggtaatgttatagcactctcgtgcaatttgttgattccctttgaggcaccctaccctattctttgttgggaacttgatgcatgaatagattattgatgtgacagctttcaggtcatataaggctggtcgacttaacatgacgttgaaagcttattatggaacatcaattatcagaaattgtgccatcatagttatgctctccggagcctgtccaacagtgaggggtagacgaattttccttaaaggtgcaacactttggccggagaaaccataaactggttgggtacaagggatcagatctttgagttggagtcccatcttctcatatggtgtcttgaacaagatatttgcaaaggctccattatctatcatggtccgggccactattttatttgctatctgtatttccacaaccaagggatcgttgtgcgggaagcgagcatggacatcatctgcttcagtgaatgttatagtgggttcccctatccgtggcatttttggcttctctcctctacggccaaaactactttatttttgctcgtgctgtaaggttggggcatacctttctcaagcttttcccgagtctccagctaggtgtgggcccccaataatgacttgtaaatgcccatccattggtggcggcattagtagatcttgattattgtcagtttgggcggcccgttgattctgatcggccttgacgtatttttacaagtgtgggttattttttccaattaagaattcaatttcttgcttcaggttgttgcattcattcatgtcgtggccgtagtctccatggaaatggcaaaacttggacgcgtctctcttacttacgtccttcttcatcggagtaggtcttttgtacgggaccatagactgggttgccatgtagattgtctctaggtcgtcagttaggacagagaaggcagtgaatttagaggtattttctctaggggtgtgttcgactttgcctgtgaactttcccttcttcttgttgccctgcctgccattgttattagacgtttttccgctcgaagttgagctgctagcatattgtgggctttgagcaggtgctcctgctgagggaaatgtggttggcccgccttaggctcaacatctgctcgctgaatggcctctttgagcttgataaatccatctgcttggtccaaaaactctgccatagaccccgtggggccactttttttaatatatttcaacagttctccaagtacctcaatgcctccagttggcggccaacctcccctcttcagttaatcttgctactttcgtagcttctgtcatggaactgcttatgtaggctctgagggactctcctggtctttgttttacttcaaccaagtcttctagatgtaatgggagttggcgaaaagaggagaattgcgcatggaattatgaggaaaaagctttccatgaattaaatcttcctgatggtagcttgaaataccattgttgtgcgacttctgaaagtgtggcagggaataccatacaccgcacatcaccccgtactccttgcaaatccatttgcatctcaaaatatttaagatgtgacaagggatcttctttcctggtgtacatcttccaggtaggcatcttaaactttaagggtagcttaaggacgttgatctcgggggtgaagggtgatccgcgtgctcggtccagctcgagatcaatgagttttgggtcggtcaggccttgaaatatattttttagttcatctaaccgtgcttgcaaagatgggtgaactagtttagcctcctgacccacctgtgtcacgtaaggatctcttagagctgggtcttggatgtgaatacccagctgagtggccagttgaacgtattgttcgtccaaacctcttcttctgttcaaatcattcctgagatcatgggctacacccaatctattgaatactgaag

SEQ ID NO: 82870 - DNA, 785 bp, Cannabis sativa
tactcttttagatttaaaacataattcatgacacctacaatttatattttctctttcattcctaagttttctaatatgaaagtgattggttcggtataataataatggtatagtagagaatgtaaatgaaattaataagattttggttgagctaattggtaattaattaggtagtcacatcacatttcacaatggtttattaagctattgaaccacatggacacttgagatggttttaatgtctatacttagtctgactctgccatataacatatagcattgttattagatattggtagcgcttaatattttttataggtggcgtctcacgattggttaacaatattttttaaaaattaattttttaagttatatgagatccgatatttaattatattaatagcaatataacaataaaagaaagtactaaaaacactactaatgtcttctaacaattctctataacatttttttgagagcgtaatgatattttacgatcatttaatagcttaatagtttaaaggtcctaggttcgaacggaactatcaatttttttcatccctccctcaccgctaagctagccttagtggcttacaattctctataacataatatacaaagcattgttattaggcaccagtggtatctagtacctttagatttatcgtcttgcgattggctagcgatactctccaaaagttaattattatattaaattataaggtaaattgcggcataaatacctaatgtttcagattttttatacttaaatacctaatgtttat

SEQ ID NO: 82871 - DNA, 921 bp, Cannabis sativa
aagtatgagaaaccttacattggaagtatagaaataagtagttttggaataacaaacctccctcaatcaatgatgttgttttgtccgcttctgtttctcttgatcaatggaagaaagctcagtgtaaattgtcttaatcataaaccttaataggatcacatgatgatagtgctaagctttgggcttcacctgtttcaaacacaatcaatgtaaatattgatgtaagctttgggcttcacttgtttcaaacacaatcaatgtaaatattgatgcaacaatattaaattctgagaggaaatttggctatgggattgctaaaaaagatgatattgggtctttaattaaggctaaaagtttttgctacagtggatagtattctgccaaagtggtagaagttttgggcatgaatgaagctctttcttgggtgctatcttctaattggcaacatgtggtcattaaacgtaatagtctactcactgtttaagctatctgtagtaatgttcacatgtcttctgttttttagcttttagtcaaagactgtcaagcattattatcttttttttgtaatgttcaattattgtttatcaaacaatctgcaaatcgagtagcttactacgttgctagaagcactcggttcttttatgatggtagcattctagtacaaaagtcagaattcacgacggtcctaaaaatgctttttatggggaactgtagctaaaaaaattaactatttaaaatcgtcagaaaaatttagtatttccgacggtttataacattaattacaggaatatgcgacggttttaattggaattcgtaaattgattgggcctttatacccgatggtttaaaaccatcgcctatagtataggccacagttttaaactgccgggtataaggacccaataaaaaatcgttacctac

SEQ ID NO: 82872 - DNA, 856 bp, Cannabis sativa
ggttctcacttatcttcttttcttgtcttataaattttcttacttttttctttggtctactttgatgtaggctctttaagccacaaaagatcttcaaaagtgatatataatcaaagaaaaaactaagagaatttgatgtctccccgtctgtccaattcttcataaatttttatatttctctttgattccttaaatttcaaaaaataagtcaatatgaaagtgcataatcaaagaggaagatagaaatcttaacaaaaaaagaagaaaacacaattgttatgctgccaaatttctcataaattatttttatgtttctctttgattctttagacttcagaaaataagtcaatgtgagggtgcataatcaaagacaaaaataaaaatcttaaaaataaaaatgttatgttgtcaaaattcccattaaaaatcagcataatcaaagaaagtcaaattagctaattatgtactaccttatgaaaaaaaaaaaaacaatctaattatgaaaagttaccattaaataactttgagaaaattgtgttgtggtcgaaagctaattgtcgtagaaaatttcagtctagcttcaaaaggggtgtaatcaaagtgatctctataatgaatatatatatttatgtatatatgtttgatatatatcagtaatgaaaatctgttatgcaaaaaaagaaatatgttatgctccaaggaacaagtagacatatattaaaatatgtatcaatgctaattgaaagactgaaaaaaaaaaattgatgaacctgaagcaaataaaatgtacaagcaattttggaaacaaaatttcagtatcaaatatgtgactagatgtaacaaaatgatacacatc

SEQ ID NO: 82873 - DNA, 715 bp, Cannabis sativa
tttatttaccatacacttaaaatatattatttagataataatatatttatcacattttaatctatacttatattaaataatataacatttattatttaaggttttgaaaataataaactatttttactctacggttttgtgagcatttgggctcgccagtgacaacactattggtgatgtttggagctattttttgtgtctttgagtttgcattgaggtataaatcactttaaaataatatcttttagcttgtattgcattatttttgtgtttgtagtttcttttgagtgtgtgtgatataaaatttgaatatgtgcggtcgtgtttgaaaaattggttatagcatgttgaaaatcaagtaagcattaagtttatattagtataaaattaagtaggtttaaaattaggaaaataatgttattattttagttgccatgtagtatagtacaggactaaaatttaatgtttattacttttttaactattttataatgtaattcatattgtaggttgttaatttaattagtgaggatcgacattggagggagaaataaaattttgaatattgtggatctgattatggattgtgtcactgcggctgagtatccttttttggtaaatggtaagccaaggggttgtgtgattcctacaaggggtttgaagcaaggttgtcctctttcaccttatttaattcttttctgtgttgatgcgcttt

SEQ ID NO: 82874 - DNA, 1591 bp, Cannabis sativa
aacgcaaatacaaagacattgtggaatctgggcttaccttattagctcaagcatcattagctttcaagtattgggatgaagcttatagagctgctattttttcatagacaaaatgctgaatcctagactaaaataaagcactcccttagaagttttatttcaaaccaaaccagattacctatctcttaaagtgtttggtcatctatgctatccaaatttaagaccttacaacaaaattaaactctaatataggtttattccttgtgtgtttcttggacaccacttgtctcataagggctacaaatgtctttctaaggatgggagattgtacatctctatagatattttatttgatgaaattgtattttctaataaactcttatgtgtttaattttattattttagagaattcatatttagggtgttaaacaacatacatgttagtaaatttagatcttggtaaaataatccctaatagaaaagtcatcaacaatggttaagaaatatcggtaaccttcaatactagtaatgtgaaaaggaccccatatatcaagatgtattaaatcaaaagcagaagtggcaaaattgttgttagatgtaaagagaagtcgcttttgtttggcaaaatgacatatagaacaaataattttgaaaggtttttaaaaaacttgcaaacaattatttaagatagtagaaatgttcacagaaggatggccaaggtgaaaatgccatgggtccttcaaattacatgtattgtttgcaaaaataaaattgttcgtagtgagaaaacgatgatcctgttcaaagaaaaacagttgtccaactttcttagctgtcccaatcgtagaagtcagggagagatccaaaatcaaacattgatcaaaagtgaaggtgggtttattaacacaatgttcaagataatgaaaaataaattgaatttaaattctagaatatacaagatatccgttaaaaaaagttggtcagatattttaacagttccaaatttgttgatatgaatctgatgaccattaggtaacataaccaagttagcaatattgtttttatttaaagatgtaaagcaatgaagagaatgacatatgtgatgagtggcgccactgtctgctatccattagaaaagagaaaaaaattgtcattactgaagacgttagaaaccacaaggagatcttcacaggtggatggagcaccttggatatgttgaatgagaaaggaaatcaactattgactcagctgaagttgggaagaaccaaccgtagaggggtatggagtggtggtcactaaagcatgatttacccgagcaatggtggtggtcttttttttgtcaccatacccgggaggaaaaccgtggaggaagtagcattgctcaacaaggtgacacggtttaaggtagttagaacaagtgggtcgaggtttcttgctctgggatggttggttgggattttatttggccgaagtagcggcaacaacaacagtgttgccaagatagtgctggcgctcttgttgaacaaccatagagaacaccttaaacaacgaggggaaaggatcatagaggtgttggaaattattttactag

SEQ ID NO: 82875 - DNA, 2770 bp, Cannabis sativa
ttttttttttttttttaagttacacttacaaaatgtattaaaaaaaatacacttaaccatttttttttttaattaactctattttttatactataatcattttaataaataatacatatatatgtatattttaataatgaataatgaacatttaaaatgtagtgcttgatatttaattatatgtgatttaaactacaaaaaaagatcatttgagtaactaaaaagagcttttgcatgtagctaatgaagaattagtttttcttttgtgctaatgaagtgtttctagagtcttgtcttgtgacatggtgggttaattttgcaacggatgcaagtttgatcatgttgtttaaggtggttttggaaagtttgtgtttgtttggatagatttggtatgttgtgtgtcttctttctattcagaatggaagaacaatatgcggcgttttcgattcacgatgatgatgaagaaggtcttatttttgagtttggggttgatggtttagtagaaattgatgatagatggttgctggtaggatattttttgagcaatcgagcattgattttcaggctatgcaaaataaaatcgctacactttggcagctaggaagggctttgtatgtgaaagaacttgatccaaatctcttcttatttcaattttatcatgaagttgatatagaacgagttatataggggagtccttggacgtttgatcgggcaccactaatctttgaacgtgtgaagcatggagagaatcccagaaatataccattgctgaaattggacttatgggtgcaattacacaatatgacagttggtttcatgttggaaagagtgatccaaggggtggggaattacactggatcttttgttaagtccgacccaaataatttctaaggcgtttggcgtgactatttacgtattcgggtgaagattagagtggacatgcgactaaaaaagaagaagaaacttgaaatacgaggcggtccgacttgtcaggtaatgtttaaatatgaagatttgccaaccttttgctttattgtggagtgcttggacattccgagaaattttgcgaaaagctctttgaagtcccaaaagagcattcatgaatatagtcttgatttgaaagctgccccacgaagaaggaactatgcagatggttctcggtggttaaaatcaggtctggcggtcaagaacagaatggacaatcatctagaaggaagcagttccaatagtggtcaccagagtaatcaagtcccaccagtcacgggagtcaaagaaggatgattgctaacaatcagggacccccattactacaccctgattcacgagatacaaatggagaaccaattatgaggatagttgacaatgttaatggagcaccaattaatataaagaaatccctgactttagggaaggttaatgagcatgtggtaatggtgccaaccgaaattgatttgaattctgggctgataataaaagaagaagaatgggcctagaaaaagaagttgggctcaatgaaacacaagatttggagttgggccgtgaaaaagtaatcatagtcaaggtgttaaaacatggacatctctaactcagaagacaatgatgttgcagcccaaaatgaagtctcaaaaaacttgatagaggcgggtgctggtttctaggcccgccaagtattatgaatgtgttgagttggaattaccgggggcttcggaaccaacggaccattcaattcctaaaagaaattttatttcaaaagagacccaattttatatttttgtgtgaaacaaagtatcataaatcaaaagtggtgggcctggcccaggctttgaattttgatggtgtctttgtggttgatgctaatgtggcttcaggtggtattgctttgctttggaaaattaaggaatcaggctctttgttgggctactctaataatcacattgatttgcaaatttccatatcacctacctttttgacttggcgtctctccgatttttatggagaacctaatagaaatagaagaagcgattcttgggcactccttcaaagtttaaaagactgttcatcgctcccttggtgtgttatagggaacattaacaacatttttcgtcaagaagacaagagaggtgggcgtccatatccccagtggctttaactgagtttcaataaaccttgctgcattgtgggtttgaagatcttgagctgcaaggtcatcaatacacttgggaaaaaggaagagccacaaatgcgtggattgagctacgtcttgacagagctccagtttgcacaacttggtatcaactatttaattcggttactctttctaatttgggttttgccacttcggatcactctccgctgtttcttgaacctattgtggtgaataattttgctcctagtcgtagatttcgttttgaaaattcttggttgaaggagcctctttgttttgaaattattcgtgatgtatggtcccaggagcaaaatatcagcatctctaataagattaatatgtgtgctgagaggttatccagttgggggaaggagttaactggcactctaaaccaccgtattaagatctataaggctgatttgaagaaacttcatggtttaagggatacagtttcagttcagagatatgctgaaatcaagaagaaattttatgatgcgtttgatcaaagggagagtttttggaagcaacgggctaaacaattttgcttgagagagggggacccaaatagcagctatttccataaggctgctagtagtaggaaaaaaa

SEQ ID NO: 82876 - DNA, 707 bp, Cannabis sativa
agtagcatcaatctttagttcggttagaaaaatgtaattaagagagcacgcccgaaccagggactttcgtttgcgaactgtagaggtctgtcccaaccctttacagttctaagctactcctctcatggcacctgtggaagaggtgagacatcctcctccacaggggtagcagcatgagatgagatatgagagccaatgtcatctatctaggtagcaccatttgtagtattatatgactcatccatacatatcatatgggccgtctctggttaaaagtggatttgactacccgagtaaaaatcattaaccgagcagtcaccatcattagtattttggttctgcccatgattgtcccagggaaaatcgcggacaactcccggatgttgacgaagaacttttgagggtcgagcattcaaagaacaagctcattcgtcaagttttcttttttaaaaagagtggttttagcattaacattagaagtagtttgaactccaatatgaccatctatggccttgatctcaaaagagtctatttctccaaattgcttcagctccattaaaaaggtttcttgggcataaaaaaattagccaaagcccttttttcatcttatggacgttacactcttgtccataagttgaactgtttacagggcaattaattgggcccgaattcgatggcccaataagaatcttcttattaccagttgc

SEQ ID NO: 82877 - DNA, 647 bp, Cannabis sativa
tcaacctaatgtgcatggttctacttgttcgatttcagtttcatcttgggcatcaggctagtttttcatcactaataagatgtacaaatgttggcaaatataattcatactttgatattttaccttacgataatgtgaaatatctgcaaactattcgcaattcgggtagccgtaaatcacccgatttcgctaactagcaaaatctccgagaactggagaacgactttactagaatcaacaaattagctaagtgatgcgacaatatcacttagacttcttaaaatttgatttcagcacgagcactcctaataattttttttactctatcctttaaaatatattactaaaacactatttttttttttattttacatcaaatttttacggtacacatagatgagtctatttttttttttatattttctccatattatttaaataatatattttaatatatataatatatattaataaaaatagaataaaatataattaaagtattattatccatatatataaaggagaaatataaggcggtaacgtggcggtctaaaatctctccaaagctatatttcgtttttctccttaattatctcatttttttaatattttattaaagcaaaaatttacaaattaatattttacta

SEQ ID NO: 82878 - DNA, 537 bp, Cannabis sativa
aggggcagaactcgtgagttggaagaagcggcagtgataagttgggcaatatggcgtgcacgaaatgagtttgtttggcaaaaaaagagctggtctactgcaaatattgttgcttcaacaaaaattctacttgatcaatttagttttgctcaagagagaaaaggtttttctttgtctcgtcttcttgatggcagtcgagttactgagcgttagactgcaccttctctaaaccagatcaagattaatgttgatagagctttgttagagaagaagggtcgttttaggtttggttgtgtggctcacgattgtcgtggaaggatggttgaagcctacactatgggcaagttgggactggttcaactcaaaattgcagaaatataagcattgaggaggctttaagctggattgctcatcactcatggggtccggtattattggaaacgaatagtttggtctgtgtccaagctattcaaagtaatatattcatcttatctcaatttggtcttttagtataagatgttcgtactcttcttttat

SEQ ID NO: 82879 - DNA, 1015 bp, Cannabis sativa
gctttaaatgaaatttgttcgatactctagattttaattatagaaatcttatttacaaaaatgtacatcagccaaaattaaaaggtgaaaaaaaaaagaaaatgaaaagctcatgtttctcatttttcaaaaaaaaaaaaaacaaatttagaaattttcaaaatacaaatcgtgtttggttgatattttttaaaaatattattctattttattaatacttcaatactttgagactccaatatgaacaaggccctgaccccgactctgaccccggacttgaaccccaaatttgcaccaagacccgaacccggccctatgacctggaccttagcacccctgaacccgaacacaaaccccgaccctagacacaaacccatattccgaccccaaacccaagatcgaacatggacccgatcccaaccctagacccaaacccgaacttgaaacttggcattaaacccaaacaccgatcccaactccagacccagacccgaacctgaaccctaacctcaaaccccaaccttgatgagagagaaagtgatgaaaaagaaagtgacgagaagaaaagtgatgaaagagaaagtggcgagagagaaaatgatggcatagcaaataatgtgaaaaaatgataagagagagaaagtgatgagaaataaaataatgtgataaaattatgagagagaaagtggtgagagagaaaataatgtgagataaagtggagaaaaaatatgagcaaaagtaaattattttttaaaatagaaaatagcatttgttattctcatgattctaattgattctcttgaagtagtagaggctccaaccaactaaagtataactgattctcctattgcgactcaacaaaagttagacacgtgtagacaatcagttcgattacaaaatacaagtgttgcaattcaaaatcagttggatgcaacacctcaggatagtagtgcagatgaagaattagagatgatcaccaagaaggctagatgcagaactatgctagctaatctta

SEQ ID NO: 82880 - DNA, 788 bp, Cannabis sativa
tttggtattagaaatggaaaatgtagattaattactaaattttatcattactaacataattatttattgtttttttaaggataaatatggtattatatatatttgtctttttttcagataattttagattgaaaattttaatttggatggagaagtcttcctctatttctcttttaccttttgctaaataaaagacttcacatattccttcattcagggccggtccaaagatatataagatataaaaaaaaaattaaattttagaatcctatcaaaataaattatttgaggttaacttaagtggccataggatgcgtctgtgttgaaagttctatgttcgattcccaatttatacattgtaatatataaacgcttaaataaattctttttttatcaaaataatagttttaatacttattgtaatgataaaacttttaaaaagtcgtaagaatttcaatatgcaatcatttatagctacacattaaatattttgaggtcctgagtctttgggggctcgaaacacacgcttggctcgcctactctcgggactagggccatgcctccatctctttccctccatcgctctccttccactcttctttcctctctacaaaacatagtgttagagagcaaaatttcttaatttagaaggcaccataaatatatttggtatagttttgtagtcatgaattgagtaagaaagaataacatatgttctttgtttgaatagtaacatcaaacaaatacttagtaattaaagactatttaagttaataataataataata

SEQ ID NO: 82881 - DNA, 1134 bp, Cannabis sativa
agtataccttatcaccgattatcatgccagtctaaatccaatgaacttacaaatcataggaattaaaattttgaacatataatcatgattatattactgtgttgatgacaatataatcattatatatatttatatatgttctggacttaatagaatttctacattaaagataatcatgaaataaattatatgaaccatgcaacattaaagtaatttttgatcttttataaattagtaaatctgattatattgaaatcagttttatttaggactcaaaacccaatagaattatggtagttagcccaaataaaaaatgcggcctatcaacaacgcacaacgtattactttaacttgaaggttaaagagaggaacctgtgattaggagacttagtacttcgcaaagtcatgcgtgattcctgtaactcaacacatagaattttcggcgataactcggagggtccatacctcatcattaaaaatattggtactgcaacctaccgtctatttgatcttaacgattcagtttttgacagagcttggaatgctgagcatttgaaattttattatcagtagtactcgcatgtatataattagtcaattttagttttctatttcctaagtatagggaggatgcaagtatccttattatggctaataaaaacggactactgattactcacatctcattatagcatatttttttttaaaaaaatatcatttttgtagttatttacttaatgattctattattttttaaagcatcgagatgttcataaattgcattataagagatcgcgtaaataaaagtttgcaccaagctgcaattatgatgatcgcatgaattgctaaataatagatgcacaaagttacatttgtaatcgcataaaaatcataaaccacatataaaaatactgaaaaatatccttgaaggatatattatttagaaactgcaaaaatatagaaggtatgaatcccaattgtcttaaaagttaagtacaaagtgcgagtacccttgtaccgtgatcaaaaaaggaaataaacaaaagaagatatattttttctaaggagcaggggcattgagattctctataattttctcgatgacatttactacttcagctccaggagcaacat

SEQ ID NO: 82882 - DNA, 687 bp, Cannabis sativa
agaagatagcagtacgataggcctcatcccaatatttgagaggtaaggatgcttgaggtaaaagggttaaaccactctccactatatgccaatatttacgttcagcaaccccattttgttcatatgtgtgaggacatgacaacttgtgaataaatccatgttcatttaagagtttcgtaaaggcttggtattcgctgccccaaccagattgtaactttttaattttgtaaccaagctacaatttaacttatgttttaaaggttacaaaggttggtaaagccttacattttgttctcaacatataaatccaagtgtgtgtagaataggaaataaaactaatgtaatatttgtatccacttgatgacacaataggggcaggacctcatagatctgattgcaacaactgtaaaggttcagtatatttagttgtggaatttgaaaaaggaaatttatgatgtttgcctaaacaacatgcatcacaaagataagagaaattgacatctgttttattacttattttgatgttacaagatgacaaggcactttgtacaattttggcagtaggatgccctaatctattgtgccaaagagaaaattgagagtttattggggagtatagatgtactattacatttatctttttggttgtaggctagtggtgttgctgacttggatttggtgatgttg

SEQ ID NO: 82883 - DNA, 590 bp, Cannabis sativa
agtttattggagcttataattataagtccatgatttatggatcgctacctttaaacattgtcaagggaagaaaagttgtatataaaattttgaaaaaatttattttgatttgtttacaataaataatttatttttcaaatttattaattaaaaaaattggaaaaatttaagaaaaaagttgtctagacaaagacaccaccaatgtgttgttaagacataagtggcgccactatcactgtgtgctaacatagtgatatgcacctatactatagggatgtccccactagatttatttttgggttgattaattaattaattcattaattcaaaagataaatatttatttaaatttaaatttgaaaagtagttatagatattttagtggttgagatattttctcaaagtagttgagagattccctcaatcagttatagaaaataaatatctataatataattcagttatattatttatgaaaataattaaatataatttaatatataatttgaatttaataattaattaaataaaatttgttagtgttattattttgtgacagtgtatgttctgttcaatgtctagtcgtgtct

SEQ ID NO: 82884 - DNA, 631 bp, Cannabis sativa
tataatgctaatcaatttcaaatatttcattcccccaccccccaaaaaagcaaaatggttatcattacaagaattgtgtaaccatcagtgcacgatccttaagatgcgatttctaaggaaaaacaactaatgcagagatttgaaaggataaggaaggatttgcacacttcggggcagaactgatgtcatatccgtgtaggtacttgggtacaaacgtgtgtcgtctagtcgtgcaaactgcaaggtctagaaagtcctcgtacaaccaaaagtttccacgcaaacttgggggcaaatgttaccccaaaatttacactgatatgtagcacctgacaagctaacaagtggcaaggagattgaccctgtgtggaataggacaccagtttgtaccgaccagaccagatgatgctgaatggctgaccgaggcatttgctgaagatgtgtcaagatacattctttaattggttccacaataatgggccaattgatatccctatttccatgggatttcatttaacaaatggagaaaaggggattcacattcaaactatttctaatttatttccaaatttttttgggtaacttatgtattcattattccttatgtagtgaggtcaattcactatttagg

SEQ ID NO: 82885 - DNA, 1131 bp, Cannabis sativa
tttcagagtattatattatacaactttagaataggtaaggttcaattcaccatttaacaaatacaaaaacttcaatcgataacttttacaaaacacaaaacacaaagtacaaaatcgtatatacccaattaaaaataatgtatagttctatttttctttctcatttagtccataaaacttgggacacacaaagttcactatatataaaataaatttataatttttctttaagatacataattaaaatcaaagtaatggtctgtcaaataaaatgaaagtaatgggaggaaatcttgatgacaatataataagaattattgtgggttatggtcacaaaatttaggcgctgatcaaaattgagtcatacccaaatgacacaataattatatgagttggttagagtcatcttgtgtgacattaatttacccatttatattatctaaaataaaagaaaattacttacaagaaaatgaaatagtttatttacattgttgttttattgattaaagaatgaatttcattaatcaacaagccaatttacaatcaaaacagagctttccaacaaaacaagctaaaagaaagctataattgacttgtgtacaaacatgtcaacttgtctctcttggtatattcttttcctgagtaatttgcggcataacctccctaagtgcctaggtttttgcaactaactcccaattccaaaattttggtagtaaaatcacctaaacttcgataccgttagcaaatacactcccccgtctaactgaccccgttttctgcttatgtggctcggtagcccaagtgccaagtcacaaaaataccaattacgtggcattatccattgaaaatttggaaatataacttaaaattaaaattaactaataccgttacctaaattaaatcaaactccattaaaattaaaagaaatcaacaaaactcaaatccacaaaagagaagaattaaaacagaagaagaaagggggaaatgaaataaaaataaaccctttatgaatacaaatccacaaaacaaaaatgttaaatgaactaaccttaagacaaacacaacccaaaaatacagtgtaaatcaaggagaaaggaaacccaaaccagttgtaaagtccttttttggcaa

SEQ ID NO: 82886 - DNA, 1052 bp, Cannabis sativa
  modified_base (55)..(61): a, c, t, g, unknown or other
gaaggagattcggactcagatcctggtgacactctgctacagacaggatacaagnnnnnnngatctgagtgaaaggagacattaaattccactgcaaccactgtaaggttttggaaactttatataggtttatttcatatcgttttagaagttaatgtttaggatgttataaacatacttgttagtaaatctagatccttgtaaaataattccaacagatctaaacccatttccctaagtgtcctgctctttcaaactttttgatcacatacttcatgtaaccacattaattggtggagtttcatacttctccatgatactcgcacctattccttggatctctcttcaattttcctccttgaggcattcttgggggcttcttgtagtggaccacgttgtgagtttctctaaacacattctcttgagtatccaccagatttgagtactcggcatactttggtttgtaatcttttcttgccttctttaaagtctcactttgttttggacgttttcctcctctcttattttggaacccgctcatgttctgttctagaacatacacttttgattttctaggagggatattacatccagtttgtgacactctataccaaaaaaatgggtctacataggttcttgtacggatgtagagggtccgtagactattgaagttattgcattctgggaataggaattgatgagacgaatctagaagtagaagtagttggaggtggtgccagagggactctgaatgcctgctaatatgcatcttctagattaataaagccttgggcccttaccatgaatttagacaacgtctcaaccctttttctttgcatttctccccattatagggagccaactgcaagtccaaaatacatggccacacatttcatatcattagttacttttttctttctttgcaactgcattcactggatgaagttcttcaaactttcttcttcttgctgcttgacatttgtgatggagcccattttcatgtcacaatcacgggcaacaatgaactgtttctagaaggcagactacaattc

SEQ ID NO: 82887 - DNA, 704 bp, Cannabis sativa
tccaaaacaaaggaataatagaaggaagaaaagaaagatcaaaaagtagctaaaacagcatcagtctacgtccctccctagctatatatatatatgtatatatttatgggttattcatgtatatcattttcaataatcacgtaggctgtgtcttgtgtgtccgtatattttatattataatattggactgtcaataattaatatacataattatttgagtgtagtactggtccccaaattaaagttaatagttatttatcgctgatcatgaccttatcaatcaacatgctgatataatcaagatcaaatatatcaaagaagacacacatatttatatatataattctaataaggacaagattatatgtatatatatatatggatatatgcaggttgtattgaggaatacgacaaagctttgctcaactaaacccattgtcaccgtcaacggccattttccaggtccaactctttacgcaagggaagacgataacgtggtcgtaagggtcacaaaccacgttacatacaacctcaccattcactggtgagatcaaaattacaatatattattacacgtatatataaatacatatatatactatgtataaaataaatcactttttaaaagaagtttcatatatatatatatatatttatatatatatccttgctagtactgcatatgggtcccgaaaattgacata

SEQ ID NO: 82888 - DNA, 639 bp, Cannabis sativa
gctcaataattaattacaagccacaagatttcccaaaggaactgtacaggttcaagggcctgtttggcataaaagggaatacctgaagatagatcagaaacaatttcagcatattcatctctcttagccctctgatcttgaacatgtcttttaagttcttccacactgttttttttagcagcaagagattccacaatggcaatgcgcttggcctctttacggttcttcactagaaaataacaataaaagatattatataaacaccaatcaggaatgaaaaacgaaacacaaacaagattgaaatgttatcctcataacaaagcaagaaaaaagaaaaaaaaaagtgggaattgttttacttcacactgaaacttgaattaattaaacaaatgcagcattaatttccacatcaatcagcgaaaaaaaccaactttcaaactcaaatgcttattagcagaattacatatacctgatagtgctttcaccaaatcatcttctgcctccctcaacttactcttaacctccgcaagtttacctgtaaaattgcgcatgaaattgaataaaaaaaaaacaaatccgaaatcgacccatcataaaccctaactcaatgtccaacttcagtctcaaaacccctaattg

SEQ ID NO: 82889 - DNA, 1010 bp, Cannabis sativa
caaagcctaaaactgaagtaccttgttatttttcaaaataacacataagttaagaaaaaaatacaattgaaatagatgtatgagtatctatagtagaaataacaaaagaaattaaaattacaattgcttgaacaaatcaatcaatattttaatatcaaatgaatctttgttgattttgcttcattagacagaagtaacatgaagacaataagaagatttgtccaaaggtaattggtgtgaaaaaacataggaagagaatgttgagaaaataatcgccaaagaaagagtgaaccatttactttgttgtttgggcaaatgaattttaaatatggaaataccactttataagtatcttattatttccatttagtttttttttcagcttttaaaatatatcttttattgttcatatttttctagttcaatttaaaaaaattccagatttaagaaaaaaaaaatggtaataaaatacatctctcacatcttaaaataaatagccataatactaattttgaggccaattgaatagtgcaaatattttttgaagttataataagagagaagaaagaaacattaattaaaacaatgccaaaatattacctaatgttgagtttgctactaattcatttcttaaatgtatgaaactagttaactggaacggtataattaaagttgtgttagctgacctatttttttaatcactttatatgtgcatttttgaaaaaaaaaaagtcatttttagtcacccacaccttcaactgcagtttattcttaaatataaaccaaaaattgtctatgttctctttgattgattttgcttcgttaatttttaatcctatttttaggtaaaaaaaaaaagaaaataaaaagcgttcttgaaagcaaacctacaatgaaaaggaaagaggagaaatctactcttgttagttgttactaattagcataaattcaacaagttgatgggtaacctaaaccatcaacaaacacaacatacaacacacaataataaa

SEQ ID NO: 82890 - DNA, 1731 bp, Cannabis sativa
actatttatagggccttaatgcatgagggaaagtttcccttttgcttacaatgtataaactaggaaagaatatttattacataattatgctacactaaataggaaattggaagaagttgttgtattcccatgactcaatcccacaattgtaggcattgtcttcgtgcttggacttcacgatatcattctgaagtagccaagtcttaatgagttgctcggaaagccaaacccattcctactctaataatcttccttttaccctgctcgggtaattagaggttatacgtgcagatgtgttacatgaagtctgttcgagatattcatctcttcctagatgtaagaaatgcaggaaacgtctcactcatgtattctgccacgtcatagtgcaaaaaatgggataatatttgcccctaagtctgcgcgggacccttgtggtcgcacgtggacttcactcggtctggatccttatctgaacgagtgacacgtgttcgtagtgtcggttgatgatccaatgtgactctaactaagagtctttttagtttttagcccattaatgctgattgacatgtacctcaagccacaccttaaaattagcacgttttgatggttattcttcaggtaattgagtgcacaacgtacacttttgaggggaaatcaaggtatttaaattttgaaatgaggactttgcctcactaattagcttaaaaatagggttgaagaccttaatcaaccacttttagccatttttgttcttgaagaataagagcaagaaatctttttctctcaatcctttgaagaatccccaggaaacaccgaacaacgtcatccaagcaaatctcaagcctcgaacagtgtgtaagttctttgtttctttcctctaatttgtttgaatattttattttcgttcttgaatttgttctaggaaaaccatagaaaacttagctttaggactctaaaatctttacgttccttgattataatcacatcttactttcatttccacgatatttaatttctcttacccattcggggcttcgtgaaaattaacccttaattcgtaattttgaaattctggattgcaaacctcaatatcatgtgaaaattctatattttgatcctttgatcagacctagtcattataaccaacctgtttccgtttgttatgccggccaaatgctcatcttatgtcctaccttttgtagatgaaccctggtgagttttggggaagcgaacatcatatcgaccaggatctgcttcaacatttgtacgaggatcatcctcgtcttcgtgctagtctgtcctcatctagtcacggtctctccaattcaagcttcgaagattgggagataagtagcaaacatacaccttccccagaacccgaagtgcagcaccatttctacctcggccagatcgaaggtcaaggctactggcgtttcatctgtgagcttaggaaaggtggagatgctatattccgttcaaatggacatatattgtttaaccatatatagttgatactttgcctgtaggccgtccaaatcctgcagttgcaggtacacccattgctacttttactgtcaccatcaccaaacataccaaccagactccgtccaggaataggataatgggacgaaccaaacaaactatgcggaagacttctttatctgacccacacgtagctcggctcgccacaaggcctaacgcagaacaagcctggcctgctgctgaggagga

SEQ ID NO: 82891 - DNA, 1297 bp, Cannabis sativa
tgagtctttctcaatatacttcttgtattcatcccgagtagtagcaccaacacactgcaccaaccaatacaagaattcttatgtaatccttaaacaaacgtagaaagttcttatatatatacatgtgcttaaaccttaaaaaagacaaaccttaaggacacctcttgcaagagcaggtttcaagatgttagcagcatcaagagcccctcctcctcctcttccagctccaataagagtgtgaagttcatcaatgaagaggattactgtccctttactattttcaatttcttgaacaatcttcatcaacctctcctcacaatcgccacgattagtagtacccgcaacaagtctacccatctccaatgaaaatacctgcatcatagcaattttctcaagaaaaattagcatatttctgctcccattattgcgtttaaacaaactgtttataccttattgccctgaagtttatttgggacttgagcattaacaatggcctgagccagtccttctacaattacagtcttcccaacaccagggtcaccaataaggcaagggttatttttccttctcttacatagtatctgcaccacactttccacttccttttttcttccaattaatggctccagcttaccctgaatgagaaacatttatatactaactaaatactataaaacacatcaaagattataacgctgagaattacctcgtgggccattttggtcaaatctgaaccatactcctggagagttggaatctcgtgatattgctgctcgtttttgttataaagcttctccattgtatttgcactttcaaaagttgaagtttgttgtgtgtttctaaaagtttcatcatgtagttcttgtatatatactgtgataattacacattccaaaatgtctcttggaatacaatgttacgtatttcgaagagttgaaagaatgacactgacacattacatgataacaacagagttcaaggcatttttgccttatttatgtgacttttggtgtttcgttttctatcttggatttcgaaatagagcaaactagcaaagatatctctgattgagtattgttattgtccaacaccatttatagttgacgttcggtaagcgatattttttaaaaactattttcttaagttatatgaagtccgatacttaattacacaaatatcggtataacaccgaggaaggtactagacaccaatagtgcattttagtaagggtaaattgcagcataaatacttaatgtttcagattttatacactgaaatacctaatgtttatttttgg

SEQ ID NO: 82892 - DNA, 1196 bp, Cannabis sativa
gcagagaaaacaaatcccataacagcaaatgcctttgcagaactccagctcctgcgccccatctgctttgcctgataaacaaattgctgcttaccactcatctcatctcgagttataggattatctagagaacctataaacaaacccatggccaacccaagagcgccacctacaaaatttacaccatccaacataattaagtaaatctaacttactgagtacaatgttcttcaattaacagaatcaaataatacacaaaaattgacatgttagcagaaaaaaataaacaaattgaggttccaacatgaatcaaattcttgattgtcacgagtttgtaaaagctaaagttacaaaacaaggttttgcaagcattgttgataaatctaattccacaaaccataacaaaacttgaaaagggaacatactcctggtgtttaacaatggtattagtttttttacatcttttaataattgtacatagtttaagacaccaatataacaccgaatacagattcggctacagtgagatcaaacaagccaaacttttccaggtaatgaaagcataaagaagtataaaactgaaacaaaggagcaaataaacaaaaacagattagaagaagaaaaagggtttattttggggcatacccatgactccactaaagacactacgaacagcacagttgttccaaatgtcttggccgcgaatttcctcaacagtgggcaaccttatgggctcaatcggaggcttctctacttctttggggatgggagaagcgttgggaacttcattatcgggagtagaagtagccattagaatagcagctcgaatacgaaggattcaaatatagcatcaaaggaaaacccaggtcaagaataatatcagaattgagaagaaaaggagggtttaggagttggccgccagtgaaagcgaatggtaataatgagtactgtgtgtgtgtggatctctaatctcttctctttataagaaaagatcagacctttcctcaacaaagaagaagagtttattttactacttgcaacggcttctgcgttttaggtttttatataaatatatattttgtaaagaggtttttttgcgaagagaggtttttatatcttgatttatgcaaatttcttttttttttatccgtctaattctttttggtaaagtaattatccatatactatttttttaa

SEQ ID NO: 82893 - DNA, 951 bp, Cannabis sativa
ttttttttttttttattttctctacggatttagtggtgggtagtggcaatggtgatggaggtggaggtggtaatggagttagggtattctaggataagaaagacgaagaagaaatgaaaaaataataaaaggaaaataaatgatatatattttttattttaattttagagtttaatttcaaaaagaaaaattaattatattttataatattttaactcttaatattacgtgaatcaataaaaatttatcacgtgtatatttgtgtacacgtggataacctaatgtgccacaactgaatttttagatgaaagtataaagaataaaacaaaataatagttcagtaaattttgccattaaaattttaatttttatggttaatattaaaaataataaaatttaaatacttttacggtaaaaaaaaaaaaaaatttaacatgtatacttctaattatatatgtatttgtatcttactttgaatccaaagggaaagtaaagacaagaagatagcacaactatttatattattattattttttttttttgtgtaaggctgtttgactttttttgttctaggagtacgacaaactattcctgcggtctgtgataattatacaacacttttaattttctaatgcaaggaaaagttgttgaaacatagaagtattagaacagagatgttaatcaagtttcacattctcatccaacaaagaaaatattggtgagagtcagtaatatggtttcagtttcttttgtagaaaaatggttgattatcagtctattcgattggtactatcagaaaaattggacttccacccatatatacgaatacagcctccaagtacggcagtggtactgcttgtagtacaggagaacaaatctaattagtacgaacttttaagtttttacttttcttcaacttgaagagatcaaaataaaagatatatgataata

SEQ ID NO: 82894 - DNA, 960 bp, Cannabis sativa
ttggacctattttcaacccgcccaattaacagatcgagcaggttgtaattttttcgggttataatttttattggttttttcagttcggtttgagcggttcacaatttttgttgtacagccctataaatgcttcttccaggtgcagtgtttgagtgaatgaaaattacgaaaataaccttgtgtaccaaaactttagtgaaatgcatacccattgttttgtagtaaaaatatcactggaatcgaaaacaattttattgtaggggtgggtggaggcgtggagctgagatgtcttttcagagtctttggattcttcttctttagttggcattggcaatagggtccagttcagaaggagggtgtttgttttggaccatattcatattgatttccttaaatttcatttaagtttatttttgtttttctttatttataaataaaagctagttttgaatgaagacaactccttcaatggggcttaacagttgagaagtacaagcaaatgaatttttcttaatagtttcttcacccaaacaagttttgtgtttaaaaacaaattaaaattctattgttttagttggttttgggtggacacatgcattcaattcatgtttttatcttatacaaagttttttttttacagcaaataaagtttgttatttctacaaagtttaaattagataaataaatgaatggtatgagatttgttatggtaaagtgtgggaaggtaggtcatgatatatcaatattagcataaaacaaattatttatgcgatttaacttttacagatgtgtgatcactttattttattggatggacaatgaaaatgtgattttgatggtgtgccatttacaataatgatatttatataaagtcttttaaaaaaaatgatattaataagagtaaaataacataggattatttttaaaaatatgggaaaaattattaaagttatgataaat

SEQ ID NO: 82895 - DNA, 1150 bp, Cannabis sativa
attaaaataaaaaactaaaatattaaataaaactaatatttacgtggcatgccacgtaacgatcacctagtatatatatatatatatatatataatgatctaagttataactatttataattacttattaaatttatagaaaattttgaataatttataatgttaaaaattaggttaaagaagttataagtggtcctaaataagtataacgtatacaaatataaatttttttaattaaaaaattattgtgtatactaaaacaaataaaaaatctaccgaaacatcatttaaagggccgggtgtagtgtagatttatcttatactatatattaaatttgtgtgtaaaataattacttgaaaatatatatgccaagaaagtataccagaatattgtttttcttaaaactcctaacagcatttgaaaaatagtatggctactaatagtctaacaaatactaagattaactttcaatttgtttgataacgttcaccgtacatggtagcaactatatataccattgttatgatttagagcaattaaacccacgttgcatgttcttaacatataaaaacgagaagggtctaaatgcaaatccagatctataatttattataacatctatctatcataataattatagcactaataaataatttaaagttacctttggctctgatgtttgttaagtagatgagactcaaccccttgcagctagaactaaccaaaatcattgcaccaccactcttatttatatcatatatataatatctatcttttattcctcacaaactttttctttaaatctaaatttgtcggatttcgttttctttaaccccatttcagtatccaaaaacaataccaataattattcataaaagaaaaaagtgaggaaaaaaaaatatagtagtacttaaaattaagtaaaaaaatgatcgaatttaatttcgaaaaattgaaaaaaaaaaaatacatataagaaaaaaaaattgggaaagttacacttttggtccagtatactgtcatggtgatggtgaaatgatttagaggtgatgctgtgttgtaagggttaagttttgtaataattttacttattattggatgttattgcactttattgggtaccctttttccttttctcttttctctttt

SEQ ID NO: 82896 - DNA, 643 bp, Cannabis sativa
atatatatatatatatattatattcaagtgtaaaattttggttaaatatactcaagaaaaaacctcaatatacatagagtttgtcatttttagggagattagaggttaagacttcctctaataatgtataaaatgacatatatatatatatgagcattgttattggatattagtagtgctagcacttctagatatgtcgttttgcgattgattaacgacactctctaaaagctattatattaaactatatgagacctgatactcatttggactaataataatattaacacataagagaacaccattggtatctatacatgtaatattgaaaatgattaaaagatagagagtactgaccgcacaatatgcaaaactggatataagaaccatccaaaaactacccatgaaagtatcaacaatgaatttcagaatcaaaggtataatgtgaactaaaccccaaaagacattgacaatagcagctgcatgagtgaagcttattttccacacatctgttaggtatgccatcatcaaccacatcgcatagaatgacagtaatattgtcatgattattaattagttatacattacaacttattcagttattgatctgatctaataattacacataatatatatatatata

SEQ ID NO: 82897 - DNA, 1329 bp, Cannabis sativa
cttgaatggtggtcatttgagctacttattctaatgtctggaattctaccaaatccacaacttgaaacatcagttctttctgtttggtgagttttttttttttttaattattattatggtataattagtttcatctttatttatatcaataagtactaataatgctatattgcagcctacaaaccatctcaacattatatgcaattccatatggagttggtgctgcagcaaggtatatttacatatagactctcatacaatataaatatctatatatatatatgacttgttataatagattactaacaagtaaattttcttagactcaaaataattataattaattatatacttaaaaagaattatttttttaattaaaatatttaataaagtatttttcacaactaatgtttataaatattttttatttataaaataaataaaattaggttagtatgagattacatgtaatttattacttatttttatttaatttttaaattaatcacaatcgtttaacaatgatccaacaactaaaataaaatataactactgtagttatatatttgatgtaatcattaaaatctcatctatttatatataaacacaatttactaaacactattctaatcaacgatcgaaatctagccacaagggctttgagaatctctttattgaacactgatacactattgttctagtttaattcttggaaaagattagaacataggtattgtattgactattgatattaaaggtcaaaattacaagattccaaactctccgagatagtttgatatctcctcataaagttcggctgaccctaagtatggtcccaataattttgtctatgtatcatatctaaaggggaatgtgagtattattgaacttatttcacaaaatttcacaaaaaataccatttttttcaatgtatagaagtatattataagtacgggactagcctgccttaactcaaaattgagcttgcactaactgaaaagcaataacaataacttaactaactaccaaacaatcgaccctataggagctaagccgaactacttaacttgtgactcatatatttgaggcctaacaatcactgagtatgaatattgtacaacaattgaatgttgaccctgaattttagtgggcctgaagaaaaatagaatttcggacccttattaaaagaataggtatatttttttaaacactaaaaaaatgtatgtgtttaactttttcttcttttggaatcctagatagtgtaggctgtaacccgccttaattcaggctaaccttgaattgaagtcttaatctagggctactactcat

SEQ ID NO: 82898 - DNA, 1839 bp, Cannabis sativa
aaatcacttcaaatttcttatattgataactaatcagattgtgaagagttttatttagggcataaaacccaacaatgatgactcacaattgtggaaggtggttcgccgctattcatggttgttgaaggtggttcgtggcttttgttgtactggttatttggcattgaaatctgtactgattgtaaattttacataaaatattgttaaggaaaaattttgtctctgtagtggttcgttgcttgttagttttagtatgattttttttattattttttttacctttaatctcgattattataggaaaagaaagataaaaaatcactttttatcctagtttttaaaggaaaaccgggattaaaaatgatcttttatcccaatttttttataataatcgggattaaaagtgattttttatttcaatttttataagagtttttatcctactgatatacatctcggttttcattttagcaaaaaccaggataaaatacccctaaaaatcaggataaaaagcctattttagcagtgccatgtgtatattcgaccctaagatttagacttcagcccaagtctttattttaagcccatctcatctaaacataaccctaaagagaagagaattgaaaaacttaatgtctcatctttctcttctctataattttcgaaattcattatgcttatgctttattctcaacctataaattgttccaaatgtgatttgagtatcagcccactattcaagttgatacttaggtttttgtggaagactgtgatgaacacaatcgaaagaggagaagattcatattcaattcttgatcatactttgcaatagaaataatcaaggattaaagaactgaaaggaagaagataatttattttgctactattattgtgagattttcaaactttatatgtgtttatttcattgttttagaaatattcatatttagtttgttaaattatagaattataatcaatatctatgttagtaaatattaaatctaataatttccaacaaaagcagctagatctagccatgaaacacacttcaacaaatttaaaataaaaatctgacacccaaaaaccaccatattcaaattccataaataaaatcaaatacctcaaaattacaatagattcaaactctaaattcaagaataaaatacaacaaaattatatttaaatttattttaattttctttaaattttggaattttcaattggtattatttgataaatttatactcctgtttgagagcatgcgattaatgatgctagttggtaagagtaagggggttggagcgagccgccattgatagatatagcgcgcacgaaggggagtggatattggtgttgcactgttggttctggtaggtacccccatgcatgccttttcaactgaccccaccttcaatcggctttaacttgcatttttgttgtattttttccattattgaatatatttatatatattatctgcatcgaccattattttatgttgatgaactatactttgtagtttgtatattctaatttgctacacagcatttaattatgacattactactttttttcctatatattttaatattattatatatattcttcttcaacttgtataattatttctctgcataaagcgatatatatatatatatatttatataaatactactctaggagtgtgtgtatgtattaaaatcttttatatctgcttgtggacagtaaccacacatgaattctttctgatgtaatcatgattaattttatatacaaagttatatatatatatataggtatacagtatactcatggtctatgttaatctacaaaactctc

SEQ ID NO: 82899 - DNA, 1662 bp, Cannabis sativa
ttatcaatttccaattgatctatttgaactataataacagcaatttgggtcacataagttatgttttctttccaagtatttaaatgtacagttatagctgctatgtatatagcacattggaacaaacttttaatgaacgagttcgtaaataatttcatattctattgacatgtgaatgaatttttatgttctttttttacccttcaatttctctttttcatagcgttcatggtaccaagtacacttgtcatcctttactgtgggaatttacagttgcgtttgcttgatttgttcccatatcgttaaatgtttggtatctttgttctgttattaaacaaggtgtgaagactcttgtcatccaccacaggaacattcttttagaatatttcagtcttgaaagatcaatttctgtaattttatgaaaggccccgttgttggagggattttgagtagtgattcttattttgaggggacgaaatatgatgtgaattgaaatatcattaggttggatctattttactcgtatgtaccagcactaagtattttcttctgtcctttttaacaagtttatagatgttttttcgtgtagttttaccttcttaagtttttagttgatcgttagaaatcattatgcataaacagcaaatcaatatatcagccagtcttttattctcaaactttgcagaaatgtactagaatttaaatatttgaatgatcattctacaattatgtgcctatgaatttactacctcgattttatagctctcattcttttcatcctttacttctgaattcgctccctcgattaaacatagctttatcctaaagttacattaaaattgaactctcctagtaatgagaaactattataccgaagtcattgaaagtatcttatatgacaaattcaaaacaccaccacatcagcccttgaagctggatacataaggtttttaatttttttttttattattatcagcaaattaaggtggaccatcttttaagcctataattgtaacaaaataaaaatcacgacgaaagtgaggtgattactataaattgttgatctagcatatggaggcgaatgggagctttaagtgagctttttctgtatatatttttgtgacttaaaaacaaaaggtactccgtttcaaaaaaaaaaaaaagtatgtatatttaaacgactttggtaactaagagaaaaattaggatggagttacaaatatttctgtttgaaaactattcagtcaatatctaaatatttaaaataaaataattttactaacagaatattattcacaacacataagcaaaatggctacttaaaaatagcattatattttcaaaatattaaataagtacgattatttgattatttgtggctaatcgaggggtcagccattttcgagggtgcaattgggaggaagtttgggattggttttgcgtgggctaattgaggttatgagttggcttaacacctctgcttaccagaatatgagtgatagaaaatagaaatagaatcagattgtttagttgtggctcaggcgattccaagtgcagtagccgtgatataatctttcataaaaattcaccgaaaccatctacaatgccaaagtggaaaaaaaggctaagtttgttcagaagtctatacatgaaatatttaat

SEQ ID NO: 82900 - DNA, 707 bp, Cannabis sativa
attttaatttagaagtgatcatgtgcttctcgaaaataattttctcattcatacatatatattatgttatatggaggagatttcaataattacgtcaaatatgtaactatgatggttatattcacttttagccattagatcactattaaatgattgtgattaatttaaaaattaattaaaaataataataaattacctaaaacttgataatgacttattttattcctttataaataaaaaattataactattaagataatctgtggttggaacacaactctttctctaagctcctcgaaggttggtggaaagatgcaagtgcaattggatggccaggtactaaactcatgtgcaagctgaaaaaagtgcaaaaaaatatcaaggaatggagcaagtcggtttatggaaacaacaaggtggccaaaaatgctttagaaaggaaaatattggcgctggataaaatagaagggagtaatttgtgggatcaagctcgtgtagaggaaaggagaaatcttaaaagggaatggcagcggtatatagttgaagaagaaagaagtctatggctgaaatcgaaatgtaaatgggtaaaagaaggggatgcaaactcaagaatgttccataatttattaaatgcaaggaaggcaagaaacactatctcaagaattgatggctcgacacttgagaaggaggaagtgatagtagctgaa

SEQ ID NO: 82901 - DNA, 618 bp, Cannabis sativa
ccaggctgtgtggtgttcatctcagctatgttttcactgaaatgcttcttcttctatgcataagggagattacgaaaatgtctcaccttcacaaccaaatataatcatatatgattcaaattcatattctgatatattgataacaaatctccctttttagtgtataagtatgaagttcttgaactgtttgtggttataacctttttgaattttgcatagtggaaaacagctcgtggtgggggcaaaacaatattgaaatgttaacaacttccctttctctattagtaagagcttttgagatgtcagatatatatataaatgaatccatgatcagagtaaaaacgagaaggaaatcaacaatgcttggcaaaatcacagaagaaaattggtctgaaaaaaaaaaagaaggcggatcagttatagtgagaaaaattggaaaaaaacttacataaactgttaaaaagcaaaaatatttactaactgccacagagcaaacttaaaggaccataaagaccacattctataaatcttaaaaagaaatatttatttaaataagagtatgtaaaacattaggcacacgtggtgacaggtagtaacttaacttaatttaaattttca

SEQ ID NO: 82902 - DNA, 735 bp, Cannabis sativa
ggaacctcgctcgaagtcaatatatttaggaagcttgtcattgggagagacttttgcagcgagttcttcgagatcagttttagtccaatagaaaggtggaatgccactaattctaacccaaaaaggagacttatcgaacttcacctctgtcggtgttaaccaagacggccaaggcataataactagcatggctctacatataatccacgacctccgttgtaatacattccaggcaccctctttattggcaaaggagaagtggagtattcctttgtcatcctctttccatctccatcctttgagggaagcctaggcctttttgagggttcctgcaattgcagttcttccaagctttcctttgcaaatgagtttgccaaggagaacttttccttgtggttcctgtaagtcaatttcccctgggtctagtctgtacgttaagtcgtcagttgtcacatgcactgcctcctcaaagagatggctaagagtattgtccgccatgaagatcgagacacttgtctatgaagagaaaattacaaaatgtccaaaagttacggccagtaactttggtgatcgtccgtttaaaggaaaactcctagagagtaatatgttggttaaattaactctagttcagcacaaagtattagccagaaaattgtcttcttcttatattgccacttttattaaggtaatagatgttcaattatgagcaagggagtctaactctcttgctcataa

SEQ ID NO: 82903 - DNA, 553 bp, Cannabis sativa
ggagacaaaattttgttagacacaagattcctgggaagcctaaaaatcgccgtttatgaatttaattatgagatctaatgctaatctcatttggagtttctgtatatatatataatatagtacaattgatctgatactgatcaacactttaataataataattaaaaaaaaaatggatatggtttacacgtggagacaaagatcatctttggattattattcacgatccttgattcactactaattaattgatataatatctcttttgttaattaataatttaaacaggtatgtaataatgctcattgggtgtataagaattaagaacgaagtaatgaactgacccaaatgtattgtacttaatttttatattattatagttgtttgttttggggtcattcaaaacgacacacttaatttttttaaggcctaattaatttttcactgaaggttaattgatgggtattttctattttttttttatgagaagagtgtgaaatgttagataaattaacaattaacccaagatctatttgtatataacatagaacac

SEQ ID NO: 82904 - DNA, 1877 bp, Cannabis sativa
atatacttgtgtaagtaattatttggtttcttccttttcttgttttacctaattcctgaatttgaatattttaatacagagaataagaattgcactaactgaagtagcagttgacgtggaaatgcgaagggtccgcctagttgctcctggaaaatggatgctatgtgcctcatttattctccccaagagtgtagctttcgggaaacccatcctagagttgtaattatatgtatagactatagtcttagagctaagttggatttatggatcttaaattttgtatgttgattctgatcaaatcgatcttcgtaattgcataaacacaatttaatatatgattactgcacacgacacgaccaattagtgtcccagttccctatcttttattgtttttattattttaaatgaaagttttggtttttttttttggaggatattatgttcttttacaaataattaaaaatagaatttggttaaaactttcctctcttttgattaatttcatgaaggggttgcttaatgccccacgctgctacacctagtgcacccagacaatttaagacaaatttcgatttatgtctgagtgtttgttttgtttgtatactgattttttttttttttttgcagtgccaaacacaactaccggctgatagcgacatttttcttttttgcttaactagagtgagctctttttatgcaaccaaaatcacactaaagtgttcaataaatgcaatagaaatcgaatatttgttgcacatatatgtctctcttggacgactccgattcatctgcagcgtttgtgtgattctcatctggtccctccatacaatcttaaaagagtaagacatgtactgaatctaaaggtactggttccctacacagtccattacatatggccatatggggtcctctggctagactgtaagtcgagggggacaaattggtctatttgggaatggtaggtgagggcaaaatggtaatttcaagtgaaaaggatcacacatagaaaacaagcaaatctcagttcagattgagatctacataattatatctcccttgtggtccttattctatggctgtctttataggtatggaaatgtaaaagatgagagggagagttgtggggatctttagctgttttgctattttgctaaaaaatggttaggtctttcacaagttgcataaagccacaactaacagttacccttaacttttggtttccttatagcaacctgtatgaaactttagggtacaacaatgctcacctattctatctcgcatgttcttttaagcccataattaaaaagaaaaatagtaataatagcaaaaactaacacatgggttttgcatatatttaaggcttcttctagtaatcttatatacgcatatatactatagtgatgaaataattgctaaaacgtgccactactcaacactgctactttttttttaaacgtagaatcaatttttgtcaatttaaggattacagtattttcattatcagttaacgtaatttttgtaagctagtgtgagatttctatgaaaaacaactaactttcaactttaatgaatgaatttatcatttgatttagattgtaaagaacacatctttatactgtgaaatgtgaataacaagttatctgataacattcggataaaaaaaaaaattgaaaacataataataaaaaaataatgtaaagcaaagcaaaacaaaacaaaacaaatcttcttatcaggaacaaagaccccaatgaatacatgatataactttacaacctgtgcatacacgtgtgaattggtccccactagtggacatgaaaaaagaacccaaatccccgagaggaaggatccctccccaattattattattattatta

SEQ ID NO: 82905 - DNA, 765 bp, Cannabis sativa
aatgggttttatttagggcacataacccaacaccatgtgggccctcttcacctcctcgacctctttgtttaaacgagagatctccgaatgagcctcattctctttgccaatgaccttacattgcccaatggtgctctgtagctcaccctccaactgtttcaccctgtcgagaccccaatgttgggcgacaaaggaaaagaaggtttgctgaaaataaataacaatgaaaatgcataagtatttttgagtgtttttgatataaaaggcaaaacaaaaaggagaagaaaactaactgagagaccgaaggcgagatttctttcaagcatcacggtcggactgccattattgaccaagtcctagtctctgggcagaaaggatcagagatgacgccagcaggccgcaacatactatgtagagtgttccaaaccaatgctcccagcctcgatgggaaaagcctcaggagcttgacttgaagaagctgtggctggactagtttttggaacaggctccttggtgtgtgtgagggtaggacgatggatctggacatgatgctcagaagcctcaatatctatggtctgcgaggcacgatttttgttagcagtagtcttcttgggccttttgaggggctccacattgacgtcgaaagaggtttctgaggcagatatcctcttcttccccttttttcttgaagtgtggagaaggtcctctagatcaatatttgcgaaataaagagatgtgttaatatctattaaataagcaaaaaaa

SEQ ID NO: 82906 - DNA, 624 bp, Cannabis sativa
gcggagcggatttgatccaagatccaataagtatccgaatgtttcgaatcagaagtgatccgtcagatcggagctctaacccgctccaattaaatggatctttttgacatgcctagtatttgataaacgatgagtagtgttttattattggttagtaatattatatttcataaaaactattactttaaattatataagagtacccaaaacttaatttttcttttggacgtaaccttttcttttagtatttctcaggtatatatatatcctaaatttttcaatgggattaattaattattcaaaaattaggattatttaagtacttaatttgataacaaaattatatgagggattgataaggtaattaattatgatagactaataagttaagtaatatttatataaaaatatatatatagagagagatatgtataatacatattatacctggtctctgcagctgttgggattgaaggttgaaccagattcagaagaagtgtaatacaagtaaaaaccttcatgcaccttaggatcattcttgtttccaagtatctgcgaagcagaaactacaccaactttgaaatcaataccatcctcaatctgtggcatcgttccccttagcga

SEQ ID NO: 82907 - DNA, 1727 bp, Cannabis sativa
  modified_base (1616)..(1616): a, c, t, g, unknown or other
tatgattttattattaattttatgaaaattaatgaacaatgtgattgatgtttatgtgacacaaaacatggagactatatgaagaaatatatacatatacatatacatatgtaatatattttgcactctgagtacaaatacaattatgcttttgggagaaaaatattgagattcatagaataatttagttattttatttatatttatttatttttttaacaaaataatagtttttgattttttatataaagttttttactataaaaaattgtaaaaaaaaaaagaaaataaaagaatgtataaaacatagcaaattttcaaatttatataattattctgttaaaaaaattaactgaaaagaaaaacttaattattgtttataattttggtctacatgtaccatctctcaagttaagttaatggacactttactctttagcatgtctcttttagttttcacttgtctgatttcgttcaactcctttctcaactctagtttaataattctgaacatctagtcagacctagtatcaaagtcgagtgttacccttgagctttgaaggcttaataggcccaagtctcaaaaagtgtcaccttctcaagttagagagaagttttgaaggactccataaatccatcatgggagtagattatctctagactctccataatcaatgtcttcataatagttaaaaattaaaaaaaaataaataaataactaacaacttattttaacccttcaatcatcttctttataacttagctataaatttagagatgcatttgtacaaactccaataaaatgtatctctacatgtacctatggagagagtgagcaaaatttcttttattagttttattactttattaactttttacaaatatatataatgtataatataatattttgtttaatttatatattattaatgtattaaaaatatattttaacgatgtagataaaaatatagagaaattaacatatggtgtaatgtaaatatgtgatgtaaaataaaaaaagtaaaattttagtgagttattttataaaataaaatagataagctcatatggatgctaatgcttatcaatatcattatgagataagatagggtaaatgctagttacatactctacaggcaatgggtttgagaaaattgcattgtatacccatattattttatttgttttaatttttacttttattttcttattttttaagatatacacgtttttatagatgatatcccgttataccccttaagttaatgtaaattatgtgctagacttaagtagaaggtgagggtattttgggcaatctactcataaaaataggtacattttaatgaaatttaatatgatgatatttttgattaatagatataaaaaagaaatatttctcaacttatccctaaagcttttagttaggaaattagtctattttagcagtgtaaacccttcaatagtgaggttaatggtgattaatcttttattgggcttggtagccctgatttgtaaatgtattttaatataatttaatatcgaatctcatatattttaatttaataattaattgtatagataatgttgaataccctaagggctcgtttggaacgccntattaggtcgtattgtattgtattgtattatatttaattggattatatatcatatttttatataatactatgttaaactttaatttgtactaaaatatcatatatttaggt

SEQ ID NO: 82908 - DNA, 1972 bp, Cannabis sativa
  modified_base (1781)..(1789): a, c, t, g, unknown or other
  modified_base (1947)..(1947): a, c, t, g, unknown or other
ggcgacaaaacttttgtatatgtgcatagcaaacttttataaatgtattttgtaacgggatcccggaattttatatatgtattatcttaagttattaattgaataagaaagttttaattaatcacgttttttattaatctcattgattagcaacgagctacacattaagtttaaaattacgttaacatgcctaattagttagggtgttatagtatgtatgtgttgtctttttcaggtgtgttctgacaagttggcgcggtatagtcacaaccgagtatttcgtgccgaaccgggttcggggccgaaatacaattttgggattattcattgtcattttattaataagtgaataatctgaatttatttaaagtatgcggaggtgttaaatgactataatgcccttaaatgttcatgagagtgattatgtggccatttgggcattttggtaacttggtataattttattatttgcaaaaaatgaatgttgatcgaaaaatgaatttcattttctggtttatactcctcaaaaacgcctctctctttccctctcattatctctttgtttcaagtgttgaattggtgagctttttgcttgattcaagcttggagttggtgactttgtgcttgagtttgaagagattggaggtagtttctcttgctgtttttttagttgaatttattgttgagaagtttatgattgaaaagcatgagataggtgttgagttgctcttgaatacatgtggttagaatttgtgttaatcttgataagttttggtgtaaattgtttggtgatgaatgggctatgttggatgagctctagatgacattttagggtaatcttcatgtgtgaattcaagttccatttgttgtttggttgctgaaaatgaggttgagcatgcttgaaaattcaaggttttgattgtggaattttgttgaataatgatcaagttggagctttgattctttgttgcttaaactgattttttagggtatatcattggattttgatgcatgttttatgcattttagtgcctacctttgtacttgctagcttgtggaagatagatttgagttgtgtgttgatttgggttgatttgaaggtgattttggggctgaaatttgaagttttttttggttttggaacccaggtgccgcggcccgccctttcctttttgggtagatccaaatggaaactttaaatagccataactttgtaatccagactccaatttgggagttctatataccgttcgaaagcttgttttgagctctatgtgaatatttatattttgaaggccaaatatatatttttttaaatgtggaattagggattaaccctatatgtgtaaatcccgagatttgtgactaggattaccgacactttgtcaggagtacccggggatttggaatctctactattgcgggacatcatgtaagacactagtttgcacgtatagtttagcacagtggcacttatattgtacattatggttgtgattaatgaagaaccgggattaggattattaccctaaaatgagcggttatatggtctagggttattaccctagtaattaaaagattttgagtgttatgccatgctaaatatgttggaataaagaattatgcgcctaaggcatagttaaactagactcggtaaattagtaccttgagtttaatagtagtgcgggttggaaatgttaccctagaatattaaaaaggtaagaaagcaatgatgtatggttatattgctaaagtgaaggcataagttagggttattaccnnnnnnnnntgttatttcgagcatgccgtaatatgttataggaatgattattttatatgcaagttagggttactatcctaagattctatatgctttggtatttactgaatgcacacatatatgtcaagagttatgtgcataagacattgttggaattattttaccangatctatttactatcatgtatgttg

SEQ ID NO: 82909 - DNA, 1372 bp, Cannabis sativa
  modified_base (27)..(32): a, c, t, g, unknown or other
aattaatcatgattaactgctaatttnnnnnntaactaagcgggctttacatcacaagtgatgtggaatctgtagtagctctcttaagattacaatgtatgaatcaatacgcgaatctctaatgagagagagatagagtcttaggcatgtagaggagaggagaagagggagttatggtttttagacttagagttgagagcgtagggagcttagatgcttaatgacttagggttttagagttaggctagtgctctttatatagtagagcttacatccctaatatcccatagatataggtaaaataaagctattctttacataattaattaatagataatgactaaattatcccttgtagatggggaagttactgatattttcccctattttcgtgcactgtcaaggcccaactcataacatggcttgttgtccatggatgaaggttacgcatcgaaggcctgccaggcaaaagtttgtcaaccgtgcacctacaggatgcaggtgggtcggccatacaatgtttgcaggttgaggtttggccagccatgctcctgctaggatcttgcaggtcatgtttttatcagctttggcaagtgcaggccagcctttgtaggtggagtccaacatttttaggtggaagcaagcctttgtagttggaggctaaactttggagatggaggccagcctttgtacaccttttccttgcagaggtcagggtttcttggtttgaaagtcacctttggtcagccagcttgtgcccaagccctggctggccatacaagctcatcctggctgaccaatgtactccccttggccaaccaaacactactacaatttaaccttttagtgacactatatagtgattctcacttttgtgcgcatcactaaatagttaagaataatttttagtgacgcgcataggtagactctaaattttcggtgttagtctctcatattgcgcgtcactaaaaatatgaagtgtcactaaaaagtattacccataattttttaattttttttatttattagaaaaactgacttatagagtcacatcaagagtgactaggaaaatgtatccccacatgctttgcacgtcactataggtatttttaataaaaaaaaaaattgaaaattgaaaaggcacagtaattggttggaaattgtttctctacatagatattttcaatattttattctttttatatttttttattgaaaaattatttagggtaataatttcaaaaccctaataattgtctccgtctctctctcctttctcaatagcgctagccctctctgattttttatttttttttatctcatctcttctctctatctcattctctccaaaaccagccatctccaaccctcc

SEQ ID NO: 82910 - DNA, 852 bp, Cannabis sativa
tttatttcattgttttagaatattaggatgttaatgaaacatacatggtagtaagtctagatcctggtaaaatatttccaacacaacgaccatctcgagcggatagagacaatgtatacacatacttaaatagaggacatgtatccaatctctttcaaaggagaaggccaacgcaagatgaagcaagttcaagctcatgacaatcaagtctcgagggcatagtcggtcaagcagacatacgcgagaaagaagtagaacttgacgttattacgctgaccaggaaagcatgagcaatacgcgaagctaccaatctgagagttattcagagacaagatctgtaagttattatgaatgaaggcaacctgatctttgtgaacacctaaatcgaagacaacctatttttcgggagcaactaaaccaaaatgcacctgatttgcaccatcaactcaatcaaaatacaaatcaagaacaagtagatcctatccaactgcaaataattgaactagaggataagttcagaaagtatcaggatggagaacatgaaaaattgcctggctacgactcaaatgaagaggctgagcaactccatcccgatatcttaaattatgattttcctcaaggattcaaaaacccacacgttttgcagtatgatgggactacggacccagtcgccactacaagaaaaaatgctttccttaacatatgaatgtaactcatttcaaaaagtgttatactagttaagacaagcattaattttgtacaatagttaatgagttttagaaaatattatggtagctcaaatagaaaattaggcggggtatatttttttagaaagcccgctaagaaataggc

SEQ ID NO: 82911 - DNA, 556 bp, Cannabis sativa
agctggtgggttttttttttttttcttaaaaggatgatttttatttcaatgacagaaaatatatgttcaacggtcaaacacgttaaaattggtgcggctctcctagctgtgcgaccgggtctcctttcatcttttcctttaaatctgtataataataataataatttaaatttgttacttcgtaaagtgattcttttgttttgaacaagaatatgatatggtataatatttttttaatttttgatttatttatgtggcagattctgagtggtggttgtaacacatcttttaactttttggtatgattcaaagtacacaataatagtttgcttaattccagctacatacgaaggtcagtgaggaaaatttaaaataataataataataataatgatatattatatatttttgagtaagctcaagctgtaatgaaaaataataaaaaaagaattacaggtatgggactatttcataccaattctttatccatccataaagttttcttaccttccgaaccaattttatgagctaagtcattgccttgctaggaatataa

SEQ ID NO: 82912 - DNA, 612 bp, Cannabis sativa
tgtttgaaatttcccagttggaagtaacttgcatacttcttgaaattgctctgaagttgtaatgggatagtaagaaactgacatcaaatgcttgatgaaataagaccacctatctgtgatgcacccaagtaacaagagctcctgtttccacagcaatggagttggaaataattaaaattcacataacactataagcacatgattttttcactgattttttgtgaagccctgtaaaacaaaagagaatagagtataacttaaggataagactacttacaaccgtgtcacgaaaatcatcatcacttctgtctgctgaatttttcaaccgttcaagaacttgcacccactgaatctttggagccgaaaatatcatgctggcacccgagaccatatgaatagttctcttgtcaagaaaataactaagattctttgatttccagtggttccatgtcacaaaaccaaccagctgctccacaatcctgtacactcataggcagaagataaccaattcaggtcaaaacatgcaaaagaaactaacaattccattcatcaattttcgaaaaacacacaattcaaagagggatttgattagatttaatattgcaagctcac

SEQ ID NO: 82913 - DNA, 876 bp, Cannabis sativa
ggagaaaggagggaaggatattagaaaagagatataaatataaatacggagggaactctctctctctattctctctctctctcttctttctctctcttccttcgtatggttctgtgtttgtgtgtggctctgtgttcgatacggaatgagagaatcgcgcggacaacaagaaaccaaggtaattcattcattcattcattcccccactctcctccaatatcagatctcttagggtttggtttccatgcggtactggttttttcaacttttgattttgatcaaattgatgtgaatttgtgtgtgattttttattattgatgcggaatgtagatggcgttgaattggttgtacatgcattttgagatttttcgttgagaaaaacgaatatattgctttgctggtttgatgatataagagtgagaaagaaggaaatggattcggctaggagttggtttcagaagcttcaaccgagagataagttgagaaattcttctaggaagaaggatagtttgtctggagatctagatgaggaaatcgatccacaaatggatgaggaagcgctttccaatatcacgaagcagaaggtcgctgctgctaagcagtatattgagaatcattacaaggaacaaatgaagaatttgcaggagagaaaggagcggtaagtagttcgtccttgatttgatttcttaaattttttacttattgaaatttgctctttttgattttaatttataaattttgtttgtgcttaaggccaaacaaagttttcttgaattctcattatatcttaatttattaatttataaatgttaagatagttgaccaaaatcttaagactgaggattattatatctgtttttccaaaaaaagaaaatt

SEQ ID NO: 82914 - DNA, 1232 bp, Cannabis sativa
tgatttggagagaggatgaaaatgtagttattgtctattgcacataatgatcattgtgtcactatgttttttgaaaggcacatgtcactattgaaaagtcatcaaaacaccaaagaagagcttttgacaaatctaaaatttagagaagtaacagggaatgttagggtcatgaaacaaagaaagccttattcaacaaagtagtgaattgttacaaattacaatcggtccaactttgatatgttaaataatgtgaagccataggtttgtttgatttggcattcacattaagtcgtacaactgagttcatgttcagtaaaactatattactcttcgcttaatcagcatttttcccgggcatacagtctcagattaaactggttttattaatgattaaacttcttatctcatcttaaaaacaactcagtaatgtcaacttttggtagataatcagtgttctgctttttcaaaccattggcaataaaatttaccaatgtaatagtacactgtaacatagcatgtttccgtttgatatatccactgaacgagactttatacatatgtatgaccaataagtaatcagaagaaaaagaatttaaatataaatttttagatttggtaactgtacatcatgtaccataggcgggctaagcccgcgcctagagcccactcattttaggggcccaaataaaaaaaatacctttttaataatttttaaaaatactatttatataataagggtctaaaaaaatttttttttgcctatatcttatttcaactcagggtcggccctgtttacatgcttctgtggctatcaccggggtaccagctcagtgactgttgcattattggcagaaaaagtatttggacgtgataaagcataatttccatgatgatcttcaattattcttgaaaaagcaggcattttgggaactgccactgcagcagtttcgcaccttagcatcgaggaaacttccaacatggacggcctgtcgttcgcctcttcttggacacataacaaagctatttgcatacatttcatcaccttgaatgatgagtgtgtatcatcaagtgaaggatccatgaactccatttgtttcccttctttccacaattcatatgcctaacattgtttcatgtatgttattcattaatctcaagacaaaataaaaaaataacaaaacaaaaacaaaagggttcattataaatgcatcacttacatattctaggaagtt

SEQ ID NO: 82915 - DNA, 914 bp, Cannabis sativa
gggcaggtatcattcagcttatgagattggtaatattgttcctcaccttgctgaagcaaaatccattctttcttgctctataaattgggttcagctttatttaaatgccggttttcatggctctaacagattgtaaagctatagtaaataaactttatttgtagtataaaatttgttgtaattctgttcttggggatgtttaaagtgtacgtattagatactcagtatctttcaatccgggactaatggtatgttattatgttccaatagaatgcaaaataaggtagttcataattgtgccaattagccactattttataaaatgtacattttagcacaattagtgaaatataaaatgtcactaaatattagtaacagtggcattttataaaatagtcggtaatttgaaatggttctttaccttttttgtaatgccttgctttgtagtccatgctttatctaatgtaagttaaaaagaaaattaatgaaaacaagaaaagagtataataactttttactacttcatgcatccaattgaatatttattaatgtattttatatacattaaatagtatttaaaagcagttcaaaatatcatgtgggttgatatatatggaattaatgcatgttatataaatgactgtaattttatggtatctttgtcaatgtcaattctatatgtctcttttatattgaattcgaatatctaatttttcttacttttgcaaccaaacatttaattagagagttataccataccacaaaataactcaaactgtatcatttattcatttatatatagatagatatacatacatatcgctgaggaaaatagtgatattgaatgaagagaagagaagagtagaatatatgttaatatgtatatgctaatatgcatgttcctttccctttca

SEQ ID NO: 82916 - DNA, 839 bp, Cannabis sativa
ttttacaaattacattatatattagatgttaatcattcgatttgatctaattaatttcagtcatatatttcattggatgttagattaatattggatcgattttatctattgtatttcatatatatctattaggttaatttgtgttactcaaaattttaaacctattattttttggctcagatcgaatccatctaattatattttaatctagtatgtatctgattggatgtgatccatttaacaaaaaaaaaaaaaaaagaataaaattttaatgttaatttgaatatatgccgacctactttatctataacaacataaaattactcatctaaattaaatgaaatactaattagttttattggatgtgttggatgtattagattttatccgatctaatatccaatttgatccaattaaatattcaaaaataatatcctatctaatccgatcacaattaaatatttaatatttagcaatcaattataattgaatgggtcaattattattaaattggatcgatttatcagccctatatacataatataattagctcttccaacaagtatattttaaatcaaaatatttgtttacatgatctatctgaagtaaagaaaatcaatatgctatataaaataatacaatatattaattaaacatagtaaaaaaaatattgaggctaggacatcctctaattaattaattatcgatcaattattatttggcgaacgtttttctttttttttttgaaaggatttgacaaaaaggttcttttagtaagctttaataattataattaataggtacacgagtttgttaattatttattaagttatatttat

SEQ ID NO: 82917 - DNA, 972 bp, Cannabis sativa
ttttttttccattttttgcaaaaaattttcctaacgggccaacttttgttgagttttgaacaactttttggaaactctcattagctaggggtcgtgctcgtaatggtaatcatcttcgtaaaatccatctttgacgtaatcatccttgtcatattcatcctcttaacgattctcaacatccttgtcgttgccaacatggttatgctagttgtctaggtccctttctccatcgttcacattagacgtatacccgcctcccacatcgctcaacaagacgtgctctggcaaggggggtttacctcctccatgaccgtcttaaggccaccttgaagattattttttaaaaccatctttcgtgtgagcaccatggtggtaacagtggtttacgtatatttttttactctcaatgaaagcactaaaatatttaccgagatttttggaaactaaatatttaagtgctaaagaaatgataatttgcaaaaattaagagtggaagattttttacgtggttaagttgttaataaatattagtccacgagtgagtctattagcctctaagggtgttattgatgaatttacagtattttgcatgaaaccctaaccttttacccttagtttctttttgaagaagaagaagaagatcaagggtaattttaacagagttttagctatgtatatttcggcttgactcctttacatgggaatgaatgggcatttgtaggctaagtggcgagtatggataaacccacgacccgtcttagatttctacttgaatcctattttggggtaaattacatgcaatgtagagttaactggttggtctcgtgggtagcatcatgcccgtgcgtgcaacagatggataatgaggatcattttgtaccacttggacatgtattgtgcaaaagttttaacctatcaaagtaagggacacgttgttgggttttatgacctaaataaaactcatttcatata

SEQ ID NO: 82918 - DNA, 1182 bp, Cannabis sativa
atacatgacttgaattgttgactaaaatgtaccaaagttctttcttcaaatcccaaggggcctaggtataaagttggggtagggccaagtttagaagcaaagcagcatagtaaggtctgaaagagaaaaaaaataaatggtttaaagcattttccaatttttttttataaaaaaaggtctaaaagagaaaaaaaaatagtctaaacctttttctgtttttggttaatttattttattggtcaaattgattccctcaatccaactttctcttttcttttcttccaagcattaagcataacttttatgattcactttttctagtttcttttcttttataaaacttccccaaatatgctaaaggagattccttaagtattttattagagacaaaatcattgtgtgaggttttatttatttctttctttaattattgtcactaattaaataaatacatggtaatcatgattaaaattgattatattttccttgtaaaaaaatgatgatattttacaattgacaattctcaattcctaatcttgagcactcacaacaagtgagttataatagctaaaagctaaaaaaaaaatagctaagagcttaaaattaagctccaacaaatgctttaaactcttagctattaaaactcatcctaaagtccaagaaatttttctctacatttaactcatgaatagtaaagaagtaaaacatatttttattttctctctttcattaaattaattaatttttttgttattctttttactcattttcatattttttttattttaattaataaaatatatgtaaaaatataatatttaaatgatatagagaaaaataaagagaagctgatgtatggtgtaatgtaaatgtgtgaggtaaaataaaaaaaaaaatgaagttttggtgaggtattttaaagaatagagtagagaaactcttggaagtgcttttagctagttagttagagtactcctataaactccttcaaaatagagaatctttacaagaatatagctaattggtttaaataagcttccattatgtggtttatattgcatagctaatttacattagctacattatcttcatatatattttattatttttttggtgtactttcattttagttctttctctttctctctctctctcatattaaatcatttaattaaataaata

SEQ ID NO: 82919 - DNA, 1520 bp, Cannabis sativa
caacaatatccctcttcatacccggccaccagtataaagctttcacatcatgatacatcttggttgttcccgggtgtaaggagtacggtgtggtatgagaatcatcaagaagctcctgtctgatatttttgtcggccggtacacaaatcctattcttgtatcgtaataacccattagatggaagtgaaaaatcttttgccgatccgcctctaacttctccttatgcccctgtaacttagaatcaccttgttgggccgttctaatcctttctaacaaatcagactgcatggtaatgttagtaagttttccaatcagaaactcaattcccgctctgttcatatcttcagccagcttttctaaaatcttctttaattcacaaacttgttgtgggccttttcaacttagagcatatgctaccatatttgttttcctagggtaatagagaatctcacagtcataatctttgaccggttctaaccattgacgttgcctcatatttaaatccttctaagtgaaaaagtatttgaggctcttatgatcggtatatatctcgcactttttgctatacaaataatgacgccaaacctttagtgcaaaaacaactccttttagttcaatatcatgggtaggatactgatgttcttactcttttagttgcctggatgcgtaagcaatcactttcacttactacataagaacatagccaaacccctgtttggatgcatcgcaataaatcacaaatttttcatcactgaccagtaaagttaacacagcagcggtaattaatctttgcttcagttcatggaaactactttcacatttattagtccagacaaacttgcaattctttcgagtcaattctgctaagggtgtagaaatcttagcgaagccctcaacaaatcttctattatacattgtcaatcctaggaaacttctaacttcagttgctgacttaggtcgaggccagtcctgtactcctcaatcttcaccgaatccacaaaaatgccatctttatttaccacatgccccaagaaactcacctgaggcaaccagaatttgcatttcttgaacttggcatacaacttatgctccctgaggcgttgtaacaccatctgaagatgtctttcatgtgtctcttctatcctaaataaattaggatatcatcaataaagacgataacaaaatcatccaggaagtctttgaacactcggttcatcaaatccataaatgctgccggggcatttgtcaatccaaaagacattattgaaaattcatagtatccatatcgggtccgaaaagctatcttgggaatatcctcttcccaaatcctcaacttgtgataaccagatcgatgatcgatcttgcagaagacggtcttaacttataggtgatcaaataggtcatctatccttagtagaggatacttgttctttactgtcaacttgtttaactctcggtaatcaatggacattcgtaaagttccatccttcttttttacgaacaaaaccggtgcaccccaa

SEQ ID NO: 82920 - DNA, 563 bp, Cannabis sativa
cgatgccaccttgttttcatatggcaattcaggcacatcataagtcccgcacagatcaataatcactacagccagcccaagtccacctcctgtggaaccctgaacagttaactcaatgctaccctggacaacttgacccacattgatattgtaccttcatgatggcgtacacatatttcggtcgatccatctgaacatcggaaaagtgcttgctcagcaccaaccaagcactcacaaagtacatccagattcttgccacaaggttgatttcacaacagtacagtaaactgggcgacccatcctgcccatcattatcgtggaacctgaaccccagaaaccccatagtttcagtgacattcacttaatcaaattgctcttcttcttcttcaataatccgcaagcgttgatcctctctagtgtaatcgggcaaggcatacattgcattgatggcatcagatgtggcagggactttcttgccacgtaccttaacttctccatttcttcgttcgggccaatttgccaaaaaattcacaagccatagtaacattggctcggtctttagc

SEQ ID NO: 82921 - DNA, 1021 bp, Cannabis sativa
agtctagtcttctttatttcacattggacgataagaatctttctgaacttttaaattttaggtacgactcttgtagttgtattcatgcattaatgttgtgagtattatctgtttatgtagcatgctatacctacctattttaattatagtcaattgagtattgcctctattatttgtaagttgttgttgaaataacttgtcaccatggaggttgtacaatggataactctttggaatttattcaaggatgagttcgagaatgagaagaatgtgtttggaggggtggacaaagcagctgtagatttgaaatatagttcctggtccaccacgttcgcgttatgtgaaaggatttgggtatggaaactcttctcatctattcccatcaattgagtgagaatacaaaaatcaaaaaatagtctatggaagaccatatacccacaatcttatcttgtatccaatatcatggaatcatgtatgtcttccatcttattgattaataaactaatcttgatagtctgacatgagtttaagagtcatatatattttaaatttagtttctaacatattatccttttggatttgtgatagtttagagtattttatgtttattttcttaagtttttgttgttatatatattttgtttagttttagtgttaattttttattttggtgtttttggtaggaaaactttgcaagaaaaataaagctaaaactttaaattgaaattcaaccatgttctgttcagatttaggaaaaaacaaaacataaaagttttagatgtctttcttagtttttcaatacatcttgaataagctcatttagagtttgtgtttaaaagttatgcgcacttgactgaaagaggtcagagtagtaaaatacttggataacaagcaatccgtgagcatgggcattttacatgcaagtgcaggtctatacgagttgggcttttctaattgtgctttttagagttaatttgggttttagaattatttttttagcatagtaaggagaggaattaac

SEQ ID NO: 82922 - DNA, 987 bp, Cannabis sativa
attattatggttgaggccatctatcaataatatcttctaactctcagccccttaaagatctttattctttggtggtgtttcttaaggctacttttttcaacaacaaaaaaaaaaaaatctatcgaaggcttaaaattagtataaaatttatatcctacacgtatacatgtgaatgagctcatagtattatttaaatttagactaactttcaaattgattataacatacccaataatcatcatcaagaacataagatactaatattaattttctgcttgcaaatgttttaactaatttgtacatatatattgttagattcctcaaactcctatagcttcactcccatatatccttctatacatatagcataaaggagtgcacattctcaagcaattatttgatgtttcccaataagagtggcctaggagcatgtaacatcattattactcttattgtggttaattaattaagaccatcaatttagatcttaataatgaaagtgcagcagtacctttttcaacaatttcaaatttgaaaattggtaagactaattagctaacaatatatgggttgaaacattgaaaagaagccttttttatcactagatgctatacattatataggtaattagaaaatcaataagcttttgtgaaatgattaaggtaacttggaagcatgggtattttttatttcttgcttttgttaaacacccacgaaagtaataccattgaaatcatagccaactttatcttcttttcgttttccctaccaacaccaagcatggatgaatacatggaccacccatatatatacatattttatatttatatatattatgaatgagattgatctaacttctaatctagctaataaataaactaaagatcttgtgtctgtatcccatgttgtaatttgctgttagtggacccaatttcttcctaaagctagcatagttgcattaattatactgcattgcatgcattggta

SEQ ID NO: 82923 - DNA, 911 bp, Cannabis sativa
gctaaaaaaaactttcatttttaaaattacacaattttttttttttaaaaaaaataagagactaaaaataatatttttcttatattggttattgatgggttgttattttttatttgttgttgcccactcacccatgtggaccttggacttgggtgatcccaaacttcaatacaattatgtactatttgacatttttgctatatctaatttaacttttattaaatttttttaactctttgcataatataaaaatatataattgtcctactttaattttatttttaacttcatcatgttgccactaattaaaacttgtttttgttaaatcgttaaataactatattttatatataaaatataatcatttatttttatcaatgaaaaagatctattatatatctctaatagtgttagagatgcatatgatatgaccccttggtttttttgttaagcaaatgttaatgtattacttgtatgtacttaaagaaattaaataaaataaaatcttttattttattttattttattttgtattttgaagtacgtttgaaagataaagtactgaaagagtttatatttaaattaattaaagttttttctttcgaattattaaaataaagtttaattaaacaaaaagtctaatgactgaaaaaggttaacttttatttggtgcttcagctttccagctactaaattcttaattttatttccattttttcttcgaatcttcaaacaaactttaataaagattcaatcacttttttatatattttctataattatttacttttattttaaatatacaaaattagccatttcttttcagtattattaagcttatgtatcatcacaaaaaattaataaataaaatgaaatatggtttggtttttattttctttaagaacaatcac

SEQ ID NO: 82924 - DNA, 1651 bp, Cannabis sativa
aaaaaaaaaaaaaaaacatattaagacttgttttaaggaattctaaagtatattttaatgcgggtcactatgagaatcgtgaaaagtaatttttagagtttcaaaatgtggaagaaatatatctaatttttctatttatgaaaaataaggcataaagggtaaattggatgactcatcatttttttatctagctgtgtatatctgatcttgtgtgagtttcttaatatgtttgatcagatttcttgtaaagaaaatcgaagcaaattttctttttctacaaaaagaaacttgcacttactgcttacaattatgtaggtgcagaaacacaaatttctgggctgattgaagatctattttaagaaattatctagtgagttgtggtcttttcaagtcttgcctcgataggaagcaagcactcttcaaggatattgaagggagttcgagcacttgaagtttcaacaagattcgattagaatgtagaatacatcaagcttgcgacatacaataaaagggagtctatttatgcataagtcaattactttgtatttttgagatttatctaatgaatcttatctttgggcgtagccccgtggactagtaacaaactgtaaggattgttgatactacgtacaaaaattttgtatatttttactttcctgcactgtttgttttctggttttattctgtagttatagagttagttacaaaataactattttagtaccatatatattattttgcatttaattaattgactaattaaataataaattggtaatactaaaatacaaaatttcaattggtatcaaaacaggttattaaactcttagtgagatcttgtgattattttattttgtgttagatgtcgctgtttgcagaaagcagctccattactcgaacactcctgttgaatgacttgcattatccatattgaaaggtcagaatgagagcattcattaagtcacaagatgagaaggtatggagggctatagttgtaggttggtctcgacctactaaaaatgatgatgaaggtaatgctaaggtataacctgaacttaattggaccactgaagatgaaaaaatatctggttataacaataaagttttgcatgttatttttaatagtgttggtgaaaactttattaaattgatatcatcttgtgattctgcaaaggaagcatgggaaattctttaaattcaatttgaaggtaccgttgatgtaaagagatcatgttttaccatgttgcaaactagattcgatgaattaagaatgtcagaaactgaaacattatctgaattttatatatgaaagattatttgatattgctaataagttttttgccttggcaaaaaaagtagatgaatctgtgctggttcagaaaattgttcatgtgcttcttgacagatttgatacgaaaatactagcaatggaagagacaaaagattttggtaaaataaaaaattgaagagctcatgggttcattaagaatatttgagttaaatcaacaaattaagaaaaaaaagtaagtcgaattctaaaaatgagaaaagcaaagtgtttacccaaattttgatgatggtgacatggcaagagtaacgacatgtggcatagaaatactgggactacatcattaatggagaatatgtaaag

SEQ ID NO: 82925 - DNA, 868 bp, Cannabis sativa
  modified_base (830)..(842): a, c, t, g, unknown or other
attcttacatatttacatatttttctttcttacaattaatgcctcaaaaagtgattacccaaaatatcgtaaatagtacatacaaaacacaagccctatatttatataaataaaaatcacttagcgagctaagctttgacctaaattagaaaacgttaattattataaatactcaaaatattactcccaccccatcaatatatataaatataaaaataattcaacgtcgagattatgaatatatatttaataattttgtatattcttatcattggaatggggaattttaaaatatgaagttaattattttttattaattataacatatataccagtttttttattttataagagaaggtttaatttattataatgacaactaaaaacttcgtcatcccttacgtacgtacgtaaatggcgtgttccattaattattaattaataataagaaccggaaagtacgtgaaaatttcgatcaaaaactcgtacgtgatactttatgcctaaataatatatgtctgaaattaataaataataaagaattacttccatctatatatattactactctatttgtatatgtagttagtttctgtataaataatcaataatacagacagagatagtgaatttgaaaattttagcttaattattacactcaaattattactatatttataaatattattttttattataaatatatatcgtagttaattaaaatagattaattagaatttttttccttaaactttaatatgtacccaattatattttttgattttttttttttgtcgttaaaaattactcttgaattattgagattgttnnnnnnnnnnnnntttgtctaatttcattcaatttaact

SEQ ID NO: 82926 - DNA, 548 bp, Cannabis sativa
catagaattgtaacaagatggatgccagaaagacaacttaccccatcaggtttgaaaaccttccaaggctgtaatgaaatttccaccacaagatcaacattctctgatctttcccgaaatgaaggatgcttctcgcagagagtttgataactctgttcaaatatcaaatatccacaataggttagacgaatgattaaaactcattattggaatcaataaaacattgcacgctaattctttttaaagacagtataaggacacacactaagttaagagaaccaactaaccacaatgtgtgttagtcttgtcaacgggttccttttacacacaaccagtagttccgcagtaaatgcaaaatctttaactagattgggttttagctcaggtgctttcattacttgtacaataatttcttcaaaacaaggttcataagcaaaaaaagaactgagggaagtgaaaataaagttaataaagacctgccttcatgtacctccctgcttgcctcattagccaaactgggggcctttcaacatcttccccacgaacag

SEQ ID NO: 82927 - DNA, 1177 bp, Cannabis sativa
  modified_base (1149)..(1151): a, c, t, g, unknown or other
agcttaagtccaaactgatcagcagagttcttaaaaactctagtttcaataacaaaaagcaaagatggcttatacattttgaccagtagggagaggtttcggaatgctcgatcactccccaatccttgagcattctagctaatgagaatcatgtctcctggcaggcctgtgtttccacaggacctgcatcttcactggacgccacttccaccacttcttggcatggttgtggcctatgtctcgttaacatttccctcttctcatttccaactgttgtcagttgtctcttgaaaccagatgaaccaggtgattggtttttccttggaggtgcacgatggggtggaccatcactacttccaatggcaaatgagagggaagtagggagacttgcaatatgggtagttggttggggttcaatcgagtggtgtggaggagaaatcatcaacggagcatttagttggctagaggagggagaagtagagctacgtgatccaggggttgagggttgttgtggagaagtagagcaagataaagctccactgtttgcaattgacatgagtgcgacaaaagaggggccaggggaacatggatttgaggatgtaatggtgaattttggagagtaggaatgggcacaatttcaggggcgatatgagtatttgaattgaattgagtggggaggaagaggccaacaatgtcagtgtaatttcctcaattattatgaaaagaaaattcctcttgcaggacttggccacgaggatggttcacagtgatcaggttgtttgtgttttggtttagcattgggcagattggttttaaggaggtggtatagagtgatggaggagtggatttggaagtagaaggggcccaaaagggccaaagtttgggcgagcagtacctcgcaaaatgttttcataagggagggatggtggttggttagactcgtcagaagccctcatatactcagtgcaggcagaatatgagtgcccaagatagccacaatggtagcagtggtcagggatatcctcgtatttcaactcaagccaggttggggaagccattccaggaaagagaattgggatgccacgagagaggggcttggtgacatcaaacatactccttacccgaaggtagtgttgggttttatgcccnnnataaaactctttacaatctgattagt

SEQ ID NO: 82928 - DNA, 1652 bp, Cannabis sativa
ttactttaagaaataaaatcaaactcgataatataaatatcaggttactttttctaaataatagagtttttcaaaacactctagcttatccacagataaggtaccacactacttttagaagcaaaatcaaaacctaaaatgtgaatattaggttacctttttcaaaatgataatagtgactcaaaacactctagtttattcaaggaaatcaaagcgttaattaaaacatcatgtcaatatttcaaaataatagattacataagtaaagaatatacaattgtatgtgagtgttaacaataaaaataacaagaaaatttaaaattacaattataattatttgaagaaatcactcaataaattttaatgtttcatagttttttctattttttttttaaaatcaaatcaaataaatttttcatgacctagtaaaaaaaacatggtgaagaagaagaagatcgatggagaagaaaatatcgtcagcgaacagtttaatggagaagaaaatatttgagaacaatcgcaccaagaaaggaagggagtaaactgttcaatttggaggaatgggttgaaatatggagataccatttatatacgaatctaggtatttccatctttttagtttttaattttttttttctaaattttaaaatatttatttatgccataaaaaagtaaactcttataatttttctttgtgtaatttctactttctttgtgtaattgcattatacacccactttacctaacatgttttaatttttacctttatttttatatttttttaagatatatccatatttatagatgatgtctctattataccttttaggttaatgcaaattatatactatatttaagtagaatgtgagagtatattgtgcaaccctccctcaaaaatgagtatatttcaatgaaatataagataaatatatttttaattaatagagtattactcaacttatccgactaaaattggattagaggaaattacatgatatacccactttactttacttgttttaatttttacctttatttttatatcctttaagatatacccatttttataggtgatgtccccattagactcttaggttaatgtaaattatatgctacacttaagtagagagtgagagtgtattgaacaatctactcagaaaaacgggtatatattaataaaacataataggaaggtatttttgatcaatggatacaaaaaaaagtggtatttttcaacttatccccaaaaatgtgttagttagcccaccatgagaagcccaattttaaaccaaagatccttggaaagtcagcagcacaacttcctttttggctctatctctctatcggccttttcccgttctgtcacttaactaatcagcgaagaaatattatcatcctcgttcactaactgatcggagatcggagatcggagaggaggaattccctgttcactcactggccactggataaagatttatttcactcacaacaggtactgtgcttatggttttgagttttctcaagtggtcctctctgctgctatgtatgttgttctacattggcaatctacatggacatgctttagctattatccatttctcttttctttttcttattagttaggtttttcattattagttcataatgttcag

SEQ ID NO: 82929 - DNA, 757 bp, Cannabis sativa
aacaaacataagaggagtaactcaaataatcatgatttgatttgatttgtgttgttaagagtttttttttccaacatttacatgacaattcttataagaataaatatgatttttgctctcttaaatttttacctatttgtgttctcaaatttttcatgttattttaaactcttttaaattattataactattaaattgtatccttatgtttaaaattcgagaaattgtttgataataattatagtttggggatacaactcggcaattcaataataatttaaagagcacaactcaacaatgataatacttcatgtagtgtgaagcaatttcgtgtaaactttattcttttagactgattagatgaacgatttagctgtggtaaaattcaataggcacaatcatgtaatggtaatagtaaaaggaacacatatcatatttattctttttataatttattagtccccaaatgtatgaaagccattaaaaatgaaaggatgtcaaaagagcctaagtagtgtggaatgtgcatgaaagaatgacatcaattggaggcctcaactttaatatgtcaatgttctaaacaacaatgctatgtgataaaaaatcacaagtaataattggtggttatgaataatttcagtacattcatgggtactactagccattcgaatcgattcttcgattgcagcatggttttcagttgtttttgagatgaagttttctgcaataatcgatgagattaaacttacactttgga

SEQ ID NO: 82930 - DNA, 1272 bp, Cannabis sativa
ggagggaaaattgtgattgcatgggatcctaggaagtttaatgtggatattctcaagtgcactagtcaactaatgcacttaaaattggctacagtagatggaaatttttgttgttttctcacggtggtctatggagcaaatgaaagagaaggcaggaagaccttatgggaggatttatgcaaactggatactaatgataaatggctactaatgggagattttaatgcaattttggctaaggaggaaagagtcgggcataaggtgaagtatcgcgttgagacagattttcttcactgtgtgcaacaatgtaaattggaagatataagggcaactggatgttactatacttggtctaataagcagcagggacatgatagaatttactctaaaatagatcgggtgttggctaaccaggaatggattgatcattacccgaatgctgaagctatctttgttaatgaaggggcttttgatcattctcctagcatgctatctttgtacccgaattggagaagtggcaagaaacctttcaaatactttagaatgtggtcatcacatcctatgtattctacaaaggtcaaggaggaatggaataaagaaactagaggcaccaaaatgtaccagattctatgtaaattgaaagctctcaaaccagttttcaaagagattaataaagagggattctcggatattcaggcagcctattctcaagcaaagaatgattgaatttgcttcaagaccagttgcaacttgatcctctaaattcttctttgcacactgcagagctagaggctagagacaaacttgcagctacttttaagaattacaattccttcttgcagcaaaaggttaaggccaattggatacaaaatggtgactgcaacacatctgtcttccatgctagtctcagacagcgatataggcagaatcaagtactatctattgtcagagaagatggggtaagagtctccgaacccaaccaggttactgaagcttttattgcttattataaaactttgcttggctctaagatgttgaacaggaagaaagtatccaaaaaagttatagctgagggaccggtccttgattcatctcaaggggctatgctcatggagacatttactaaagaggaggtgaaaaggcactctttggcatccctggaaacaaagcacctggacctgatggttattctagttttttcttccaagataactgggatcttgttggggaggatttgtatcaagcagtgacatcctttcttgaatcagggag

SEQ ID NO: 82931 - DNA, 1666 bp, Cannabis sativa
aatttaattattagttataattatatgtgcattagtagaaataatccctattgtcagaaataagtatgtgtgatataatttctcaattataaagattttattgaattctaagtgtgtcatgcatgttatttatgaattatgatattttcatgttttatgtttggtaacagtcgaactcgacgatttggccattaaagtcatttagacacagtttagaatctaagaattagtggggtaagatttatggacacttatagtatcgggattatgggataatttgttatgaccattttatccctaattttaaagattacttaaaaataaagtaagggtataattgtatttttttgcttaagtttattctaaaaaatcatagtggaattattagtgtaagttaaggtttatattggaaaattacttggtttaatcaagagaaataaaaattagataaacataaaataaaatctaaccttctctctccttatctctctcggctccaaagataacccaagaaacccaacaccttaatttctgagttagtcatcaatttcacaaggttttcaacaaggatttggaagaaaattgtctaaaaagaccaaggtaatctaagctaacttctctctttgaattttcaagatttagcttgactttgatatgtaaattggggaattcttatcggcatgggtttgcttgtgttagaaattgtttctaagcttgaagtaggtttgtttgtggctattttaagaagctattggtggatgtagtgtgatttgacctaagtttgagtttttaaattcaaactgcgcttaacaatggtaattttcatttcaaggtatatttggtttgttatttgatgaattatatttagtttgtatttgagatgttctggaagatatgagtaggtttgggtttcaattgaggacaaaaattcaggtttggtgatttctacacaaaaacggttaaccgacagaaccccagtaaacagttactatttggggatcccgataaccagttggggtgatttttgagtaccccaattttttttattttctcgatatttagggtattgtcacgctatttattgatagggaaagttctagttttaagtttaagtccctaaaagtgttttagcgaggacacttaccagtttgaacgttaatatgacttagggcctctgatcgtcgagcagtttttccactcaggttgcacacatgattacataatttaggtaagattagtataataaatatacatatgtacatgtttcaaaaagtacgaaccaatgctactaacactactacgcttagagtactgagtgcatgtggtattatggttggtttatgcttttagcgaatgcgaacttgtgctaccaacactagtacttttagaacactgagtgcatgtagtattatgattaattttacttatagtatggattgatgctaccaacactagtatttttagagtactgagtgcatgtgatattatggtcaatcatactatagtaaagaaagttcgagactcatacgcgttggacgcaggtttgagatttggtaatcatgtgtgtgcacctagttgcaagtaaagttatatgtttatgttttatgtttttcttactcagtctatcgactcacatgtacgttttctttgtgtaggtaaaggcaag

SEQ ID NO: 82932 - DNA, 772 bp, Cannabis sativa
aaaaaagaaaaaagtggcttatcccattaatttgagttccttctttcaacgtgtgtatatacattggaatgtggaacatgcttaaaaagctttccttctcttaatttgatttcatttgtgaaccaaaaaacacagagaaccaaaaaatgtcaagagtcacaaccgagtcgccggtcaccgttcggagccgcttagccgtactctcagctcatctagatgctgtttccttcgaacccaatgacctctcctcatctctcgagccacactgcgtctcctctcggaccccaattcaaccgcctgggaacctcaagggttccttgtccatcgttgacgagagaaccggtaagaagtacctggtccaggtctctgaagaagggaccatcaaagctactgatctcaagaaggtatgtcatgtcctctacggagtatgttttgatgatcatatacgattttgctttgatttgggttttgttgaattttcatttttcttaatcttaattttgttttgtagtaaaaggacttttattgttgcggatctttggaatttgtagaaaattaacttgtgctttgtgagtttttcagataacgacaggaggaaatgacaaggggctgaaattatatgaccctggatatctaaacacagcccctgttcgatcatcgatatgttatattgatggtgatgaagggatccttagatacaggggctacccaattgaggaattggctgagagcagtacctatttggaagtggcctattgcttaagtaagtatt

SEQ ID NO: 82933 - DNA, 1292 bp, Cannabis sativa
aatttttattagacaacattagatgcttgagatcgtttatgctgggaggataattcacttcgacccttggtcaggatataaacaccttaagatgactattgacctaacactctaaaggtacttttcaagttttattttaaagttataattttatttttgatttataccaactatagctaattaaatataatataaattattaaatttaattagggcatatgaagtacttggaggttctaacgagttacttggaacatttttaggagtaactcctgtaacctgtccaaaacaaacatttggaaatgaatgcggtttttatgtactaagatacatcaataacattgtgaaagctctaaatttattaattcttataaacaaaaatgcaatgaagttataattaattcatttatgtatacctgtaaataggatactaacttataattaatgaattattacatagaaaaaaaaccctataattaagtaatatataactaatttacacattaattttatagtttggaaaaaagaaaaaatacgatgtggagacaatgatgctacaagtgcaacatcaatagttataaaaattgacatgatactggaactagctagctttagacttttaattgtaagcaatacttattttgtgtacgcttttttattagtaagaacttagcatgttttgtaatgtatactttgactttgttatgatataattagaatatattttgtacttgttatataattaaattaatttttatttaaaagtaaatgttattcttataattaatttataattgttttaaaaaattaatatatattagatttaaagaaatttttaaaaaataccctacgtcttcggttattatataacaaccgaagagaaaaatggccctacctctttgattattactaataatcgaagacgtaaatggagcataacttaaacgggaagaccctacatcttcaattattgtataataaccaaagagataggtcccttttttcttcggtagttataaaataaccgaagacgtaaatctacctatatcttcaattattacataatgaccgaagacatatgccacccttacgtcttcggtatttttagaacctacgtcttggtctcaaataactttggtagaaatttttataaaatagcgaagatagactgacttaaaaatcgaagagaaagaccttttctttagttgtctaaactgtggtttctcaaaaatgataattactacaatggaggaagatggcctttccaagagattatgaggatttttactgac

SEQ ID NO: 82934 - DNA, 513 bp, Cannabis sativa
ggacgatacccattgatagaaaagcttacttactacctaatcttagcaacaaggaagttaaggccatattttcaggctcatcctgttagggtatacactgaccaaccattacgcatagtattgcaaaaacccgacgcttctggacggttacacaaatgggcagtggacttgggtcaatacaaaataatcttttaacccaaaacaactatcaaaggacacgccttggcagaattttcatttgaattcataggcaaagaagagagcagttcaaagaacaaccatgagccagtacaagagtcccaggcaaacaacaatgaagatagacctacctagaaattacatgtggacgggtcaactatagatcaactgtctcgtgcagggatctcccttgtcacacctagggggcaacacctgcatggggcactcaaatttggattcaaagcttccaatagtgaagcagagtatgatgccctcgttgctggtttaaaacttgctcgagaactggacgctgaa

SEQ ID NO: 82935 - DNA, 656 bp, Cannabis sativa
agctgaggagaagttgatcttttcctttccagttggtgaactcaggatcggtctagcatgtaatcaatcgttcaggtggagacattccttcgagaaaaatgtcgtcgagtccatggccaatgacttctggaatgacttgagatttctaagccagaaaattggatcgatccaatttgactgtaaggagtgaagagacttcttgaacgaattccaaggtggattgaccggagtagtggctgcagtggttggagcttgagctatagaacgaggtggatttttagggtgacgaggatccatggaagatgttagtcaaggactatctgataccatgaaagagcttatcaatgcaaaaaggtctacacaaatataatttatgagattgtaattcaagacttgcaaaagctccaaaaccttggaacaaggattcatttatatagggaatgatacaacaaagaataaagaaaaaagaagtaacagaaaactaacagagttagtttgttggatactgttacaacaactactttaacgaattaacagaatgttcagcaatagcacactacaagaaatgtcactttttccagcacagttcgctactccgctggtaaaagtttaccagcgcatttcgcaaactacactggcaaagaggtcaaagtttt

SEQ ID NO: 82936 - DNA, 1761 bp, Cannabis sativa
tatagttccataaattttaatcaacttaaatgtgtatacggtttttcttttttagttaaaataaaaattttgatcgtgatttctttcttcgatgaggcagaaaatctatatacaacttgaataaattgtatataaagtgatctaaataaattgtaacactgtataaacaatgacatagtaataacattctttaattttaaataatttttaactataataacatttaaagaaattgtattataattttttttataaagttctttatataattacagggttactcaatattttttttcacacataaattttttaaaatttaattatttacaacctttaaaaatactttttaaataataaaattaatatattataaatattttaaattttcaaaaattttataagatgcatcaaatataactataataatgcattaatgcacccattttaattttttgtaagaggtcgacataaaattttccaatgataaattttttttcctgggaacattttccacaaggtatctattattagtattttactatattttgaaatgttaagtcatgttattaataaagaaattactttatatattatttttttttttaaatttacaatttgagttgctctaataatttttacgtgggttgctatgtagattttaattatgattaaagttgcttcattaattactataaaagtttttatattgaattctgtaaaaataaaaaaaaataaaaactattttaaatgtaaaaataataaaaaaaaaaaaccctattaacatgagatttacacttttaatttaataactaatatataaaaaaaataatcatggtcttctatgaaataaatatttttacttgttctctccctaccaaatgctaattcttgtggtgggttcctcatatttattatatatcaaatcaaaccctaacaacccgattcacatccaacccgactcagactgaatattctttcatatacattggcatatattagaaattagaaaaaacacacattgattagatcgagaataattttcctagtctttttcggattggtagcaagatttcaacgaaaacgaccttcacattaaaaattaaatccataaaaatgcatgcaatgctagtccatatattgcaatattatattcaacgtaacgcattgtatattaataactatcatacaagaaatattatcaaattaattatatattacttcaaacttaagaatgagacatatatgaatcttataattaattagtcaacacatagcaatagtcattgtcgtatatataaactcagtgcataatcgccgccgttacataatacataaatctatttataactatagatcaagtgaagtggattaacttacaatatataaatagatatttaatttattatataatatatataataatagaaaaaggtgtgaatgaatgatcctgaaaagcatcactgtcactatagtgcaagtggtactactaattaaaattataatttgggggattgtttgtgtccagattaaatgaacatattttgagaagctgcttcctaggaaggttcttcttctccatatatatatatgtttgttgtttgtatagagatattatatatggatagcaagctgccaagttggaccacaaacctttttggtggctcttttcaactcaagatgttgctacttataatattcaacggccgactacggataaatccttatggtaattcattttgcatatatattgaggaaaattta

SEQ ID NO: 82937 - DNA, 756 bp, Cannabis sativa
taactatctacaacaaagttaggtatatatttattgactgtgtgctaatttaaaggcatgaagtgaataatgttgataaaaaagtaaatgcattgatatggaaagctataataagagcattgctataagatactagtggtgcctagcactatctcgacatgtcgcattgcgattggctactccctagcaactattatattaaattatatgggacccgatacttaattagaccaataacgatattgacacatagaagggtactagacaccactggtaccttctagcatttctcctataataataatggtaatgtatagttgaagatttgtacttgtacacatacaaataaaaatacacatggattgtggacatgcatgtagttgattaataataattgactttgactgatgagtgtgagattggagaataaagagaaagtgattattacctgcaattggtggtctctgtaaaaaggagaaaagtatggtctcttgatatttgaactccattagggaaagccaacccatctagcacaacatgagttgttttagttggaggatcatatctcagaagtcttccagtggcttctccttccaataatatatagaaatgatccctaaaattcaaattaacatttccattatattgtcatgaaaatttccaataacattatatatttgccaaattattctaatatcattgactaattatttcatcacttgatcatggtttaaattagacaaaatattttgacca

SEQ ID NO: 82938 - DNA, 1035 bp, Cannabis sativa
ggttgaaactttttttttttaattaggcgtgttgtacttaaatttttgtaactcgatctttacattaggttaaataaaatgtaacgtaaatcgaccaaactgaccgacgtacgcgtgactattatattttatacgcgtgtaaaatagactatttgaatattattttctaaattataaattattccgaatttttcaaaattttgtaggatatcttaaatagttataacgtacatgaatatgaaaataaattgactaaaaaattaagtagaaggtacatcaatctatcccttttaagggagtacactgtagaatcaccttaaattattttaataaaaaaataattttaatctaagagtttttattataataataaaagtttacgtgttaagttctcatatttgcagttaatttttttaagatattttactatgataatataaatttatttttaaattctgatatttattctaagatatgctatataaatctaaactaattgaagaaatgcacgtatgttgagtcttaagtccggttctttattctttctgcactaacctctcatacattttttatcagcctttatttttattttttatgcaatttccaaaataatttgtggccattgtatctaaattttcaacgtcaactgttatatattctacttgattcgaaatgaggtatttttttcctactaatattgatctaaatattagaatgtacttattgtgttatatatatggaatgaaaaaaattctcactatcttttccttttaatttatacagacttttatatataaatgaaagcattatgctttatgtaccctctaaaaagaaatttaatcactgcctcaagagatcatctaccaccaaaatagtcttacatatcctctagaagaagaaagaaaaattattaggatctttaataaaaatatatgtggtatttttaaaaattaatataaaatatgtgtattttaaaaataaaatattttttagactatatacctagacccagccctatatctttatatattaaaa

SEQ ID NO: 82939 - DNA, 2418 bp, Cannabis sativa
caaacacctaaacatggtgttggttttgcctcttattatggttcctccttctgcaactgtgggcagtctctcctaaagtgccctaccaaattgtattggaaacatgtcttacagttacactctcctagatgatgcttcttacatcgggggcatttcagataagtatagtgacctccaaggccaccctgacctggttttctacgaaacctcttcttctggctcaagcccactgatgtagatggagctttcctcttctaactatttaaggaactagaaccacctctgacaagattggaagcaaaaggagtagtatccctaccaacaaccaaagttcctcgagattcttaagcaagctctgtagtgctcgcagctcgaggggtattcatcatatctcaatgtcccaaaatgactgaaggtttttgcatccaaatttcccatacaatggtcccatttaggtaccagccataaactgttctactgacaactccgaaactaaagtaaccggtacttgaggagaaggcacaacaggagatccaggttgcctcaatctcttaatctcctactctaactattgaaacttagcttccatctttgtgaacctttgctccaaatctagtggagcctacggtggatcttcataaccacctccatacgtcctctcttggcctgaaacatggccttgggaactaagggatcccattctctccatccgccaccagtgtcaactaaattatcccaactctttgtatttcgccaagcatccatctataggacaagcttatggattcatgagtcagcttgattaggtaacgatcgaaattgtaatttacttatcgcttacatgggaacttagtacacacctattcagctattaatatgctaacatgctccctatcatgccttttctgatcatgcataataattaaaactactaaaatatgtagaagcttaccgaaccgtgaatcgagcttatgcttgatgatgattgtacatatcttgacaatctttagaaattaacctggccgctgtgataccaaattgtaataccctactagattaggcgtgttaccgtattttcttaattgatgtacatacctttgctaatcaaagggtttattgaaaacatggataattaaaattttcttaaataactaactttaataaataaacatgatttatataatactgggatcccgttgaaagttacataagttacgaaatacttatactacaaaatttgtcgtctagagactaccaaaaagtgatcctaaagtatcccaaagatcttgaacactccaggtctaaccgtcttgatatgtacaatcttcaccattagctatagactcattttggtttggttctagctcttacttgcacatacacgtaataaatgtgagtcagactcggtaaagaaaagcataattataaacataaacatatatccagactgtaaccaagtgtccatacacctaatcacgacctaataattgggtcaggaacattctcgacaaagtattaactaactataaatccagcctatactcaatattctagtcgcattgatgtggtagcagttaattcgtactatttggaagcctggcatatatttgttgatgtatgtacacttcactaatatcctgatatgctaatctaatggctactgatttgcttaacatatatttcttggcatcttagtgcaactctatgtacacttcactaataccctaatatgttattctgacggcaactaacatgcatgctaaacatgtatacatatatgtaactattatacgagtcttaccttgattctaaattcaagcatgtcgataactctgagtggaaactactgcttgttgatttaaagccctaagtcacaatttacgtaaaattggtaagtgatctactaaatcactttcagggacttaaacttgaaactaaagttttcctatcaataaatagcatgactaaaccctacgtattgagaaaacgctaaaaaacaacactacgagaaaattgcctgaaaaatggcaggtcgtttttgtaaaaacagtaagccatttttctaggttctctgctagaaaaaatggtagaacgtttccacagaaacaacctgccgttttctgctacaaaaaacaacaaaacccaaatcttgcccaaaataatcccaaacttaaaaccaagctccagatcacctaatcacatcataagagaccatttccaaacaacagaaccacaaaatacacaaaaattcaaaaatcaccattgttgagccaagtttgaggtcttgaactcaaacttgctcaaaactacaatttaaccttaaattcatcacaactacactttaaacaacacaaaatcaacccagaaaatcaattccacacttatccaactcagatagaaccaaatcttaaaaattac

SEQ ID NO: 82940 - DNA, 680 bp, Cannabis sativa
atggctctcttcagtattacaataatgagaaagatttaagactatgagagaatgcaagaactctgaacacttaggatcttagtgtatcgtgaatgcatgtgaagaggtccaaaagaaggtccctttaatgtagggtcaaggccctttatatagtgttaggattttacaagttgttattcaatacataacagatggagaatatccctagaaaatagggttgttacaaattggtgttgaatccttaaaattgtgggttgttcaagtagttccgaagttgtaggagtgttgtggacaattttgaatcttctagaaggctcatgggaaaaataaaattgttaaggtgtaatatgtgcattggagccagccacatttagggactgcccaacatatgggctgtcacccttggccggccaactagaggtccgaccaacgtcttgtgtatccctgtctttgttggtgaaaccgttcatgatccccatagctttgttggagattctgatatcaggatgaacttgttttagaagcttgaagaagtggatcttgtaagtcttcaccctactcttgttgcaaccctgagatcttgagggttagggggctgtacgacactagcctggccaattagtgttgacctatctcccatgtgtcttctccttttggccacgtgcaggtgccacatcagg

SEQ ID NO: 82941 - DNA, 1057 bp, Cannabis sativa
gactaaaaccaactaaaatagatacctgtaaagtgagtgacatcattaaatctatgaacgggcaaaatgtatctagtggcagtgacttttatagagttctagaccaatgtaaagtgaacgataagataaatttttattgtgctaactcatattaatctaattatcttcttataatgatagttttagaacaaagttggaaattttttaagttcaattataactccaaaagtttttgagtgcataatattttttttattttaagatatttattttaactcattaactagttgattgagcaagtcaaattgtcaaagtatatcatgagtatcgtaaactgtaaaacaataatttatttttaaaacttatacatatttgcttatacctgtatgcttgtgtctttggtgacttatttatttggaaaatgagtcagctttatgcttaaaaattatttagatttataatgtgctttttaaactataatttttcatagggtcgaaattagtttcaccgagttcacaggtttgatactagtttcacatgttttgagagttctgtaatggagttgctctattttatgatgttattgcatatattttttttttattttaaattacttttttattattttatttctaggttcaaaaattacacttattttttattttcagattattggtacgcattgtgtgttattttatttatatttgtgatcagtattttatttttgtatttttgggggtgtatttttctttttatttggttgtctaatgaaactgatttctcttaactttattatttaacatttatattttgttataattttttaccggatcgaaactggtttcacaggatttaagtgttctgtaatggggttgctccatttttatgatgttattgtatattttttagtttatataaaaactaattttactattatatgatatttaaacaaaaatttttgttttattttatataactagtttctgacacacatattattttcataactagtttttttaagtaactagttttcataattgatttttttttttttttt

SEQ ID NO: 82942 - DNA, 1475 bp, Cannabis sativa
ttgtttttttttttttgagtaaatcagcaagtgtattataaaccaagaaacaatttttacaaactaatagcatcctctaatttagaggacctaccccaactataatctttacaatgtattaaaccaatactcttcactactagttacattttttggccaaatacaagtaattctatatttgattacacttttaattctatatacaatggtatcaccattttccatcacttggttccaaaacatgttgtttcgggcaccccaaatcagataaaccaacgctgcaacaacaacaccgctaatacattgccaactttgttttttcaatccacttgctgatacttaccaaggaaactgaggtggttccccaatacaaccagtttttgatttgatcaaggcagtcctttgagtatggacactcaaacaataagtgctcaatggtctcgctgctgccaccgttacaaagtagacaattatcattgtctatcaccccaaagctcttcaatctttccttttattgttattattgttacattgatattttttttgatattttaattttttttttagtataattctatttagttatataaaatctcaattagaatataattcacttggtcctaagtgtattttttgatagaaattctactttataataataaaaaaaataactatttattataataataatttaaaaaattaaagttaatatataataatactgaaattatatcatctaattacatattattattaacaatcttatttattaaaacataaaattctataaaatatatattttttagtttattcctaattagtaattattattaagagtatataaaaatttattaatgtgttttaatatttatttaataaaaagtttaaaaattatattattaatgtatatgtatatatacaaatttttaaattgttctgttaaaacaaaatgttattataaaaataaataaatatgatgattcatggaaaaaattgagtttccttaatatattattttttatattctaattatccaacttcttgtcattattgtattttatatatatgttgtctcatcatatcttacccgttattattactgtatctcacacggttattaattatcatagtagtttactcgtttcagacaaaaaaacagatattaatttcttttttattattatttgaagaaaaaatatcttttgaatttaaataccaatatcattagatatttatctattttctcttttttcttaatattgtttacaaataagtagatctaagaaaattaattattattttgctaaaacccaatcaatattcaatatatagtgatatatttttatagatagatatcaatcgaaatggtatcatttattaatatttacatatatctctctctttttttcttttttctttttctaattaaggacatatatatccctcttaaaaaatagtaaaattggaaagaaaaa

SEQ ID NO: 82943 - DNA, 1060 bp, Cannabis sativa
ggcggatggacagagggcagcggcagacggacagagggcggggaacgggttttcagtggctgggtttacagaggctgggtttcagtcggtctgctagggtttcagggatggcgtgcgtgaaaaatgaaaaagggattagcttttccaattgtaaaatttgagttcttacaattgtattaacttttttgcttcagtgcaaaactgtggcaaatatattaacatcagcttttaaccgaagaaaaatatattagcgtcaattttccactgaagcaaaatgcaaaagttaattttttaaattgtcacattttacctcggttatattttgtatgagccgacgctaattattattttttagcttcaagtataaactgaagcaaaaaatctccctttactttttgccttggtcaaccattatggtgagacgtgttgaccgacgcaaaaagtgtttttttttgtagtagtgatggttttacttcttctttcttttgaatattacatagtctggtataatgtaagactataacgttatttaacatgctttttaatgccaaattttctcaaactaatataattttattctgctaatttattgagatagacttgtaatatattactcattgtttttatttttcaagaataaataaatataatttgagtgatgcattagatatatataatatagttttgtagttggaagaaaaaattgtaacaatatttagaggcaaattagagtaaacccggccatgatagccatccctcacaaaggccgcgacctgctcgatgccggtctgaaggcgttccttgacctttggctcactgtgctctgcatacgatcttggacactcttcaagtcagctctatccttcactaggttagccatggcctccacctaattcttgctctcaacatccttgcacttaaattttataatatgtaatattttaatttttatgtaatttattattcttatacatttaaattttataatatgagtttgtattttttttctagtatattagtatcatttatataattccttaagttatgttttgtataataa

SEQ ID NO: 82944 - DNA, 647 bp, Cannabis sativa
tgatttatataaagtttgaaaagtgacaatcttttttatatttagaaaatctgtcataaaaggtaagttttatgaatacattaatttctatttttttcagttgtgttaacctgattctatatgagtttcctaattagttttatcagattttttatgaagaaatccaaattaagactttccttttttataaaagaaaaatcgcacttattgttcaagattttgtaagtacacaagcaaaattttttgggctgattgaagatcatttttagagaagtttcttgtgagctatggtctcgtttagactgtgtatgagctgtcaataaggtgtatattgattataaatacaccttatagcagttaggttcagtatctctttcacatctttatatttcattgatatcttgtaagaaaaagtgtctttgttgtgtagatgagagggtgttcatctcttccgccgtgtttatgtattttgtattgtattgagtttgtaatcaagtctacaaaagaagaaaaacaacagtgctaccttcgggataaggttctacaggctttcagaggatagcttttcaagtcttgcctcgcgaggaagcaagcactcttcaaggagatcaaaaggagttcgagcacttgaagtttcatcaagattc

SEQ ID NO: 82945 - DNA, 2454 bp, Cannabis sativa
  modified_base (2395)..(2399): a, c, t, g, unknown or other
tatctttggcttatttcttagagtcatctttcctctttatacgagagcctcctggattgtcagtgtttgtcgagacagtgcttgtcgagacattgctaggtttacttctcgtgccaatctttaacaacttcatctctttccttgcctcttcttttcgaacaaacacttgagctctcttattgaactcgctgcaagtcatcccacagctcgcctccagctgtcgagagatcagtcatgatcccagcttgaagagcagtaagttggatactgtcattcaagtttctaacccatgcagcaattgtacttaaatgacttaggtaggccttaagtgtcttgcccggttgctgctttatgttagtaagggaaggtgcttcaggtcgtctgtctcttgctgcttggaactgtctcttgaagtctttagatagctgttcctaagaggtgatcgagtgatgtgtgaatttactgaactagctgatcgctgccccaactggcgaggtaaggaataaaatgcaacgtaagttattcgtaacattgctggctcgcataattgtgttaaaattgttgaggtgagtgcctggatctgtggtcccatcgtatgacgagacgtgagggttttttaatccctaggccaattcagtgctcataatgtcaggatggaaaggctcgggctcttcgttcgagtcataaccaggcagtttcccatattccccatcttggtatctcctgaatttgtcctccaactcaataattcgcaattggataggatcctcttgcttttaattgagttgttgacgtaaatcaggcttcttcttgtttaattgctcacgaagattcagccgttgtggatcacagttacttatagacctcatccttgagtaactctctttcgtggtcgggcctgtactttctcaatcattactgcgacgagttttatcccctcctcgcgtagattaactagaacttgctttgtcacgtaccagcctttttctttgtgaacaagtcgatacatgccccttgctgtggtttgtatgtgccccttccctatcagtttgataaggacgttgatggtgtcttggtggtaacccgcctatcctaggttgagtcccaggatttctctcgctaccatgagggatttcttattccctagtcctggtttgtcttttactcgtgtttctacaagaaaattctagtaaatcattattttcattcccctgggttgtgaattcccagggtcttcaaggcacttctcgatgaggtgcctagtcatttggttgttcatcttcaggaacatccccagtttccccaagttgctcttgagctgtctctagcctccttgttcgtgagccttgaggttaacctcgcggccttctcacaccaggatcaagttggttctgtgtgttgttttcctgagttgtgttggctgcgactgcctcccattccaacttagtgttttgttggtttgcctcctcctgacgtcgtcggtgttgacaattttccaactcgacaaacgctacgtatctcgtgggatcataggcaccctcacttacaggcgtagaaccgccaacattcttgttgggttcctcattcccagtttctgggttttggtcaccatcacgttggctccttcttgagcgtgttgaccatgttgaacgtgttgttcgtgaattgggtggcctccgtgagcccatcagctcttctccaggactgtgagtagtcttttcaggatgagtgttattgttttccccattatcagccatggagaaagaaattcttttttggttaggagggatttttctgagcttttatcacgtaggctctcaatgaaagcaccaaattgttaacgcagattttcgttaacgataatgagcctattttcgtaataggtttagcacaaaaattatagaattctaaggaaaaataatagaagtagaaataacacaaggtttttatgtggttttgtagttaactttgcatagtccaccagtcaatcttattcagatttttctgatacagaagtagggttctttacaatcagtgttttttttttctcaaggattttccatccccttttctgtataatctgcccctatttataataacataggttgacagttaattacattcaaatttgaatcccattaacaatatttccctgaaattgtgggccttaattacgctccacgtaaataaatgcaattattatttgaaaatctcacagctgtgatttaaaccgcttttaaagggtcaatgctcacgtggattaagatatgctgcaaaacatatctcgctgaggagtcttaattggtacatgaatagcttggtttattcataagtcttccagcatcggcatgaacacgaatttactgagaaaacttaagaactgctctttgaccannnnnccttgcagactggacaatcatgttgggttttgtgccctaaataaaaccctttaca

SEQ ID NO: 82946 - DNA, 837 bp, Cannabis sativa
  modified_base (805)..(805): a, c, t, g, unknown or other
ctctctctctctctctcgatctccgcctatttccatcttctcactcaaggtatatatatttatttattaatacatataattatttatttatttattcagttatatatttatttattacaggtcgaaccctatcctcagacctgaccccgaatcctggactcagacttgaaccaaggtccaacctcgaagtttgaggatggggtttgggttcgacccaagatttgtggcccggagccaaagatgcgatctaggtctagggctgacgtcgagtttatggtaaaaatattataattttatacaacctattaatacaaattaataccaaacaaaatattttattaaataatgccaaataatacaataaaattcaatacagtacaatacaatataatatattgtacaaaatgagctttcatgtctttatgtttgacagtaaaggccaaaaattggcagcaaggccgagaaattaagtacttgaaattcatgttaaggagacttgaattaggatttgatcccaatttacactaggaggtgtgaattaaggtttgatgtgcttaggcgagcaatgatagaatttttttaatgtttttatttttttataatttttaataattttttaaatatttttatattataataattaaaattacctaggctactaccaacatgctaaatatacacatttacaatcaaagttggcatttggcaagtattaaataccaaaataaaatcaaaatttagtaagtttaggtgtcgtttggtagcacttttgttttttaatattttaatcacaaaatgaaagtanaatttttgtttttaaaaatttgtttttgaaaa

SEQ ID NO: 82947 - DNA, 1666 bp, Cannabis sativa
aagattatcagatttgaaggattcattgatgtggatttcaccttctttagaaacattatctattaacggaaatgagatattttagtttgcattacagcttttcttgttatgaacttaacatattattgagttttctgttttttcctgagtgaaaacttcaaacttcatatgcaacttaagaattgctttgaaatattcttaaggctacattagtttcactttgttttttcattattagtattatgaaagaagagatcataggacttctgtaattgttccagcagtgatgtttcttatctcgtttctctgaatttattttgttaagacctgcagaattgaacttatttctcagctgctttgcttagtgatcttccaaaggattaactattcatgtagttgattgtgatgagcataacttgatggaatttttttagcatcttcagtctaaaacaacatctttttcaattcctgccaacttgatcatttgaaacccgcgaatcgcatcctttatcataatttcaaaggaattcaggttaagaaaatcaataccagccaagtcttctgtatgctgatttcatgtcagcattaaaatttcaattttgagactttttttcctgaatattcaattttgagacctttagtgttatactgttagcttgagttagttttaaactgttattagttagttatctgttattttacagctgtatcttgttaaccaacttgtaacagtttcagttagtttcagttgttcttgatctaagtgtaagcatctatataagtcatgagcaattgcttaataatcaatgaaggaattcattctctttgttcatctttttcatcatcttttctctctgcctttactctctcttttctctcttcttttctggtttgttcttgttctcattcaacaatgtcaagaagatcttatatggtatcagagcacatctttcctccgttaatggctaatgttgttaccaactccgacaatggcttccaagctcaacctggaaatggatcaagcgctcaagctgtcaacggatcaaacccgtggaataccaaccaaatgaatccaaggaatcgtggtgatgatcaaagccctgtgttcttcaatcataatctgtctatcaagttaaacgatcataactatcttctatggggtcaacaagttcttgctgccatacgtgggaatcgattaatgccttacattcaagaaaattcagctccacctcagtattttactgatgctgatcgtgaaactgaaaacatcaatcctacttattctgcttgggaagttcaagattctctactggtctcttggctgttgtcatccatgtctgaaagtctccttactcgaatggtaggatgcaacacctcgtgtcagatctggagtactttgcagagatactttactctccaagtctctgcaaagattctagagttttgaaccaagcttcaaaacctgaagaaaggatctctcagtttaaatgactacttgctccgagtcaaacaaactgttgatttacttactttagttggagaagttctcagcactcgtgatcatgttgttgcgatcttcaaaggacttcccagcgagtatgataccttcgttatctccaccaacacacggcttgaaagttactctgtagctgagatagaagcatta

SEQ ID NO: 82948 - DNA, 915 bp, Cannabis sativa
tttatgttaaaaaataatataaataataactagtctaaaaaggttatttttgtacaagttttgaaatgaatatatttactaacatagttttataatttaatatcctatactataaattcaatccaattcaattttgtactatctaatagagttcaattctcatgccaaacggaccctaagtctattttttttttgctaaccccacattaaaagtctcctgaaatcacaaataagaaaaacaaaattaattataatgaaaaagacactctctctatttatatatataatgcgaacccaataaatatttaaagaaagttctaaactacactactccagcaaaataggcaatggtaatgggaacggtcaagtactaagctgactgagtgacccattaatacatttatatgtacttactttctttcaaatgtggcaatgtattattggtcccagaaaagatggggagttataatttgaccaaacagagcctccagttgaatagtgatcagcacaaaacaaaaaaaacccttacgaaacatattcacacgtgcttttcaaatatgtaccgtgtgagttagtgagtgtaagtaagggccatcccagcgcgtacggctcaatcttcctagcttccctaatttaattaagtctccgcatagagttatgagcgcgtcgatcaacctatataattgacacccacaaattctttggtctgacaaattactaagacaaacctcaaaatctcacaacaagtcttctttatttctcatcaaaggtacttcaaagttttctgctaatttgtcataattattcttaaaaataaattcttattattgtccgaaaactactactacttatttttccaaaaaaaaaatatctctcccactcccacaaattttcttcttctaatttttattgctt

SEQ ID NO: 82949 - DNA, 1127 bp, Cannabis sativa
ccgttcaaaaagcacctaccttgagtcaattcgcatctggttgggttacgagggttgtttctgtgtggatgcaaaaggtaaaagtgggggcttggctctcttgtggaaggcgtcgtttactgttcacttgaattcttttaacgatttccatattgatgcttgaatcaataaggaagaggacctagcttggagatttactggattttacggggaccccgatccttctaaaaaaaacatttgtggcagctccttacgagaatagcaaggaaccacaccgggccttggctttgtgggggagattttaatgagattagagggattcatgagaagcttggaggaggcgggaaaccggggcatctcatgaaaaactttaatcatgcaattgatacttgtgcgttgcgggaaatagattatgagggcagccaatttatttggtgcaatggaagggctgccaacatgatctatgaaaggttggactgtgtgatggtgaacaataattggtggaagatctacactatagccaaagtcaaacaccttagccgatggtgttcggatcacagcccattattactaaccttcaatacaattccttgtggagatcaaaagaaacaacggtggggataccgatttcattatgaaaaggcttgggccgataaggaagagtggcaacaaataattcaagagacatggaaagatggcaatcctattacctcggcttcagaccttgccgaaatgattaacatctgtggtactatgttagatcaatggaatacaatccaaaggaagaccaaccttgccaaaataaaagatctaaataaagatgtggagaagtactttaatgatcattcaaccgatggcttcaccaagcttaaactcctagaaaaagacctcaacggtcaactagcaaaggaagagttgttttggaaacaaaggagtagagctatttggttagcccatggagaccgcaacacaagatattttcaccaaaaagccacatcaaggcggaagaagaaccgaattaatggtctttttgacaaaaacctgatctggaggagttctatggaggacatagaaagcaccatttgtgaccatttccaagatcttttctcagcaacggatggtggtca

SEQ ID NO: 82950 - DNA, 990 bp, Cannabis sativa
taggtgtaattggtggtgaaggttaggattaaattggagaaatattgaagaaatggggctaaaatacaatttcaaaaagaaaatatgatgagcctttatgcaaatccaactctcggtcaaagtcaatagcccatctggaccatccgtctactgatcgtgcggcggaggatagtgcgtgtccttcacctcgacaccagcaactgaagcctgccaacctccttccgcacgggaccaacgaagcagctggtccccctcctccttccgccatacgtgcaatgcaggcccgcctcattaactccaccaacgaaccagacgatgacaggtcgccaactgttagcgctccagccatccaaccgtcgccatgtggcacctgctgaagaaaaaagaaggaaaaaatgagttgttagttgaattattgacatcctaaaatcacttagaaaatacaaaaaatccatattttgtcccacactttactcttaaatatcaattttatcttctcaatttttctcacctaaataaacattcctattttatttttaccctatctcttcacaatttttccatccaaacaaacatttatttttttccaatactcttacacatactctatttatcccttctcttcccaacactaattaaattaatcaatttatttattatattttgattaattttatcctccaattatgcctataaatagagtgttgtaagaccattttcaaacacatctctccaataccaaaatatctcttcaccccctaatcatctcttcatctaaaaaatccttcattcttcattccattaccctatttatttttaccattttcttcctaccatttttacattttgaagagcatgtcaagcatgtcattttgtaattttaactttaatctaagtatgagcatctagtcttttttcaagattattaagataatgatgaagcaaaatgtaactagatagtgtttgtttttgtatgttgatttcccattt

SEQ ID NO: 82951 - DNA, 1158 bp, Cannabis sativa
gcacttgcctctaatcctgtttatcatgccagacaaaattagtgtttattttgttagagacaaggtgctcaaacaagaactagaaattagatatgtcccaacttgtaaccaataagttacagatggcctcacaaagtctctctctctctcactcaaggtttcaagttcttgtggacaagttcagtgtaaaggtctcacctctttatttgagggtggttttaagaacctacctatagtgtgactattttctctgttgtaataaaggatttcaactcatcattggattccagaatatgcagaagtgtgggagtgactgtacgaattgtattataaatttgttatgcattgttttctgtgtaagctagttggcattgtattaatggttgtaatattttctctttctcctataaataaaatacagctagctcagaattaaatgagctgagatttatcatcaaatatttaacctaaaatcaagcaggcatcaagtacatgttttcatagtttcaccccacactaaatcctactttaacaggtaataccctatcttaatatgggtaagttactcataaataaataggtttcaaagtaacatgtttatgggtaaaaattttatctctaattattatgtgtagtattttaatgcagattttaggtgaaaatattgttactaaaaaaataaaaactatctgtgaactacaaattccatgatttgttaatgctatttattctatattcaagaagaatattacttcaaggtataagtggtgcctaatactatttataggtgtcgtctttcgattggttaacaatattttatagaaattattttattaaattacatgagacttgttggactgatgaaaacgaagaatagtgcagcctatgcactggctaccagggggtaacctaaccaatattcatgtgttgttcttctttagagcataatattcagtgttcatggcattgtgccatttgggatctttaagggcaaacttgacagtagcaggtacaaaggaggcagtgagaacctttggtttgtggattcctgctttagccctggtttgcattggatgatggttcacaacagaagggggaataggatttgtggtagtgtttaggaattgattgaaatgattagaggagtggaggaagttg

SEQ ID NO: 82952 - DNA, 1206 bp, Cannabis sativa
gtagtttagccgccaaaaattcagtttttatggttaagtgttacaaaccgtaaagttcaggtggtttagccgccaatatcccatttaaaaatagaataaatgagatttttttctcctaaagaaattagtaataagaaaagttagggcaaagttagtgcaaaactataaagaaattaaaaagaaattttcagactctcagtagcttgtttctttcctttcttaatttcagggaatgaaatgttttcagcaatattaacttttgatttcttcttagctaaacatcaatcactttttttggtaggtggagcaaagtctgattcatcatcttcaacaactggatgtttgcctttagatttattggcaagagatttcacccatttttaaagattttttcagcaatggtgatggggaagatgaagacaaaatgaccatttacagaacaaaaaaaaatagaaaaatgtggccagatgatggaggaaggcagttgagaaagatggacaaaattagttttttttggatcaaaaatagttttgattgtgggagaagttttcaaacaaaaagctataatgaaaaatgaaacgaaactaaaaaatgaaaaaagaaaaagaaaaaagatgatagaaaaggatggaaaatagatagtgtgtgaaggtggtataataatatcatgcatgtgtaagaggtattagtgtaaataaaataaaatcaaatgtaaaaatgtaggagtatccttgtaaaggtataggggtaatatttttaggtttttgtatttttcatgtaaatttttcaattaaatttgtattattataaatattaataaatatattgatatctaaatctattatttattaccattaattataattaatttttattattattttctaatctttaattctcatatgtgtataaataggagatcacccatagaaataaaatactaaaaaaattatcatatcttctttatgtttctttttctaaattataatattttataatacgttatcagcacgagaatatttgttatatccgatctcgaatgtttcaaagttatgatacgctatatatgcatatacatgctcatctgactgaaacacattctagtcattttttatttatatattttgttatgaatgaatatttatacaatatatgtctatgcttatacatatatactagttagaagttacgtgccgaggcacgtaa

SEQ ID NO: 82953 - DNA, 1072 bp, Cannabis sativa
  modified_base (51)..(53): a, c, t, g, unknown or other
tatatgtgtttaaattacattgttttaaaaatttatatttaggatgttaannnacatacatggtagtaaatctggatcctggtaaaacaatactccaacagtttcattcaccattataactttcaaaaaacctcaaagaaaaagagagagagagagagaaaaagaataccttctgccatggcaagaagagagggagcttaacactcaataattaatttcactgtcgtaactcctaaccagtgggaactccgattcttctcccaaacgtaattgaataatagaagattccttcatcttctcaaataagtgttctggttttgcaatgtctgtagtggaagattgtatctcctaggctcgtggtttggagactaagtcggcttctggggcggttctcttgcaagtgatcttacggaaacacacgatgagaaagaagaggaaagagaaagcagcacttgtggcggtggcggctatcaggggcggaagtaaaggaataggagtataattgcaaaagaactctctctctagatatggcaattggcgattcccttatgctctcttcggaagagcctattcaacagatgtgctctgaaagcatggcccaaatggaggatctactatctcgaacaagcaaactaacggtcacagatgaggaaggatgggaaatcaacgaagatggggctgaggacattggcaaatcgtgtatcattgagcgactctgcactttgaaaccatttacccgttctttactaaagaacatactgtgcaggctatggaatttgggggaacttgattgggatctgaaaatcaagaaaataacatacaaagctctgttcttgattctttctttcaaacagaacaatacactcgaaaggattttggaaagaactccatgggtattgaatgcagggttccttatcttagaaagaatgaatggaatacccacggagtgggagacaacattgacttctttcaccatctctgggtgagttttgaacctgccaattaaagcaattacgaaaacaaatatgcttcgattggctggtatggcaggagaggttatagacatccaaga

SEQ ID NO: 82954 - DNA, 788 bp, Cannabis sativa
aaatagtcatatattgttgaggaagttagtgacagttgtgattaacaaccaactgttagtattggttagttagttaaatctattttctgttaagttgttatggttcctcgtatactcttttgctattatatatatagcgtgtaatcttgtgagtctagtaataatgatacacactttgtttcaccctctttctcttaatttctcttctctcaactttctctgttttctctgttttggattctacttcttagaatcaatttggtatcaagagcagacgagaatggcgacctctgcaaataatttcaccagtcctaccgtggttcctaccaccatgttcttacctccactaagattagatcaaagcaactatttttttggcggtctcaagttcttcccaccatccgtgctcttgaagatattttgctgcgtcgacatccaagacccaaaccttaggtattagaagcacctggttcctcaaacatgatacgtaaccctgaatttcataaatggatgcgtcttgatcaatttcttttatcttggttaatgtcgtcgagacctgaatcaatgattggccatattgtgcactgtgaatctgctactgcaatatgggaaacactggagcaattgttcaatactcgatccaaggcctgaatgattcatctcatgtcccttctccagaacaccaataaaggttcctagttgattgatgaatacatgttgaagatgaaaggctatgccgatggacttcgtgctgctggcaacttcgtttcagaagaacaactgattct

SEQ ID NO: 82955 - DNA, 943 bp, Cannabis sativa
  modified_base (805)..(821): a, c, t, g, unknown or other
taaaattattaaatataaattaataatatagtaatataaattaataatatagtaaaaaaaaaaattaaaaaaaaaaaaaaaaagtgtaataaaacttatcttcttgaagtccttgaattcctaaataactgagtgaaataaaaacactcttatatgagattaatgtataaaattaaattaacacactctttaataataatattatcttaaaatagaaatttttatttaattgctaaaaaacattttgctatattattttatgaaaaaaaaaaattatctttaataattttggagctcaaatgtcactgcaatcttataccattcttaagatgaactgaaaaaatagcttaaacaatcatacatgacaaaacaccatattactaaacaaacaacactagtcataaaaaagaaaaattgcccactataggtgtctatacaacattagtccactaattttgaccaaatcataagcacaatgtctgttggtaaatgaacatgaacataggatatatgattggagaaattgttaaattgttactatttttcaaattcttggtatattcggagtatcgcaaagtacatgccatcttacatcattttaattttgcagaattaaatattcagtttctcacagttttatcagaatactcgattcacaataatatatattataacacgtatataaatatttgactaatcaaagtaaacgtgttctttaataagtttgaggtatatgtacatgtatgtactattttctttattctttttttttttttttgctcgaaaatatatatatatataaatnnnnnnnnnnnnnnnnntggataagcaattgaaagaaatgtgcagaaaagtcaaataaatcattagttaatatcaaatattgaaacaaaattacatatcatttagtaaaattcttttatgatttcaatgtagatatttc

SEQ ID NO: 82956 - DNA, 1025 bp, Cannabis sativa
aatccataatccaatcgttctttaacattaattcccttaacactattgttatgccaagtaaatctttctccttcaaagtttagttcaggatgaccacaaaaatcaatagaatttctaaaagaaacaatttgttgttcattcttttgtggaccaccaatcttatctgagtaagagatgatttcgttaaaatttcccataactaaccatggcattaaaggggcagtgtctctaagcttcttcaacagttcctaagtaatagctctttgtgaaacaattggagctctataaaaactagaaaaatgccaagagggaccatcatccacagccatacatatagcaatcaacaaagtttattccataatttaaaattgttacattaacattagacttcccaaaaaaaagtagcccctactaagacctattctaggaacttcaataccattaggaaatttaaaagtagaacaaaatttagaaatagaaccaagactaagtttagattccataataaaaccaacatcaggattattttgtgaaatgagtagacgaagttttcggaatgctctcagattgctcaagtcccgagcattctagctgacaatattcatgatgattggcgaggttgaatgtcaaccatccccaaagaagcaccactgccttcagcccctagtgagaggtgagttaactcagaggaagggtcaggttgttgatgcagagaaaagtttgtggagtctgtaagaggaggggctctagttcgacatcgtttgagtacatttctaacattgcctcccgaggacaccatttgtcttttataaaataaagcagaaattttatttttttttggcggtaattgatgcaacattaaaactaggaggaatcgagtccaattcagagttaactctgtcagtagtcacacaggttgaattaacattctcaacttgtggttaagggacagaggtgttgggttggagggagcatggaacatgaagatatgctggaggtgtagccactaataaagcaattgaatt

SEQ ID NO: 82957 - DNA, 1098 bp, Cannabis sativa
tcaaagtttacctctctatacactacaatatttctttgaaagatgccatcccaagaataaaaggttgctataaatatataaatatatatattaactacaaaattaattatataattattttagtcatttacattataagtcccacatgcactgaatactaatgggcaatgggcatatatatatatatatatatatatatagttttgtggctaagaaagttaataacaaatctgtgtgtcaaaaagttgtgacaaatatattataaccacaaaatttagtgaccattcattgaacaatgactataatattactatatatatgtctaactataatgtgacttttatttatatggtgggtaacaaaaatttgtctttttaggtagtgattataaatttattatgtagatatttgtaattgatgctaaaatattttcgaactaagatagtttctcgtataactgtagagcatatatcctttgccaaaatatgtgccgaatttgattaaataataaaattatgatatctccaaacaacaatccttaattaaaaatgttgttagaattattgtaaatagtttgattagcttatttttagtcgataagtaataacttttgtccatatatatattcttcaatattaaaagaccccattaattaattaagaaagttgttctcattagtttttaccattaatatattttatttataataaataatgaagttaagtataattaatgaggaaagattacttatagtatcactataattatttataaatgcagaacttttttagacaataatttttcaatggtatgattgaataaatggatgtggcttaataaggaatttctcacgtttggtaagaatgacactccttaataattagggttttactttctaatttggtcttatatatattattttgatttatatttatctatatatagagtatggacaaagagatgtacgacgattagtggaaatgtttaatttaatgccacttgcaaatatataaattgaatgactacattttttttaaaaaattaattgaatgattatatatttatatattatacataaatattatcttcacctttgtg

SEQ ID NO: 82958 - DNA, 1522 bp, Cannabis sativa
aacaataataattattaaacaaagtcaaaaaattaactaaaatcatagagaaatcagaaatttaattctaagcacgctggaaaaaagaaacatcaaaaaatgacatcgagaatagtcgcacacccccactcgctgacgccaagagtgggcttggctagaagaggttgtcttcaacctctggtcagatcccaggcagctcgcgtgacccaggttcgtgccaggcgggccgagacgaaatttttgccattaaatgcatgaaatcgacaataaaaagaggggtttggatcaggattggatttctaatcaatatcaatctatggtgttaattttgagtacaaacgtctaaaacttagtagatttgattgtgagtaatctgaaaactataaaccaaaaagaaccccattctcgtatgtatctcatccaattcaaaaataaatgatgttagaaacattatttattagtcggtaatgagatatacacaatcaatttctgattataatcaacaaaatcaaaaattccaaaattaacattatataattatataaaccctaaaattttaatcttaaaattctctcaaattactgaacgattacgattttaagcatataatatatcaaaagaaaacttataacaagaagaataaaagccctaatgtttcaagattaattcataaaaaaatcatcataaaataataacaaaattgatatataatttaaaaaaattaacatatatcaatcaattgttaaataaaatatagatcctatatcatatacaattggcaatttgataccacatattagaaaataaaataaaccatgatacaaaatttatatataatttaaaacacaataataattaggtatacatgcataattaatccatatcaattactttaatttgatagtgcaatactatcaactaaatcttctttcctaaatatctaaatcagaaacagatttattttattcgattatcaaaagatatacaattgagataaaataatatgtatttatagaattaaggagaacacttaactacttaatcttagttagacaaatattaagcttattaattattaatcactaacaatatgaactaacacgataaaaaactatccaatcaacccataacttattaaaactaataaaaattattataaattcaaataaaaatctaacattgtaataatatgaaattcacaaatctgagtgcattggcaaataaaatgttgtgagatcaaaaaaggggtttcggaaggggaacagaaacaaatgaaatttccaggtcagaatttcaaacatactatattaatctgtctacatttaaaacgagatattgcttcttcctctacttaatattatttattatacaatatcaatgctactaatcacacatttcactaaaaattgctttcaataaaaatacattatactttacaaacatgattatgctagagacatgagcttgctttgctcttcgaaatcaataccgtccagggctttgtttgggtctttgattgagc

SEQ ID NO: 82959 - DNA, 1258 bp, Cannabis sativa
  modified_base (27)..(28): a, c, t, g, unknown or other
actaatcagattgtaaagagttttatnnagggcataaaacccaacatatcggacatataaacttcaaagaggtcatcaacttcttaaatttccactgctggtttgggactttgtaatgcagagattgaagagggcatatgagtggtttgcaaaccagttgaaagagaagagtgactatgtagtaaggctggtgcaaacataactttagtggaaccgaatgtgtagtgttgtttgtttctggtacagatccagagggcattgtatcagaattggcattatgttgttggtcagatgattctcttggtaatagtggccacggatgaggtgattgtctattgaaaaggtttcgaattgcagcagtgaaagattttaatgccaaacgcgttaggagaggccaagcatttccctttgagaagtcactgtacttgtcataaccattgttaggtaatgcagcccctttcaattctggtccataaagtagatcagtctctattccattgtcaattttttccatccatactaaacatttctggaatggatgaccaagcctaccacactccatacacaattcaggaagtctttcataacggaattccacccaaaacttatcactaacttgttggagtttaattttttgactccgtagcagtggcttagtgatattcaatttgacgcgaaatcttaagaaaggaccccaaccttcttctaccgaatcatcatggacttctagaaattctccaataatgttccccaaggcttttgccaaagatttagacttgttaaggaaaggaagtctatagcattgtacccaaaaaggagagtaaatgagatcattggatgagatattttgtaaagcacttggtgtgtacaatactatgtgatgattttgaaaatgaaaaggctccctaagaagaaccctttgcttgtctccttcacatccgaaagttaaaacaaagagatcaggaggttgttcagtaatttttgtctgaaatctgccattctaataatccttcatttgtttctgcaatgttgaaagccaaactgtttttgttgtaagaattcgtgcaaccggaacattgtcaataccagtagttaagttttcttgatcttcatccaaaatcaaaattgagtcatcctcatcagtgaggatcatctttcccttcatcttgtcagtcaaaggattcatgcttcagatgggaatttagtgattagtgaggaaagcttaaatggtgtggagcggttgaagagaagaacatga

SEQ ID NO: 82960 - DNA, 634 bp, Cannabis sativa
ttaggttagaggtttcccctggtgttaagaactttggctgtggaaaattcattttgttcagttgtgggattgttgtggtgatagagtctcgggccaggcgagtaagaaaaggccaagcatttccattagagaaatcttgtcaatatttatcgtaaccattgttgggtaactttgcacccttcatccaaggtccatactcaaaatcctcatcattcctattgtccattctttccataaaagcaatgcacttctcaaacgggtaaccaagacgcccatattcaaaatagaattcaagcaatctctcatatgtgaaatcaacccaaaaatcatccttgacttttggtaagctaatcattcggcctctaagcaaaggtttagaaacagagagtttcacatgtatccgcaagaaaggcccccaaccttcatcaagggaatctttatgaacatcaacatattcaccaataatctttcctagagccttagcaagtgactttgatttgctgaagaatggtaaacgataaatttgaacccaaaaaaggggtgagggccaaatctaaaatggagacattttgcagaacatccgacgtgtacaggacaatgagatggttttgaaagtgtcacggctctttattaa

SEQ ID NO: 82961 - DNA, 1688 bp, Cannabis sativa
ccctgatgttaatcaatttggtgttagacatcaaataaattaaaaaagaaaaacggagacacatgttgttactgaaattttacggtcaaaggaagtgcccccaaagtccacattccgccatctgtgctgctccttgccgattttctgtgcttatactgaatgcccaagtgtttgtcattatgcacaagttctaccaaacttttgtgaaaaatttaattactcacgttcaaacaataattaattacaaagacaaaacaaattaaaagatcaatgtattacaatataaatttgtggcaatcaagaaataaaaaaatatatttaccgtataagcagcttatatttttagtttgggcttttaagtttttataaatgcacaataaaaatatataggaatttttacatataccaccttaatttggttctaaattatgaaaatgacatttaatatctaattattaaaaaataccgttcatttactattaattattatcaagattggttgagttagttgtgagttagttgagattcgattaggatgttagttagcttagctgtcacttttctgttatttgttgtatcattttgcttctttgttacttggtataagtagcaaacattggtgtcttgtatttgattgatcattcaatacaattgctctattttctctgttttgctttcttctggttctagctcactggagttgttatggtatcagagcaggattcctgtgctcttgtcattcttcatcttgtttctctttgatctgtgattatctgttttgtagaaatggctcaaggaggtggagctcaaggtcgtggcaatggagttcatactcgagcgaatcgtgaagctgaagacaactctctttactcgaatatgttctcagttcttggagaaaattcgagatcgacaactgctaatgatttgtcgaatccttacttctttcgaatggagataatccaggtgcagttcttgttcctaaaattctcaaaggcagtgagaattatagcatctggagaagatcgatgctgattgccttggttgctaggaacaaagttaagttcgttaatggaaggttaccacaacctgatgaagatcatgatgactacgatagctggtgtcgatgcaatagcaccgtgatttcatggatcttggacgcgatttctgatgagatcgctgacagtatcatgtatcatgataatgcagcagaaatttggccgagctgcagaacgattcaatgagaagaacgctcctcgcatctttgaagccaagaagacgatgcaaagtcttactcaaggatccaatattgttacgacgtattatactcgcttgaaatctctttgggatcagataagagagtttcgtccaccacctgtttgttcttgtggcgcaatgaaggtgatacaagagtatcaagaagaggacatgttacttgaatttctggttggattaaatgattcatacaatctggttagatcacagattctaatgcgtgatcctcttccaagcgttaataaggcgtatgctgctgttatacaagaagaaagacagagaaatttgactagtggattcaacaattccactgattcagataaaggagcatcaggaagtaatggacagtttgctggagctgttcaacctttcaaatctaagtacaattgtactcattgtggaatgaatggtcactc

SEQ ID NO: 82962 - DNA, 1110 bp, Cannabis sativa
tagatttgggggttatgtgcaaaaccctctctacttcggggggttttgccgcaaataaccctattttaaaaggatcacctcttatttataaaacctaaatttagtggacataaagtactttttagtatgactaaattatctcgtacgtatttaatattttatttggatttaaattatttaaaaatattatctaattttattacaataaaaaactaaaataaattttttaatttcttcttcttcacgacttaataacaaaaatataagtaataaaaataacaataataataaaaagtctgtgactttaatcaaacaactcaattaactcaagttcacagaaccaacattcatggcgaaaaaaaccctccactttgctaaaataacctcaaagctaaaaaaaaaaaaaaacagatctcccacttcagaatgctacaccataaaaaacaaaaatttcaatacaaattcaaaaaataaaaaaaaaatatggaagaaagaagtcacatcatggaagggagtagggataaaaatagaagggtttttattttaataaatcagatattattttaaaaataatttaaattcaaattaaatgttaaaatgtggtaccaagtgattattattgaaaatataaggtctcaagtttttattttgaaaaaatataaggtactaaatatttaattatcgtataattaataaccataagctatttatatatttttgacaaaagactaaaattagtttatatttatttttgggttaggtagtataatggtgtaggtagatatgtatataagtattgcattaattaatgccatggttttagattttcaaacccttcagctaatattaatagttttacatagcttattggaaagtttattattatttgtagagtaatttgcggcataaatatttaagtttaacttctaattgtaaataaatatctaagtttaatttttggcagtaataatacctaaattataattttagaacttctgtaggtaccaagctagttaaataaattgccacgtggcaatctttgattggtctaagtcattaaatttttattattttaaaaaaattagttcaaatataccaataagaaaatga

SEQ ID NO: 82963 - DNA, 1160 bp, Cannabis sativa
tattcgaaataggcaaaattctgtggagagtatcttaaataaggatggggtgtggatcactggtagaaaagaaattggtagagaattctctaattttctggggggacatctttactaacccagtccaaggccctttggagaatatgcaccatctgatttcgaatcatctttccccccttgaacagaatgaattagagattatctcagagcatgagtaaattagacaaaaactcttcctatgggaagtttgaaggctccaagtcctgatggtatgtctgttattttctttaaacattactggaactcagctggtgtggatttctgtgacacaattgtggacttttccaatctgggactatgcataggggactcaatacaacgaatgtgactcttatacctaaggtgcccaatccccaaaaaaaaagtgtcctagttcagacctatttttctttgcaatgtgatctacaaggtaatctcaaaaatcattgcaaataaaattagaccgattctcccccagctaatttgtcctacttaggtagcatttgttctaggtcggaacattcaggataacaatattttagtccaagagatcatccactcgtttaaacataaaaaagggaaagagggtttgtttcctatcaaaattgacctggttaaagcctatgataagttaagctggaaattcattgatcatgtgctctgtagcttcaaagtgcctgataagttctgtaattgggtacaacagtgtatctcaacgatttattttagattttgcctctatggtagcaaggttagtagtttggtccctatgtgtggcatcagatagggggaacccctatccccttacctctttatcagggttactgatatcctctcgcatattcttgagaacgctctggatattagaactattagaggaatcaagttgagtagagatggtcctaggctttctcatctttctttacagacgatctgatccttgtgggtagggcgactttagcagaagctagaggcttttgccagtgtctagagaaattttgttattggtggggacagaggataaataaactaaaaaccttcattttcttcagcgataagactagtgagggtatgaaaagaggcataatgcgggagcttggactcaacaaatcgatggaaaa

SEQ ID NO: 82964 - DNA, 659 bp, Cannabis sativa
ctggataattatgtagccatgccatgcgtaggaaactaaagttatgttatttgcctgaatattaatcttgtggattttggcagatctctttgatggtcttgctgcaatcccaattggggtatccaggatccttatggttccaaaacctaagttctatccatatgttttgcttcttcccttttaagttcctgatataatgctcaacgggcttcatctaaatataaggtctgaaaagaacttctttaagtagttattaacaagaattctctagaaccctcaccatctcaatttggtttaggtactaaatgcttggtctgtatatttaatgattttacaatagctaaaggaaactcgaatcaccaacccacgtgggatgaaggctacaaaaatcataatctggcatggaacgttaatgtcgaacatgtgctcgtcgaagaggtgcagaaagagagcacatagtgggtgatggatagtgccataaaaatattctgcagctacaatatatttttggacttggaagatgcctgcagcttccaaaataccctatgtctattcttgaatagactttcaaggagggatgggaaagccatcataagtgttgatggtttcggggcttggagtagagttgatagttctatcaaagcacacctcccactttg

SEQ ID NO: 82965 - DNA, 804 bp, Cannabis sativa
caaattaatttcatcttttttgccctttgattgatgatcaacttgggatcttgtgtgtattactgattgttactaacccttactgatatttatacagacatacatatatatatatatatataatcttacacaaaaaatcttatttttgttatcgctcttcaagaatatacgtgtatgtatacatatacaattgattattcatttaatctctctttctttatatatatacgacatatatggtgcagataggaagaaatgaaagaccattggatgagaatgatgacacacaacgttcacctaaacaagatcttagctctgagaagcaacaaaaggtaattaattaaaattagaaattattagcttattaacaagaagaagaaaacaaaacatttagatattaataataaccaaataaagatatatatatgttcgatcgagaagcttaaccataatttattgaacataataataatactaagaaacaaaaatgactgataaataatattacatatagtacatatattcatggactggtatctactcatctatacgaaatatctcgaacatttaattaattacatcaaatatcacaattacaatgctttgagcttaatgaattatattacattaatattattagcagtcaaaattaagctgtactaaattaattagttatccttatatgatcatagattcataatttgtatatttatatataaggggaagacttagatcctaattaatttcttgcacatggccgctagtataaatataaactatatatatagactacatataatgatg

SEQ ID NO: 82966 - DNA, 1345 bp, Cannabis sativa
gtccataatcacctcataatcacctccctaatcacctccctgttcacctccctgtggaactccctgtggaatcgtggaatcgaccgcatcgaccgcccgatctatagcccgatctatactacagccaccgctagtagaagtcacatttaggcgttaaacagggcgtaaagaagataatttgggctaaccctaagtcagacaagactttccaagaaggaaccttagctccatgcttaggggagcttctgacaaggacagaccgaatccgaaatcagttttagtaccgtgattttggagggtcgaatagcgtgttcttggaagactagtttggtttacctttttatccatgcacacaaaataaggaattaactctccttaaatctcggccagaagatcctattaagctaaagagggaaactacctaaaatgaagatcaagtaattaattcataatgaattacccacaattataggacacgataatgacagtctgattgtgtcatatctgcctagtcagcatgtcaatcctttcatgggctaggcctcacgaagacatccctcccttgtgtattttcatgtaagctcccaactagagggaaaaaaaaaactaagtatagttcttgtaaacattataattgtaatgatcgctttagtaattgggattagtaaaggcaattagcactaatttatgttatttttataattatttatgaatttaattaattgtaggccccattattagaaatgggcatgagagttataatttctcaattctagaaattttattaaactctaaatgtattatttgaattatatgtgaaatatgttatttttacaattattgctcggcgacaatggaaaatgcgatggatggctagtttgatcacatgggtaagttagaaccttatttcttagtggaatatattttggagaaaataaaataccgagaattaagcgggattatgaaatttgattagtttacccctagtctttaaaatatcttagttttaagttaaaaggcattttagtcaattgataaagaggtttggtggctacctaggaggttgacacttggctaatttattttcagcaaaggaattaatttcctaagctttattcaattagggaaaatcaagaaaagaccaaaaaaaaaaaatagaagcatctcttcccttccctctctcttcgaaccagtctagaacaagtggaattatagttggtttttggtgtttccagcgagggttggaggatttattaaccaaggtaaaccctacaagcttttgtttatttaattctttaagttttacttggttttgcgtagtgatttttggtattggtggctgtta

SEQ ID NO: 82967 - DNA, 1251 bp, Cannabis sativa
tccgggtctaagccgggggtctaggttagaggtcggggtcgaatcaggtccggaatttggggttcgggtctgcactccgagtctagggtttgagtttgcagtctgagttcaaggtctagagtccgagtttaggtccaaggtctaggttttggatttaggtttgggtccatgttcgagtttgggttcacagttcgggtctggcgctggttttgagtttggggtccgagtttgactttcggagttcgtgctagggtaagaggggggttggttcatgttgaggtgtggaatattgaagtttatttttaagtaaaaaaaaaaccgatctaggaatagtttttagaaaatattagtaagtgtattgtattttgaaaactataaaaaattgttttctgtttttatttttaagaacataattttgaaatcaaaaaattataaccattgccaaacattacttaaattaaacacatatttatatataaaaaaaaaatattaacaagatgtcttaaataaatgagttaattacgataaagctccaaaatttttaatctcgctagaaattaactttcaaaatctattttttggcaataaaatctcaaaattcgtgttctgttagtatttagccaattctatccatctttgacagctaactatcaacttggctgtctatgtgtatatagtgtattggtcatatggacatagtgtacatatgatacaatattattgactcacttaaataaatatttaaaaataaattaatttaaaattaaaaaaattataaattaaaaaaagggtaatttacagccaaactcccttaactttgaagtttggcacgatcaaacactagactgaattttgggtaatgaactctacaatctacagaatcattttgctttgtactcctttcgtcgtgcaaaagtggattgtcattctgtatacaatacaagtgtacacatggaaatgtctactctacctaatattaataatttaaatattaaaaaaataatttaatatgtatgtggataatattacacatggacatggacagagatagctaaatgctaatagaacacaagttttggaaattttaccgcaggttatgtacggcgaaaccctcttatgttttgattttttacatttagtccctttattttttttggtagcaaaactcccttattattttttttttgcaaatttggggtgctagctgaatatcattgttaaatatcaactagattattattgtattagctt

SEQ ID NO: 82968 - DNA, 988 bp, Cannabis sativa
agaaatgtcatgataaaagtgggtattaacaggcagctatcaatttaccccttaaaaaatctgcaaattaaaattaatatcatggtagagaattataccatatggaaatatctaattaactaattagtttgagatatttatatctatatatatatagtttaggaataggatgagtatcacagtttctaaaaaaagattaaaatgataaatttgatattttaaaattaatataataatatttctgttgttgttggatataaattatttgttaaattgaaaatatatttataaaattaaaaatgaaattaaaaaacaaagcctataaatagggttcacactcatcaaagtcacaactttctctctccaaatcgttcatcaccaccttaagctctgaagaatcgtcggtcagactacgaaggataccataatcaatcaaattccgtacgtaccttttagttttactaataaataatgtctggagaagaggaagagaatgccgctgagctcaaaattggagatggtacttcttctaaccctctctcttaattaatctctaaaataaaatttaacttcaaaggaccttaataaccagatcaattttccttcttttctcttttagagtttttgaaggcaaaatgtcttaccaattgtgaagttgcgctcattcttgaacgtaaaatgtctgatgatccactaaatcatcaagtttctcagtaagtataccagaccttaattttttctaccatcaacccaaatgtttagttaaattatctataaaccagtatgtagccttagactgggtttttaaccgaagttgttgtcttctaaaaggacattatctcctgttcttcaattttaatggcttaattcctaagtcctattggcttttttatctcttttcagggtgtttgagaagtctctgcaatatgtaaagcggtttagccgctacaaaaatcctgatgtagatgcagttagacaagttctaagc

SEQ ID NO: 82969 - DNA, 994 bp, Cannabis sativa
aaaattaattttttaattttttataaaaaaacaatatttaaagttctaaaaatttgagaaaaattaatacaaagtttaagagtattaaaatttaacatactctcaatattaaaaataacaaaaaaaataattatattacaaataattatattaatattatatatatttaaattaatctaaaataaataatattcatatttttatatatatttataaaactaacactattaacaccgtaaaatttaacgaaatattcttatattcttaaaatattctgttaaactaaccaaaaaaaaaaaaactgttagataaccacattttatatattatattattcaaaagaaatataacatttgtttgaagaggcaataaatttctctttactttctttactttccaatgctgtgaaaaacaaccagaatagttcttgcattcataagtggatatgtcaacttgaacaaggttagtgaggttactgatccatttgctaagtgatcttggcagatcgttctctgcaagactcaaacgagttagcttttgcagcatatatagactttgtagaagacaccctccaagaaattttcagaggtgtaataaaggtaaagggagagctgtcaaaatatgggttgatagatcatttgagctcaagtctagaacctctaaatttggaaaacagaataataattgatcctagtagaaaattgtgggaaagattgagttgatccaaactgcctaatgagtaatgattaagagagcttagctttacaactttcacattatcattaacaggattagtcttcaatcccaaagaagatgaagagttgcattttattccattccattgactaaatcaaaataggaaatccttcaaagcctgcaaatcatttggttaaaattgataggctttcaggtttcatagtcagagagagcctagaattgggtgggagaagaaaaagttgtacatttactcagggtgatgaagacataaaatgta

SEQ ID NO: 82970 - DNA, 853 bp, Cannabis sativa
tggatataaaccatttgaagactcattttcaggatttgtcttttgttttctatcctaggatgtgtaatcaagtagctaatagtttagctaagtggagtcttgagactcaaaagtctattgtaatgactaatgtgttaccctcttgtgctgctgctcttttaaaagcagaggtgtctaatgttgcttaataatacaagttttatttcaaaaaaaaaaatcataaaaatcataaaaatgtttaaaatttcgtgaaatcgtatttttgtaatttttttgttatttttgtatatttgtgaaataatctctaatataatttagtcaaaaacatttcacaatttaagtaaatactattttgaattccatatttttttgaaatactgattagcctatctattttattaaatcacaattttaaacctaatattttacaaaagaaatataatgatacctgagatagatttttgtaaaaaaaaaaaagaatcagattaggaataaaataaaaattgagtcacaattgttaaggttagagatcaggagattttgaggttagaaagatgattgtttagagttaaataaaaataggacttagattttgcttacttttgcaaaccacaaagcgaccaattagcaaaattcaaaactcaaaatgaaatttattctaaaatattctcaatggaagatgtaaatactatgttaaattacgataattgcataaaactaactacaaatttttgcaagtttctccctgcaatgtgaccataattttaaaatgctttatcttagttccttcaactgttattcgtagaaatttgtgcaatctcacgtatccttgctgtcacaattattttaataa

SEQ ID NO: 82971 - DNA, 691 bp, Cannabis sativa
  modified_base (597)..(600): a, c, t, g, unknown or other
accaaacgtgacttgtgttttaaagacttcaaaaactattttttgttctcatttctaaaaacaattttttaaaacaaaaaacagaaaacaataccaaacatgctcttaatctccggttagtttttattaaaagaaaaaggaaatgttaaaaaagaattattaaactaagaattttattatatagccacattttatatagagaatatattatgggtattaaaaactaaaaatctaattctaaactaatcaccaatttatagtgtaattttgcaaatatttaaaaaaatatattattattaattgatgaaatcttagaaagtatagatttttttagtaaagctatataaatggtgtataaatatcaatttaataggaataaaggtggcaggttgttggacttggcccacattgtcgctttcatgtataagaaagcccacgtggttttcactttcatatctaaacaatcgaaatgcatttgaccatttatttaggggcccattcattgtttaattttaatccattgaatcaggtcatagtgatgtagttttataataggaatcataagaaactattttttataaaatatttacatttttnnnntcaaagaatgtttttttacattttgtagagttttctaaaaaataatacaaaaacaacataaaatcaacaagaaaacaacataaaagtaaca

SEQ ID NO: 82972 - DNA, 890 bp, Cannabis sativa
tcgaatcttttaatctcagaatttaattaccccgtttcctagtgctggcagaggcatggaaatatttactatttttgtctcccgaatgaagctagtgttgcttggatctttgtttccaatagagttcttgctgtgccaaaatctcaaagtaattgtttttctcctcatcaaaatcagcagtatccgaagggaaggttgaatttttcataacagccatacgtttcttacttctcttcagcctttgtttaaaatttccagtcagttcgaacccccagccagacaaagccttactacagtgcttaattttatcaaacagagtacaattagcatggtcttcccagcaacttttcacgatttgtttacaatatggctcacggctccaggcattttcatatcgaaaaagtttgagttggttaacacagctactgacttcgggttgcagaaagataggcgtatggtcacttgaagaaaaatcacaatttgataaaatagcattcgggaaaagatcaagccaatgttgagttataagagctttatctaacctgatttcaacatgatgagcagtacctctcccacgttcccaggtgaaagcataaccatgaagcttcaaatcaaagaggcagcagtgacggatgacatcttgaaagccagtaagcagatatgaaggataagatcggccaccttgtttttcatcttgagaagcaatgttgttgaaatctcctatgatacaccaaggtaggggcgaagagggagcaatagatttgaggagttgccaggttctatcacgaagggttctgttcggttcaccatagaagcctgtgagtctccatcgtgcagaaccagaagaatgaatttcaatatcaatatggttgtccgagtatccaagaaga

SEQ ID NO: 82973 - DNA, 1224 bp, Cannabis sativa
  modified_base (865)..(871): a, c, t, g, unknown or other
cgagtttggcacgcatatccgacttgcgatgtacctcaaaaaatagctgggtgtatcccagcgccacaagaggcatgcgttttcgagcatgaccctgaagttactgggaaacacccaccgtttcgagcaaaaccactagtttaagaatacggttatatgggaaaagggaacacttgcatatgtcgaaaatggctgagggtatcgcagtacctcaaggaacatacgatcgcacgtatgagcattggaatatggcaacacgcccaccatttgaaggacttaaccaatgttcccataacaaaatacacaaagaatataaaaccctatgttctgaaaacagcgactaggaatgacaaagtctctgtaaaacctaaaggaagcagatatgcgagtattcaaagtgttcatccgaatagccacgagtattcaagaaatgggcaggtaaaaagatacgaatattcaaagtgttcttcctaaagttcacccttatacaaatttcaaccctacttttctaagattacccagttctacacagaaaaatatagccctatgtgtattccctacgaacatacatatccgaacctttcaacatgccagaaaacccagaaaaatagtttccatcttttcaaaaaaaaaaaaatcaagtaacacgagtggattagaaactgagctttagctttttctgattgctccctgcaaatggttgcgatctctcctgaagttttagaaagttggaaagaaaagtgtgaatctgagggaagatggatctctaaaaaaaaaaaaacactcaaagagaaaaaggggaagaggaagttaaggatgagagggaaaatgaaaaagttatttcgtatcagagggcttaaatacnnnnnnncctcataaattgggattatgacacttggcaacaagaatgcctaaggttagcttatccaacggccagccatgggcacgccaacacgaaaaccgaagattttcgtgacgtggaaccataaattgaataaaatgacataattacagccgtcatttttcgaaaccctcgatgggacaaccaaaggtcacctcctcgtgacaacctatcccctgtctctcgcaaatagtttccctcatgaccgcatctgtaaagtcgcgaaactaagggcatgttttatggtgagatttctctcacctagaaactcgagaccagactcctgtttggaggacacgtgtactcaattttcccaagaaaag

SEQ ID NO: 82974 - DNA, 547 bp, Cannabis sativa
acacaacaagatacatcaaactaaacttttacaagctgcataaacaaaagtgttaacttccatcctaaagccacacctatgataggaattgtggtgcaggttttcaggggaggatcaaaaagtcttgcaattcaacacaaggattttcttctaaatgccacaccttagttgacgatcaaaaatcatttactaaaataaatttgattattttgccagctttttagactaattaatattaaatagcatacaaatgtaaaaaaggcattgtataagaaaagctagttgtgcataccctagtctaaatataaaagaaaaaacattcttttctattagagataagccaaaatttagactgggcttggagggttgcgccaggccaatgcagtagtgcaacgcataggcgacgctcgaggacccaaatagcaagctattgaacgggccctcacccttaaaaaattaatttaatatcgtgtggaccattggcccacatatcagatattaaactgataagaacagatactacacttgatcttagccaaaaggccga

SEQ ID NO: 82975 - DNA, 588 bp, Cannabis sativa
tgtgtgtagaaaatggtttgtgggattgagggattgtggattaaggtgttggtaagtaatcaccatgtccaactactaagcttgaacatcattgaatgtgtctccagcttaattgaagtgtcctcctttaaattttgtttactgaccatttttatgaagatgataagttaaagataagagtgctattcttttctaagaaaaataaaagaaagataagagttatttaatgaatgctttatgtgttaattatgagaagcactactacaacaacaaaaaattatgtacattattattaggtgctgtgtctaattgatttggctatccattttaatgtgtatcttgactttcataaggtacccttttattatgtcattactttgatatgataattgagataagataggaaaacttaaaaaaaaaaaataaaataaaataaaaaagacagagttgaaggtatattctaattgactattgactatgacctaatttttagctaaagatgcttaatctttaaagtgatgaaattgtaaataataatcaaacataattaagtaaataagaacactaaaatttatagaaatttagccc

SEQ ID NO: 82976 - DNA, 1194 bp, Cannabis sativa
  modified_base (27)..(28): a, c, t, g, unknown or other
ttaatagttcaggggaaatttttaacnnccaaaaaagtttagggggcatgatttagtacatgtcaaagttcagggagaaaattactaattagcctagtatataaaaaatagttctatgtttttgatgtgtttttcaagaaaatacaaacaaattccttactcttggactctccatcacccaaattctgttttcttctaatataaaatccataataactactatgtgagttactttctctctcaaaaatagaaagttcttattcattttcttgcgtaaatcctaactaaattaatgttattgatactcctctgtacataaatcacaagaattcggtgaatatttttgaattaaaaaatttgaattttaattgtttataaaatcatataactgtcactgttacttttttttttttttgacaaggctctatcactgttatttgtttattaaaattctgaagccttaaatttatttttgttataatttctcaattagcaaattttatatacacaatctaaatagtaaattgtgcaatcataactattttttgacacagagcatatcttgacaagagattctcaatggtttgttgaaggtagttaatcaagaggagactaagctaattgttatcattattctttttgtcatcctcaaaaagtatcacatttattttatgcttagagaaactgctgatcattaaactgtaagaacaaaaatattgtactgcttgagaagatattgcctctcaaatgggcacgtggaatgcacgtgctcctctaactagtatataaataagaacctcattttgtgtgtaaacgaaatcgatcccaactgaacaggagcagcgtttgtcctctccataattttttatagaataaaacgtccactattctatcaatcaataaagcataaaaaagaagcaacaaccggaaagaatgagttgaaaattaaacataagagcaatgatattgattcctacctatcttttccatttacaatagggttctcatgggaacagaatattctggcctagcttgtatgaattgccctccgagaacaacacaaaaacactacgaacccaagaagtttggagtagggttgtacatcggtcggtttagtcggtttctactacacattttccaacccaacgtaaagatcgggttgtaaaattctgcatgcaaatacgtaatattcca

SEQ ID NO: 82977 - DNA, 766 bp, Cannabis sativa
gtgttaaataactctgagcgggtgggctcgaggggtaaagactaattcttgcctttcatctctgacttgatcggtaggtttgcacttattagtttgcctgtgaagggtgatcaactaacatgggataaccactgtgatggagagaaccacattaagttggctctggataaagctttggcgaacagggactggctcgacctcttcccaaaggctatagtcaagtcccttcatacctgtaattctgaacatcgccctctatgaattagtacgatgaaccaagattcaagactgcttaggtcttttcgttttgaggcgtggtggactagggacccccggagctcgcttattgtggatgatgcctggggctctgtctctcatggctgggccccggccagggttttcaagaaggtagggactacgcgcattgccctttgtaaatggcaaaaggcccagttcgggaaactagatactcgcattgctaatctagaacgccatctgaaggagatccagaactctcctacgggtttgagggattggaaagaggaggttgacacaaggaggactctaaatgaagcacttaggcagagggccacttactggcaacaaagagcccgtatctcatggattaaagagggagacaagtgctccaaatttttcttcactacggttaccatcagaaatagacgtaatactgtggagagtataatgaataagaatggggtgtggattagacacagaggtgacattggcaaggaattctctgatt

SEQ ID NO: 82978 - DNA, 643 bp, Cannabis sativa
  modified_base (50)..(55): a, c, t, g, unknown or other
tccctccccttgatacaaaacggcttgatcaatagcgactctagcgcttnnnnnnataccatccgccacagagtttaatctacgattaataaaaaagaacttgcataaagaaagttttttagaaacattaactactgaaaagaaaatactagcacatttccaatcgggaggcccttctcctgcatttagagctgtaactgctaccaaggaatctgaaagaaatcttttcatttttgcaagcaatctcattcttttcatttttttttcgaatcataaacgaaattgagcttgagaattcgagaacattatctacattcaacctcagcttccatgaataaactcatttctaataaattgcactctaaaataaaaatgcaacaaataatcttgggtatgtttgaatgaaaacaatatataaatggtaaactcaaaatctagttttatacacatctttttataagatttatttattgaaagataaattttgaaaatcaaacattaaataccaatgtacaattttaagggtgtgtttggaaataattatataattactaggtagaataattactatgttggtaattacacagtatagtaattacactatattttaaaatgcaaggtgtatttggatatgagatggtaa

SEQ ID NO: 82979 - DNA, 505 bp, Cannabis sativa
cttgagatcctacaattctatattttaataatcaattgaaattaaattaaagaaatcaataaaagctccttgtgatctattagaagaaacatgaggttttttttcacacacatacacccatcatttattcccagttatcaatgatatactggtcaagatgtttataacattggtaaaaggtcaagaattgacaatggatcacaacgtctggaaaggaaaattaaatttttttaagagaattagaggggattgggctagtctttactcaaaagaatcaagtattgggtggctctttggggtgtttgataccatacgatttcaaagatgatatcattttccgaatttattagggattggtgtaccttttataagccctaagacatgacatctaatcatttatcatttatagcttgtgctaaattatattaaacttttggcactcgcctattatcacgtatttcagctagctttttaagatttatggaaatttctatttgcttctgaa

SEQ ID NO: 82980 - DNA, 1136 bp, Cannabis sativa
aataaataaaaaaagaataaaaaacatttttgccactgaacttatagcactaccagcttgtagcctttataatatagggcttgttaaaaatactcctttgtatttcacacttgttggaatatagtccttctgttagctttccatccacttgactgttaattgttgactagaacaacacatgttacttgtttattagtcaaataaataaatattttaaaaaattattttaattaatttaaaaaattagatataaattaaaaatatttttaaaatatcatattttataaatttgtaacttaaaacaaacttattttttaattatatatataatacgttttcatcttattatattttacaaatttgtaacttaaaacaaacttattttttaattatatatataatacgttttcatcttcttcattcttcttcctcaaaacaacaattcaccaattttatcttcaccttgcgctttattacctaaattttaatacaaaaaatagtctcatatttcattttcattcaagtttaattttgcccaaatattaacgatttaagaaatcaaacaattatttttaatatctccaaaacaaaaactaaatctgaataaatactgtagtcatggctgcaaatcaaagaagttaggaatttcgctattgatttttcgaaacaaaacttcttgattgttgcgagaaaaaaaaatataatggaagcaaaatacatctgaacagaccagagaacaaaaagatgaaatataaaattgtaatctcacaaaaaaatgttcacaaaattatgagtttctaaaaaatccttcaattttgttccagctataacaccaaaaaaacaacagccactgttccatttgaggttaagagctgccattgatatgcaataaccaccaccatctagtcatctacttcgagaaaactcctttttattttcaaaaaactccaatatctgaggcttcaagatccaagtctagcgccttctcctcctccccttcgtcttcatagctgtacgcattcttcattagatctggattggggtgtgaatatatagggggaatgtggtgggaagatctcacgtggttctgatctaaggtgagaaagaaaaaaaaaaataagaaaaaggaagatgaa

SEQ ID NO: 82981 - DNA, 851 bp, Cannabis sativa
aagattaaaacttaaaaattttgtaaagaactaacaaaaaaaaattaaaaatttatagaaaacatatttctcttaatttaaaggtaatacaaaatcaatagtagttaagccgaaaaataaaataccatctatcaataaaaatcacaaagatgtgtatatccatatccaaagtcaattaactaaattcaaataaaagtattaaataaaataccatctacgaataaagtcacaaagatgtatatctatatctaagtcaattaatcaaactaacggaaagtatatgtatggttgataataatatactatgcgtaaaatcaaaatagaaacacttgaaaatataatcccttccatataataataactatattagataatctcatcataatactaagattattacttacccaatatcaaccataattctttattgatttttgaaatcgagaatgatatgtgagtgttgagaatggcaacaatgaaagagatatagatgctatatatttataggtttttatatataataggatatatatattttttggtacacgactattttttgttttcttaattaatattatttaaaaaaaatcagggaattaaaggaggaatttgatagatgtatttgaaatgatttttcaattaatattttatataaaagaatgagagaattcatgagagaatagatgaaggtatttagaataattttagagtgtcatgtcaccgcttcatacttctcctttttatatatataaagatataaagatatatactatatagattaaaggtgtttatccaatctaatcggcactattttgctcatagtgcatttgatccgcactaagtgcggattt

SEQ ID NO: 82982 - DNA, 815 bp, Cannabis sativa
tgtcttcacgctttaagaaacttttgtatgcaaatattctaggataagtaataagtaaacatgtttaccctaattttctaagagggaggactaaagtgtgcgggcctctattatctcgtcaacatggagaagaaatcctttggcatgatattgggacaaacttatattgaggaaatagtgatcaaatccattctatcttatggaggagaagtcctctagaaaatgagcattaatgatggtaaatggagtgttacctgctcctgacgtgctggcacccaaagcaccaatattcagaagcatagccccagaacagttggctagctccacatcatctctccaaaccactccttcttctcccaactagtgaagatgaatctcgtcacgctttacttctttagcaacagctttggccatgatctcgattagtccatccttaaatcgcttgcaggccatgaaaaataggaggcacaatgctctaatgttgcgaaattaggccataggttttaaggttgacatccatccccatgtggccaacctctaggtcatccttgtcatattccttgtacactacttcataaggaaaaatgtggacggaaggagttgtttgcgcataaggccctaatattaggataaacgcaatgaaaaaaaaagttagacttttatcaagggttcacaagcagtgctcagtaaagataagaaaaggaaaggaagataggaacttaccaactctctggaaatcaaacatcagtgtcaaatacctatggagtagaaccctggacgtgaagaaccagtattcgctcatgtccaaaaggtgg

SEQ ID NO: 82983 - DNA, 769 bp, Cannabis sativa
aaaaaaaaaaaaaacagctagtgtttttctttttttgaatatgggttccttttttcccgttcataatgtgtgccttttctacataaacctttcctatttatgtcctacattctttcatttgcctttattttggtgtttggctgacacatgtattttatttctttgtaacttcatctgccacatgtcttatttagtggagataggttttattttcttcttacactttgttcctattttatccatcagtgtcttgttataggacttttgatgttatagtctgtttagaataatttctttctgcaggatatttttttttggtctaggattctgaagtgaccttcgcttcgattcgttgagttcttttagtttttcacgacgggaatctgatcgtattctttctcagttttatgtggttctgctttaaaaaattaatgttctggattctactcggttctggttacatttcatccgttggagagtgttttcatttatcacagctagcttatggctttgttctatctcagactttggccctttagtatgctttggggtgtgtcatcgtcagcctactttagtgagttcaggtctgaattgccattactgtagacagcgggtcctcgtttcgatcgtttcttgggtttgttatatatttttttggcatgtttcttctctctttttgctactttatgggcttatatattttcattgttttatctctgtgtgggatgttttatggtagtgggcttgttgggcctctttttgggaatat

SEQ ID NO: 82984 - DNA, 1424 bp, Cannabis sativa
ttatcagttgtttattccaatgtggttaacccctatttatacaaatacaagagtcaaatattaagaaactaagaaaaatgggaaactaagaaaaagtgaatgctgattacaattaatagtaataaataaaatatttggacatccacacaatcattaatatttataacatgttcaaataaaaggatttttcttgtacgtataatcaaaaagagatactgaattgtttaagtatttaaataatataccatcttttaacaaactttcgatattgtgggaatatttattataaattattggaaaattctataatgcacctcaaggaatgcatcgatatatttctataagttttactatccgatataactttttagtcaaattttttctcatggtcatgtaaattatagttatttaaaacatattataaaattttaagaaattcagaaaagtttaacatgccaaaaaatatgttcaaacagtgtgttgcacgagtgactattttattttatatgcgtgtaaaatagactatttgaatattatcttctaaattataaattattctaaatttttcaaagagtgcattgtagaatcaccctaaattattttaataaaagaaataattttaatctaagagtgtttattataataataaaaatttacgtgctaagttttgatatttgcagttattttttctaagatattttttttttttctaagatattttactataataaaaatttattttcaattttttttttttaaactctgatatttattctaagatatagtatataaatctaaactaattgaagaaatacacgtatgttgagtcttaagtccagttctttattctttctgcactaacttctcacacattttttatcaacctttatttttattttctacgaaatttcaaaacaatttgtggctactgtatctgaattttcaacgttaattgttatatactctacttgattcgaagtcaggtattttttttcctactaatattgatttaaatattagaatgtacttattttgttatatatatgcaatgcaaaaaatttgtactatcttttccttttaatttatacagatttttatatataagtgaaagcattatgctttatagaacctctagaaaaaaaaaattattactgcctcacgagatcacctaccatcaaaatagtcttacatatcctctagaagaagaaagaaaaattattaggatctttcataaaaatatgtgtggtatttttaaaaattactataaaatatgtgtattttaaaaataaaatatttttttagattatataccatgacccagccctatatctattctatataaagtgtgtctatataactaaaattcttgatttatgagaaatttatgggcgactttttagttttatttaataaaataataaaat

SEQ ID NO: 82985 - DNA, 793 bp, Cannabis sativa
  modified_base (694)..(698): a, c, t, g, unknown or other
aggcccccatgccatattgggtgcccaggttgacaaatttaacacggggtactccgagacgtcattctagagaagtctcccaagcatttcccttattttcgcccacgagaaagacacaagtgcttttgggaagcaaaagaagccatcaaggcccccaatgaagagctgggcgccaaggttaacgtagccacacttctcgtggtctagttgatccgattctgattctgtctcggacattcttcttgtttcactccaaaaataagatattagacttgaaatcaggagaaaatattgttcaagagtgagttagcccccaggaatcaccaagtgtcagtgtaatgaccgcttgacttttatgagaattaacaaataattaagttatctatttattttatgattatattgatattaaactaaacatattccacccttcttatattattcttttcattctctcctatccgtagcttagcttcattttttttcttcttcttattttgcatgtgaattgtaaattttttctctcatgtaagttttatagtgcaattttctaaagatttttttaagtcttttttctttatttttattttctaaattcaacaatgtatgacaactacaatcaatatatataaaggagaagaatgagacggtcacataacactctaaaaaaatataaatctacaaattgatattnnnnnattattttaataatttttctataaaaatataaaatatttaaaaaaaataaattccaaaaaatctatacatatgtataaagaagaggaatgaggcg

SEQ ID NO: 82986 - DNA, 847 bp, Cannabis sativa
attcttcctcctcttgatgcttctagttgggatacttgtgttgattgtactcgtagaaaatttactaaaacaagaaagaagactgccacagtagtcaatcgttattagaaattatccacaatggcattagtggacctcattccactacgttgtacagaatcaagtattttttaacttttattgataatttttctcgatatggcttcacctacttgagtaaagaaaaatctgatgctcttgattaactcaaaatattttgaaataagattgagaaacaattaggaagagtcactaagattttccatttggatcatggagaagaatattatgactgttatttaaaatctagacaacacatgaggccttttgttgagtaattacaagaaaattgtgtagtgtttctcaatacactatgcctagttaacctgagaaaaatggtgttgctgaaaggaaaaatcacacactaatggacatggttagaagcatgatgagtagatcaaatttgacagagttcttatgggatgaagcactcatgactgctacttatatcttaaatcgtgtttcaagtaaatctgatctccaaacttcttttgagttgtggacagggagaaagcctagtttgaatcatcttcatcaatggggttgtctagctgaagtaaggatttataatcctaatttgaaaaagttagatccgagaacaattcgatgttttttctttggttatctattgcactcaaagggttattgcttttattgtcctacccgtggtacgctaatttttgaatctcggactgttaaatttcttaaatttcatgttgctgaaaatattccttcaacatctcttgaa

SEQ ID NO: 82987 - DNA, 889 bp, Cannabis sativa
caagttgagaagaaagtaactccaaccgaggtttcaagcttaaagtttcacaaagaaaaataaaagtgggtttcttttgataaaccatatctttgaggaatttaaccgtccctgggttcccaagcccatggcaataccagctcaatatactcataatgattggcgaacccgatcgaacgagtccgccattaaatcgttttttgagtgagttcccttgtcttggcccaaaattacatcacaattctccactagcccattcggcccactaatgatgtcttggcccaatctttttcttttagtttcaagaaaaaccataccctcctcatcaatgtccaaatcagatgccacctcattaacacttctatttcctaaaataacttctccaacaaactcattattgtgcacggcacaatttcccacaaaatttgcatggccattaatcaaatccctattcccatgcatcaatccttgacccaccattctaggaatcccactttgctgcctatccctaaaatcatgggaattaaaatgtttctctcttctcggctggaaatcaacgcccaggtcctgattagccgcccccatcacgtctccaccacctcctggccgacccacctccgaccctccagcacccccaacaccaaacgacgacgcatcagaactcccactggcaaccgtcgcactaaactgcccagccccacctgacgccgatcggagccacttagcacccatggcgtattgagttcttcgcgggttcgccttcatgaaggaaacatacagtttgacgatagaagtgatgggttgaataaagagcctagaacaatattgatcggtgtggcctataacaccacaaatgaaacaaaaagtcggcacaaattcatagcgaaaa

SEQ ID NO: 82988 - DNA, 1941 bp, Cannabis sativa
aatcatcaaaacaaggagatcgaaaagtttgagttaacagaactgtcgattgtgaaggaaatgtaagagtagtgggcctcagctagaaaggtgattttcttttcgttgtgagcctttttatggtctgacacaaggcacaagctgcctaatttcatgggattgtgttagaattgtgccacatgggtcagcttccatgtcctaaaatgttcccagatgccctttcatgttccgttctcggtgcctcctgggggcatccttctttgatctacacttgtttactcctcgagtgtttgttggtcgatccgggttcgggcctctgaatccatcgttaagagttagccttgatgtgaccgaatgtcaagtttggcttcacctattcttgatggatgggttgtgcatctgcttcacatggacctaatgaatgggccttgtttctgtattgggcctctaccacgactcattttactagctatccaaaaacacaacatttacccccaagccttcggggctcaagactcgcggaggcttgctgctccccattcgagtttaggatcgtaccaagggccatgaaatgggacaacctcttgatatttttccatgggatgatatgaaagcatctagacctttggtattcaattggtgcattccacgtgtcaacataatactggtgtgtgttcgtcacacgtcctattgggacgtgtactatcttaggctgaggacttatgattgatcatgttagagtgttccccaaggcgcatgccatcattattgcgagcctcttcatttctaatgaagcattaaaaggcacccttttacattcccagatcgttagatccgtgggatctgtgttttctcaaactcaatctaagcccttggatcaaagacacgcgaatcgcccctaaacttataaatactcaacaagtctctcatttggcacttttatccatttttgtgaacatttgagttttcaaagagacgaatttcccttctaaacccaaaaatcttcatcagtaaatgtccaacgctagttttgagcttgttaaccccttattgtagcttcgacataaactgttttcaaaagccacctatcatacccgtaacaacgtcatcttcattggattttcaaaaagattaattctgacaaacttgtaaggaggctttgctattccaggtgaggatctcatcgactgtttagaatttgtcacccccagtttcatctatcacaagtaaatagcccatctctataaatttgttgttgttttttgtttggacaaattttggggatacagatggttaaatgagcatgctatgattagggggatttttatttcctttctagatttttggtttatcgaaattgtatgctccaccatgtaaggcagtttgtttgcttttgtatgcttgatgaactagagacattaggaatgtagctaatatttagaaccttaccatgcttaaggatttaggaaaactaggaatttccaaattcgtcgcttctagatgattatcgattctaagggttttggtaacgttcactgagggcattattgggacccaagaattctgttcgggatccttttagttctggaaaactacgtattttctttcgttctttttatttgcattcccaatttcaatatttgggaataaactattcctatatatagggtttgatggtgatctctccatgcagttactggggaggactctcccatacccttgctatccctttttttttactttgggtaactggttgatattttcttctcagtttatttctcttttatgtcgagagacagtccattgggcgtaggcaatcatggtgttgtccgtgacatgaatgatccatggtggtgttgggaaaatatgcttaataggatcgattttattcttcaagaaaattaatatttaacataaatattaatttcatataacatcaat

SEQ ID NO: 82989 - DNA, 535 bp, Cannabis sativa
tattattttcaaaagaaaaaactatttagataacgttgtattggaacatcgcatcaggggtagcatgccttttgatttgttataattcttggtttgtaatttcgtggcattaacgtaagaacaaaaaattccaaattagtggtagtggaagagcccaaaaattattaaagaaaagaaaagtgctagttcaaccgaaaaaacattaattcttaaatgttaaatgaaaattataaaaatagtagtatatggatatgtatttaatttaatgcgtgtttgtaaagtcgttgaatttgagtataatccgagataattacacaattttcatatttttcgaattatgaaattacatttggtaattattaagaaaatttcattttaaatattaattattaaaaaagtattattaaaaattcatatataattattagaagaattaccccatatactatttttttaactacactttagttgctgatttctatacgatgatagttgcaatagaggaatttacgtaaaattttgtaaaaatacaaaa

SEQ ID NO: 82990 - DNA, 510 bp, Cannabis sativa
attagattaaactaatataattaaatgtaatacaattaatttaaactttagcaaatgagctttcacaattaaggttgctagtatggaggaagactgggtctagtatgtcattcctactttaatggttccctaacttccataaaagatccaaaataaatgaatttaactttagttttaattaattattattcattgattaagcccaacaatgtcacttagtattctaattggggttaaataaaacatatcattttatgatttttttttgacaaaattctatgatgtttttatttagtaactacaccatatataacatacatatgaactactatatgcatataagttcaatagtaaacatatagcttcacaaagtcaaataatttggatgggtcctattcatgttgataagtaagcaaatcaaattatgaaagaaatcaattaattagatttattaacaagttaaccaagggttaatttagatcctatttctaggacctatcatcaagttaa

SEQ ID NO: 82991 - DNA, 679 bp, Cannabis sativa
aaaaattaaatcataattttacttgataaaatgtattatatatataaaatgttaccaatttagttggtgaaggggctaattttgcaaggaatgctgacaccacacttgccgggaagtccagcggcaagattgtagtcgaatcctttgattctacctgcagtttctttcaagcaattgcaggtagcttgacggttggcgggagtcctggctgcattgcttaacgacttaagaccgttacagcacttagccgggacagtcccgctcccgccaaaagttaggtaattcaagcatgggtcaaagttgctatccacttggctgcatgttatggcatgtgtcactggtgatgctatcaccatggccaataccaccaagcaaaataccttcacaattgaacttgccatatttgttgtatactagggactaaatagcaaatcaagattatgtatatgtatatattttgtgtggagtatatatatatagcttagaagatttgtgtagtgatgatagtgtgtaccttgtcctctcattttataggcaaataataaagtaatactatgagttatattattatagtttttggaagggttagttggtggtggttgtgcttctattaaaattgatatttaggagaatatatattttttataatatctattggggcttttttatttttatactt

SEQ ID NO: 82992 - DNA, 523 bp, Cannabis sativa
tttattatgggtcttgaagaacacagaaaactagggtttaatggtttctttttgtagaatagattgttttagatctgttaagaatcttgaccagcccattcaaggtgttttttacgttggtcggctggttatatgttatttggatggttcttatgctatctagatgttcttttatactgtctgtatgttcatctccctttccatctacacagataaacccgtgggactactgggaaggtgaacaccagatagacccagatatgctcagtcttctctttgaagatcagcccgtaccccaagtaagttcatctggtcattctttgaccatctcttcaagtagcttttctaacttagaagtcagcaatggttctcctgaacctaaaatctaacactaccactactctgaactgattagagcagaaaactaaagtcggttcatttgggaactgaaccggggttggatgaaattttttccaacttcttggacaaacattgtctagcctggtgtcccagacaccctgcc

SEQ ID NO: 82993 - DNA, 923 bp, Cannabis sativa
  modified_base (740)..(741): a, c, t, g, unknown or other
catacatagaaaataatatatatgtgacgtttgataatgtttttattttattttttaattttatttaagtcggatccggagctgatgtcgaggtttgggtccgggatcagagtatagggacaggtccaggggtcggtgtccaggttcgggttgggtctgcattcggggtcgagctcgagtatggattcgggagtctggatctggattcgggtctagggccaaggtccaagtcccaatctggagccgaggtcgggtccgagtctgaattcgagtttgtgtttggatttgaattcgggtgttgggttagttctggatctagatttggggtctgggtgtgagtttggtcgaagtctaaaatattaaataagaaaaaaataatttaaaaaaatattaaaagtgattcttttttattttaaaaatttttaaaattttaatttttaattaaaaacaattttatttaatatatttttttaaaatattactacttttttaattaaaaaaaaaacaactaatttaaaaatatttaccacacaaaggcgaccatatataattgacgtcaaaaaaaagagcttatcaaattagttgataatatacctttgaagccagaactttatttgattattatttttggactaaatttacacataacattttgaattttggtaagtgttatatatatttgtatataagtcatacaatattgtcacgatctatacgtactcatatatatatatatatanntatatatatatacatatttatgtgattggattaaatatggatccgtactacttctactaaccctttttttattgaagtatttatatattacattgcataatttgagacttaaatccaagatctccaacacacaccctcacatgagttaacctaagttgttctacttctactaaccttataaa

SEQ ID NO: 82994 - DNA, 1039 bp, Cannabis sativa
cagtgaactctgtccaaatacaggggctttatgagttcacggcaaactaagaatttgtgctctttatatggcactatctattcgctgaaagagtaaacatccaactccacaaattctcatcaacactaacaaagaaaatgtaccagataaagaccatgtcaatcattcttaattaaactaatttggactcgagggaataccacaaatgatttctagtactcacccaacccaacatcaaggttttcctgctgaaggctggaacacataacatgttcagtctctacctgtgtaattcacaagtgcaagctcaccatatccggaatacgggtcacacactaagggtaaggagcatatggttgaaggcactactcacattaactttttggaagacaatggctgaaactgaataggatcatacaattaaaattatttaaaaaatgaagatacttaatgcaaagcgaatcactagagcctaatgcaaatttaatgtaagtaggcataggcatcctataaattacaagtagaccctttcaaagtgcaatgagagatttcacaagtgacaagaccacaattagagtatggatgtttgtctcttgtaattccaagctaagaaaaagctaatgagcatacttttttttattaattatacaaagaattatgcacaataataagcagctaggttgttcatcctcataaagtattagtgttatcaacacaaaagtgcatctatgtccacaaagcattttataatcgggcattgcatatgcattgctttagttgtgagttacccatcatcacatattcaaatatcacatagcgtagggccatggatttgcaatgtgcatattttaaagacttcaaatttcacggtataagcatttttttcctaggagttcttgtgcttgttgttacaaattgttgattaactttatgttttcttgttctgtttaccatggttttcttccgccataagtgaggctttcaatttatatcaaggggaggccggtctacgacgagtggtctctttctcttttttttt

SEQ ID NO: 82995 - DNA, 2540 bp, Cannabis sativa
tagactttatgtttgtattacctaaaactacagggtaatataattctgtatgggtaatagtcgacaagtatacgaagttagctcatttcttacctattcaaatgaacttctccattgatcagtatgttgagttctatgttagagaaatagttcatattcagggtgctctgaagtctatagtatctaatcggttccaaagttcacatcaagattttgagagagtctacatcgagctatggtacacatttaaagttcagtataacattctatcctcagacaaatggacagttcgaaaggattatacagattttagaagacatgttacgggcatgtgtattggactttgaaggagcttggataaagtaccttccctggatcaagttttcttacaacaatagctaccaatcaactatcgggatggctccgtacgaactgctttatggtagaaaatgcatatcacctatccattgggatgagttaggtgagaaaaaagttcttaggtcctaaagttattcagaagacgaatgaagcaattgacaaaattagagctcaattgctccctacttagagtagatagaagagttatgctaatccaaagcgaaataatattgaattttaggttggagatatggtatttctccgtatttcacccttgaaatgagtaaaatgctttggaaagagaaggaaactaagcctgaggttcattggacctttcgagatcctagagaggatagggaaagtggcatacaggttggctatgcccccagcactagctgttgtaaagaacgtgttttatattttaacgcttcaaaagtatgtgcgagagtcatctcatattttaagttacgaagccttggaacttcagccagatctctcatatgaagaacaactagttgaaatacttgatagaagagaaaaagtcttgagaaacaagacattaacactagtgaaagtattatggggaaacaacaagatcgaagaggcaagttgggagttagaatcagatacgaaacagaaatattctgatcttttcaggtaaatttcgagatgaaatttctataaggagaggatatttgtaatatcttaaagtttagaattggattaaaataaatgtaggattatattatgatataataaattatatgctctaatttgagagtattcgaatttaagaccccatttatgtgatgagtatttttgtaattttgacctgaaataacgggttaaattaaaattttattatattttttgctaacagactatattattatgtagtatgtttgcttttttgtgttaaaagtaaattttgataagttagcgcagtatagtcacaatcaggtattttaactcgaatcgagtttgggaatcaaaatttataaataatgtggctagggcaatgatctgaaatacatatatgattatattgatttatgtgtgatgtgaatgacatttatgccctagattactaaatatgatgaactttggccctataggcgaaatgcatttgaccaaaaagttaataatttgaggtatattttttatttatgaaaaaggaatctcaaaactttgttcatggctttgaaaccctcttgataaggaagtgtagcattttgaagaggattttggttgtgggttgtgtttactttggaaggatcatttgaggtagctttaatctcattttaattgatctaatttttgaattttctctttgttttggagcttacgtgttgttgtcatggtcttttagacttggatgtaaagtattttcgctatggatattaagctagtaatgttgtgttgcttaagtttagcaaaatctcaattttaggtcattttttggttgtattttttagcatgaattttgaacatttaagttgtgttagttgctcttaaaatgatgaattgaacatggatttatatttggattctaggctttgattatgtaaattttaagaatttttgagcttgaatgtatgtattagacatgaaatatttgttttgttttgaacgtccatacactctaaattggtattagaaaccaataggatatcatgtttgaagtttggtataaatttgtgcatgtttggagttgaaatttgggtttttatgggttctcaagcccagccgctgtgaccagacttatggaatcacaacccgagccataagttatgacagatatgtaatatctataacttgggtggtcaaaagtcacactttgagtgttattgaaaaataatacttacaaatgatcatttaatttatattacaaaattaaataaaatacatagttaaaataatagaataactcctataataaaaaaaattatttaataaaataggaccacccgttaatatacatatatatgtagaacaatactattctcacagttgtgtagtcaccaaataataaaatttgataatttgaaaaacactaaaataatactaagcatcaatcatattcttcatccctaatcgttaatagctatttaaataatacaaaccacccattaataattagctacatactcaatcattaaaaa

SEQ ID NO: 82996 - DNA, 878 bp, Cannabis sativa
tcttgcctcccaggtatgtaaataagtatgctcatgtcatacatttcaattgcaattaaggtaaaagaacaaacagtttttatagtttgtaatgtggttatgtttattagtacaggtttaatttggtttaattaaatatatagttatattttaacaaatatattgcttcaaatgaattcaatgaaaatggtatctaattgtaacaaaatttcttatgtaggtatatttcatatttgttgcagataatgtactttttttttttttgatgaaataaaatattaatccatttaattgctctttgtttgttaatttacttggataggaagaatcagaatttccaattctacagccactaccttcttatggattagagaaaaattccacaggaaggttcagcagtctaattatgggaacaaatctcactgatgttgtaattacaggtaaacaagtttttcaattaacaattttatataaatatatatgccaaaaaaatgtacatggtatactggattttgtttctaatttgtttaattgaaaaataatagggaacaatggcaccatagatggacaaggtaaatcttggtggaccaagttcaaggctcatgaattaaatgcagttaggccattgttaattgagatcttgttctctcgtgatatccaaatcttcaacctaactttgcttaattcaccttcttggttcgttcatcctgtatactcaaggtttgaaaatacgatcccttcttttttaattttcttaattaataataacaacaataataattcacatttatgagtgactgtgtttgcagcaatataatagtccaagggctaacaattcttgctccagtcgatgttcccaacacagatggaatcaaccc

SEQ ID NO: 82997 - DNA, 1469 bp, Cannabis sativa
  modified_base (771)..(771): a, c, t, g, unknown or other
aaaaaacaaaacatcattaataattattaataaaataaatatttaaaaattattaataataatactgtacttaaaaaatatgtattacaccgatcattaataattgagcattgttattggacatcactggtatccaataccttttataggaggcaccttataattagttagcaatattttttaaaaattattttcttaagttatatgagattcgatacttaattacatgtggtatgacatcgaggagagtgctagctagacacgagtggtgccttttagcattttcttaataaataatgacaaaattgtaattaaaagtagtatttattgtgtgtcaaatttgacataatgttatgtcttgtgctaaatttagtccaacttgtaacatgtgtcaaatttagcaattacacaccattaatggagaaatcttttattaaaaagtacaaaaatgaatacactatctatttagcacttcattagaaatgatctaagtgtatcacacatgtcaaattgtgtcaaatatttagcatacaatgtagcatgattagggatgcacacggtgcggaaaattagcggggagtgctctcctgtccccattcccgttaaggattttaattctcatcctcgcttatttcccgtcggggatgtggtgggaaatcccctaatgggggcgaggacaggacgagaaatcccctaataaaaaaaattataatacaaatttaaacatataaaaatattaaactacataaaaattaaaatattacgcattanttattattcaataatctaattattattatccaaaacaaaacttaaaattcataaaaaaaaatactaatatactaaaaaatacaaacataaattataaattataaaatattactagaaatataaaataaaatactaaataggtccccgttggggcggtgagtgtgacctcattcccgccccatttaacattcggggacataaaagtaatccctgtctccacctcattttctatttagacaaggaatcccggcaagaccgatcctcatgagagaaatgtgcatctctaagcataatacatattttcgatcaccataaatgctactgtttttaatctacttttataattattttagtaatatctttagctatcacattaaatgctaaccgttttattttattattaactatagctattaataataaaatatgaagagaaattattatttttgtatattaacaaatattaaatgaacattgattatgattaaattttgcatctagttttattcttttgcgttggaacattatgttaaatattgtcacatattaattctttttttgaacatattgttaaatatgatattaaatatatcacatattaattttttagggacagaatttggtcccgttatgccaaaatagggaatacaatccctgattgtactgtagccgttagattgaattggggcatgatctaa

SEQ ID NO: 82998 - DNA, 1179 bp, Cannabis sativa
caggtttgataatcattggctggatcacaagtccttctccaaatgtttcgaaagatggtggaaggaggaaattaatgacgggtggccaggcacaaagtttatgaagaaactgaaaatacttcaagggaaggtgaaggagtggagtaagtccacgttcggacaaaatagggccaagaagattgcgttggaaggaagattgggggtgttagacaaactagaaggaacctcgttctggaaccaatcgttacttgacgaaagaaggaaattaaaagaggagtggaagtggttgaattttgaagaagaaagaggtacttggctgaaatctaagtgcaaatgggcaagagaaggagatgcaaactcaagattcttccataatttattaaatgcaaggaaggccaggaataccatctcgagaattgaaagagaaaatggggacatcattgataatgagaaggaaattgctgaggagctaatcgcttttttttcaaaactctatacttcagaggcaagaatggggtccgggattgaaggtattgagtggcaacagatagcggaatcttcagccgggcaactagaatgcccttttgaagaagaagaagtcagaaacattgtcttcagttgtgaaggaaataaagccccggggccggacggctttagtctggcggtcctccaacataattgggagacgattaagcatgacctcatggaagtgtttacggcttttcatagagagggaagaattgagggcagtatcaatgacacgtttatatgtctgatccctaaaagattaaatagctgcaaagtcaaagattttagacctatcagcctcatcacaagcgtgtataaaatcattgccaagactcttgccactaggcttcgcggtgttttgggagagactatttccgaaacccaatcggctttcgtggaagggagacagatcctagactcggttctaatggcaaatgaagcagttgaggactataggagtcgtggtagaaaagggttcgtgctcaagatcgactttgaaaaagcatatgatcgtgttgattggggattcttagatatggttctgaggaaaaaaggttttggggagcggtggagaaaatggatacgaggatgtgtctcgtcaacttcattctccatattcattaatggtagggtaagaggcaagttcaatgg

SEQ ID NO: 82999 - DNA, 655 bp, Cannabis sativa
aaaaaaaacttctttggatttaaattcgtgtgcatgttttcctaagcacgcctatatatatttatatatttatatataaaaatgagcaatgaattaaaggccatatatacaattttacatgtggcttgaccatctcgaaggattgtatgcatgtttttggaaaaaaacatataataatattcataatattgataaagatcagcactatatattataataattaacttaactcctatcatcttgtaatactatttgatcatatatatatgctaattaaattgttatttttatatataacaatgtggcctacacatctagatcatagtatatccctttcatgacccatataatcgatccaaatatacacatagattttgtgactttatttaaattgaaaagtagtatatttaaattttgtgatttatgttatgttgtttaattttgatccttttgcctgtaaaacaatttacgaataaggtcgtgcatgctttggccagcgtgctcaggcttttctatatggcgttgatcatgtatttagtgaggactttttacttattatttggataatttgatttaatgaaagttattaaattattcaaaaagaaaaaaaaaaaaaagtagtgtttagtacaagtaatttagtagtaccttttaa

SEQ ID NO: 83000 - DNA, 1059 bp, Cannabis sativa
tatgtcgaggcttcctttggggtttgaaagaaaatcgaacaagagttcacttgataagttgggagagagtttgtcttcctaaagcttttggtggtcttgggtttaaggatggtactaagtggaacaaagcttcgttagcaagattcatttgggacttaatatataaaaaagatttgctttgagttacgtggataaacttggtttatctcaaaggaagtgatttccggtcttataacttgaggatggacacgagttggtactggagaaagctttgtaggcagcgtacaacttacaaccaagctgatataatagtggctggcacagcggggaaaattttaaagttgttaaattgtatcacaatatgctgcaccaggttgctaaaccggctgctggtgcaatctagtgtgggttgaacatgccgaagcatgcatttcagctttggcaagctgctcagtctaggttactcatgagggatatgttgtgccgtttgaacatacttgtccccaataagaattgtgtggctgaaaccgagagccaccaacatgttcttttctactgcaacttgtctaaacaagtgctgaaagctctctttcaatggttggggtttgaaggctggtccaataactttgctagctagaatacttggttgtgcaacaccaggtcgaacattattgatagaattagagttcttttgttggctgccacgatttatcacatatggagaaactgaaataattgcttgttttctctttattctaataatgtcaattgtatagtgaacaaaattaaaaatgatgtgaaatataggctcttcttgattaaagataggaaagggtcgagagaggagaagaacttaaatggtgtttgctttgatgtaatgtaatgggaatattaattgtaatatgaatggtaatgtaatggaataagaattgtaataggaatggtattatgatgtttggtttaactctgtaatatacattgtaattgaaaaacggtgtttttgcaaatgtcagttgtatataagaaaatataaaaactgtaagcgtttgcagcagcaga

SEQ ID NO: 83001 - DNA, 725 bp, Cannabis sativa
  modified_base (683)..(692): a, c, t, g, unknown or other
tactgtgatgaaaattaggggtataactaatcctctcaggtgcaaatgtcttatattttcacttgttagcacagaataatcagttaactaataaatatacccaaaaaaaaaactccagtaaatgacttagatgaacaacaatggcaaaactagcaataaatttaattgaaatctttttgatgtgaattagattcacatagcggttaataacagctcgtaataatcacaaatttaaacattaaagcaaaattataattttaaaccagaaaatgaatgaaaacaaaggagcttatctggaaagtaacgacagcaaaatgattgaatctttattgatattagtacattacatctagagtttcaataatggtgtacaaaaccaattacaaaagatcttacactgagtggtatacaacaccaattataaaaaatctcacactgagtggtttggatcaaaaacaccaaaaaaaaatttacaaccctcctttcacaccttattcctctagagcaaaataacaattttctaagtgctgaagttgtcttaaatgtatggctgttaaatctatatgtattgacacttttagacagttggataaaaaaacaactaacttaacttccaatgaaatgtataaaaaacaaacagaagtgcatcctgttagtgactaatttaggtggcgtttggtaannnnnnnnnnttttaattttaaaaacagaaaaataaaagtaaa

SEQ ID NO: 83002 - DNA, 2404 bp, Cannabis sativa
acctaaatatctatttatctatgcttaccaaaggtcaatggtggagaaaatatactcaaaattttaagaagttgtgaagagagagaaaatatcacgtagaggagagaaggaaatatcacatattaattccaattaggttacttccaattagtgttttttgtttcatttattaatttactattattaggttaattccaattagtatttttatggtgctagaattataaggagtacattccttaattaatttttatgctgtgatcgtgtttatgtgcttaaactaatttagtttttcctattagtctttgttaagagtgataatactgttgatgttggttgagttagttaggacagttagttactgtcagagagtttgttattctgttttgtaactaattcaaccaacctactcacttgtatataacctggtgtaatctctctttcacagtaatgaattcattctttcacaaattcatcttttcctctgtttctctgtttctctctttcttcctctcttttggtttctttcactttcttcaatggctaagagaattaacatggtatcagagcttgacttcccaccattaatggcgaatgtcgttactggtcacgggaagggtgttaccggtggtgacagctccagtcagaaccaacacgatccctctcaacaaactccgagccttcatcgtgcaagaagaagagagactgacgacttagctccaatctacttcaatcatagcctctcgatcaagctaaacgaccacaactacttactgtggaagcaacaagtcttagccgccatcagaggtaatcgcctgcaacactacattcaagataaagatcctccagccaagtttctcagtgacgaagatcgaacaagacgtgtcatcaactctgcatatctggattgggaagctcaagatcaattgctagtgtcttggctcctttcttcaatgactccgagcttgttaactcgcatggttggatgcgaatctgcaagtcagatctggtccactctggaaaaatatttcacactgcaagtctcagccaagattcttgaatttcagaccaaactacagaacctcaagaaaggatctatgtcactgaatgactatcttctcaaagtaaaagagactgtcgatcttctagcttcagttggagatgttctctcaccacgggatcatgttcgtgccatcttcaaaggacttccaagtgaatatgatacatttgtcatatccacaaacactcgtttggaacagtacactgttgcagaaatagaagctcttttacttgcttctgaatctcgaattgagaagacagatcgagaaattgatcttagtgcgaatattgctgtcatggatcttgatcacggattggaagctaacctggcaaacttcggcagaggaggatacaaacaacaatcgttcaatcgattctcaggctttggcaatcagcaatttggtcgaggtaataactatggacagttcaataatagtaatcacacttttggctatcctatgttcactcctcgtgctacctataatcctggtaggggcaatcgttttcctgtcactaacaacaaagttcagtgtcaactttgccttaaacttggacatactgtccaaagttgcttctatagatttgataaaaattttccaggtcctgcttcatctgggaacaccaatgctgcctccaatactgcaacaactcaagcaaatgttgtcaccaattcaactgcctgggacatgaactggtatccagactcaggggcaaccaaccactgcacccctgaccctaccaatctagctcaaagctcagaataccatggccaggagcaattgtttgttggagatggatcaggtttgtccattaaacacataggcaaaactttcttgtcttctaatttgtccacacagcccctagttctcaataacctattgcatgtaccttctataaccaaaaatctcctaagtgtgtctaagtttgctagagacaacaaagtcttttttgaatttcaccctgacacttgttgtgttaaggatcagggcaccaggcagatccttcttcaagggagacacaggaatggcctctatatttttgaagatgttgacatcctcaataaatcagttagtactgaacctgtcaaccatgtccctgttcctagtactaaaccttctgtcaatactgtttccacttgtattcactgtaatatttccaaatattcagactttgatgtatggcacaacaggttgggacatccttccaaacaagttgtccaatctgttcttaaagcttgtaatgtttctgttgataataaaatgtcacaaactgtctgttctgcatgttgcttgggtaaaattcataaactgccctttcccaaagtctctagcactcagtacacagc

SEQ ID NO: 83003 - DNA, 509 bp, Cannabis sativa
ttcagaggcaatgccttctgtcatcgatccaaaaagccaacccatcaaaagttggtcatgagttatccaaagttcatactctggatttggatttgagatttctatttcaccattctcagatatcagaaactctggaggacatggtttggtaccattgagaaatccttccagacgatgccctctaataatggtcatgaccattgtcttccacagtggaaaggtactcctgtctagcttcattgtgaaaggctggctcagggtattactgaaaggagtagccattattcctgagtttgtcgatgatgacccaggagatacgatacctgagttgatcgagggagtttgtcctgcacctctccctggagtgtgagattcgtttgtggccatggcagtagccaacaatggctctaatagcaagtgaaaatattagtaaaacagagaaaacaaaagttgcaaatctcagctcaatgaaaatgagtaattcaattgatatttaagtattacaagag

SEQ ID NO: 83004 - DNA, 1181 bp, Cannabis sativa
tcatcctctatataaatgaaatcagttctcaaggctagttagcttttgctagtcttgaattgcaatctcatagattggattcttgtagatctaagcatagataagcgcttacaatctccaactatacccgtcgatcctctatggtcttaggtgtatgtggtttttctactgcgatttgttttatttctttaacatggttttgagtgtttttttgttaagttactgctattagtcttgtctttgtggcattattttgtttattttattttgttattggttcgtcttttttttctttaatgcttcgccatcaaaattctgttagtagatgggaataataagttctctttcggttgaaggggttgttagtggtgtcgttacataccttgtacaatagttgaatgctcaagttaaagggttaaatgaacctattgcaacttttaagcactagagtaaactaaatgtaagtgtttttaaggttaactctagtgctgcaatccttttcatctgaatttattttagtttcttttgtaaaacgatctaggaatcaagcgacctattagttggcttgtttttctgattttaatcctaattgtgtttccaacaaaaaagatattctgattgagttgcagattgctattaataaaattgtttggtttattctttgaaaaaaaaattgtttaattttaaatataatatataggataatcgttttatttaatcaaagtgtgaagtcattctattatcgataaatttaattttaaatataatattagagagttcttttcttctaaatattgaaaattttctcgtttttattataatattaacattattatgggactaatttattttcactatctttttttattttgtatgtattttatagattattcataatatgttagatgcaaattattgttcttataattgtttgggacagttttgtgttcacaaccttttgtttgtggcaattgatttgactagatatattgtttagttagacaattaattatcatggctcaaagacaattatatttcacaatgattctaatcactttatatttatactagtttttagacgtgcgttgcacgtgtaacatatataattaaatattgtatttaattttagtttatattttttttggttaaatgtaaatatgaaaaattaaaattttcttatt

SEQ ID NO: 83005 - DNA, 1487 bp, Cannabis sativa
gcgttccaaacgagccctaaaggagttacgaaaataagctctaggtatcctacagcaggacccaccaaacatcaaaaattaaatatatttacgagaagctatttttcaccgttagatcaacgtcaacggtggaaaatactttatttgtatttttatctcctatttttgtaggccgccttcacctataaaaggatagctctcttagttcatttttcacattcagaaaactactcacaaggtcagagcttctctctctagagtccgaagtttttgatacttaaatagttgttgtaacaccatctcatgagaaataaaaacttgaagtagacatagcctcatcactatcgtgacaaaggggtgaactactataaattgttgtgtctctcattaattactttataattttttaaattccctccaatctagcgagtgggtgtgacttagaagtctagtccatatttctgagtcaatattttggtactttcagtgagagccacaactcaagaaagtcactaataaagatggttacaaaacgttctacaagtgttgacagacagactccaatagctggccaatcaattgggagcacgccagtcgatggagtagttcctgggactactcctgcaccccagacaccaacgcaggccttggaaccaggtcctcaactcgtcttccaaggccactaccaccagctcccgggactggcaccaatgaccaaattccacctagggagccatgtttggagatagaagaccctgaggaggccgatcctcaagtagctcagctcagccaaactatcgctgacttgcaacaataacatgtgagactctctcgataagcaagacgaacggttttggcactagttcgtggaaaactggaagaacattaaaacccaacacgttgagcaggaacaataaagaactaacctatctcaacagattagagaagcttatcgctctaattgcggaactgcttcccaaagaggtatttctgagttgttgagagacaccccgtcgaccagttggtcacgtgagaactagtgtccaaggtgaaactctgaatgctcggactaccaatgctacacctagtaaccgagcaagcactaggcaaacactaaatagggagagctcctggagggaaagtaccttcgatcaagagcccgaaaggactcaaactcgaaggtgccaaccaatgtccctccacctgatgttgaacgacctcgcaacaacgagagaaccagcagaactcttccacaattcctcctcatgttctcaagagagcaagcctcgagaccctgcaaggggacaagaacctgctacttaacctgaaggaagtagtaggagacgctacttcaaaatcggaggctacaaattctggcaagtaaggatcaatgtgccgcttcatactcggaaatacttttgagataaaagaggaaagttgagcttttactttgccattggcctcgatagctaacagtacgagtattt

SEQ ID NO: 83006 - DNA, 1051 bp, Cannabis sativa
gcaagtgtttaaatatgcatcaatcttaacatgtaagcctgtatgttcatagtaaataaaaaataatgaaaaccgattgttctgtttctgtgtagacataaaattttgatacttggtggttcgtgtactgcagcttaagagtaatttcttattgtttcaagcttgaacgtaaaaaagattatacaaattcaagtcaatatggccgttcttcgcaacatattggcttactttacatttattaaatttgatctaattatacttctctctctcttttaccaatctccttgggatatgatacaggtcactgtgcatgttaaggggaagacagagtgctatgaatgccaacctaaacctgcccccaaaacatatcctgtgtgtaccattacaagtactccatcaaaggtattgatatagaacttagtcattctgtatgcttttgaaagtttacttctttgcaacttctataagtgaatacaaagttatttcttggtagtgacttgctgctaattataacaagctttctactttcgtagtttgttcattgtattgtatgggcaaaggagcttctatttatgaagttgtttggggataagaaccaggagaatgatttaaatgtgcgttcgggtgatgctgctagctcatctaatcatgtagaagatgtatttgagcgccgaaatgatgaagacattgatcagtatgggaagagaatatatgatcatgtatttggttataacattgaaatggccttatctaacgaggagacatggaaaaaccgtaatagacctaagcctgtatacattagggatagcttgcctgatgcgccaactcaacagaatggaaatgtggagaaaaatgggacaaccaatgatccatcatcagtgtctgctatggcatctctgggcatgaaaaatccacaggatatatggagtcttaaggaaaactcaagaatctttcttgaggctctaaagctatttttcttgaaaagggaaaaggtcagtttggactcttctattgttgcttcctttgaatatctttttttattattattaat

SEQ ID NO: 83007 - DNA, 506 bp, Cannabis sativa
tcattgttgcttctaagggacgatgttgaatggtgtatagttaaaaagtatcactcatgttcaatattaatgcaatttagtatgggatcataacagagttcgatacttaattgcattagtaatgtttcaatttagcatatttatcacttattagtggattttgtttttatatttctggtacgtgtacggggtacgtgttgatttggattatatgctctatttgaagatatttatagctattatatatgtgagaattgttttgtacaattaatactaaatataaatatatatttttctagagtttttttatttgtttaaattattaaatttttattttacgaaataaattagtttaaatataggaaaattattctatatactttatttttaatttttttttcaaatttacggtttggatttctaaattggtttctccggtagtttctatgtaggttgctatacgattttttgttgcgatttaagttacatcgctagttgcaatatga

SEQ ID NO: 83008 - DNA, 819 bp, Cannabis sativa
atttgacccttaaggtccaattatatttgttgcatgataaaaggaatataaaggaaagtgaccaaacaaacattgggaccctcaaggcactaactagattagtagttttgattcatataattattcttttttttctattgtacaatgttaagattcttatgtgaggttcaacttcttcttttgaatttccacagccattattaactattaagactatatattgactactgtcacaatcaaaataatccactctggtttggtcagctcattttgttattattatagcttagtttatatattaagtttttttctttttgaagcaatgaatgtagtgtgtctatttcatttcttgcacgcaaaaaagtcctaaacatggatagcactagtagtattttcaagtgggttgcttttggtttctttttaagtcaattcaataaattgacaagacaacaatagtgttgttgttgttgttgttgttgtttttttgggtctttaaaatgaaaattagaaatgaaaaacatgagagcaatagtatatacattattgaattaaaatagagaaatggtttcaatgatgttagttttttgtattgctctagaacagtaaatctcgtaactcattctttagctaaatatgttttatctgttaccgtaaatactgtctagtggcctgattttccaagttgtatctgaaacattgttattgttgataccattcattaatgatatcatttcttctcggtccctctttttgagcttattgctcggaaggtagtgttatccgaaattttttatcttcgaaaaaaaaaaatattcttta

SEQ ID NO: 83009 - DNA, 617 bp, Cannabis sativa
agcatgaactaagatgatctaagcattctaggtaatatgctgctactctaaaagttaaaaaaactgaacaatgtgtaaaaattctccagaatagaacttgcataaagaactttaagttcttatctattcattattcatgtttgaataaaaaatgtataaatgtgtacaaaatgtcttatcataaaaatggtgactaattctagagtaaaaattatccacaatatgatttttataaaacatgcaatataagtttttaagttcttgtctgttcattattctattttagatcaaaaaaactgtacattgtgtagaaaatgttttatgataaaaatgatgacaaattttacttctgatttgagctaagaaatactaaataaacaaacgtaccttctctacggataatggatcctcgaaccatcattctttttaacaatgaaatattggctggatacacagtctatgaactcacaagaatgttattacgtactaaaaaattatagttatgaaactcttcaaagtaaaatctgtgagtctttgggattggacacaatgacatacaaaatttatgttcaatttcaagtaaaaactgaaatgccacctatgaagatcaaagatga

SEQ ID NO: 83010 - DNA, 610 bp, Cannabis sativa
tgtatgtattttatttcaggggatcgatggaaagagaatatattatggagttgttaaagggaattgtggctccagtattggtattggggatggggttggtggtgtcatgggggtacaaggcagtaatatcagtagtgagaccaccgccacccaaaatatgtgggtcgttagagggaccaccgattactgctccaagagttaagctaagggatggaaggtatttggcttacgaggaatttggagtccctaaacaacaagccaactataacatcatattcattcatggcttctcttcctccagacatggaccatcaattctttccactgatctttctcctccggtatataatgctttttcatatttaaattagcttctcatttaggtaacaaaataaggttgaatatgtatatataataatcatgtatagttgtatatattagtgttttttatgaagaaaaagttggcactatatagctccaaccctctaacttctccattgattttcttgtcacatacctaaaagaaatgctgaaaagtatagtgtttagcaccattaaatgtgtcatatcaccattgatgtgataatttttatgaaatatgataaccgtt

SEQ ID NO: 83011 - DNA, 2029 bp, Cannabis sativa
gccaatatatgctaagtatttcttctgaacgaaattcgaaaatgccctcacacagaaatttatgtatataagtagtaaactataaatgtttgtgttgatatgatacacataaccgtacccatgtctgtggtacgtaataaaaaacagttgcttatatagcgatttttaactgaactagtatttatataaatatatatagcatccaattaagatcattaattgtagaaacctaactaaaactaaacctaatatagggttttatatatagtctatacataattattatttatgtaattttgtatactatatatttctacttttaatttgaagaggcgtgtgtagttcttataaagcgaaaaaaacagatagaaaattacatcatttgatattaataagttattataagtgcaactatcgaacatattccaaatttttatatgaataacaaattcacaatcttttcttgaataatctgcatatatacgtgtttctctgtaaatatatttatgttaataagaatattcagttgtaattttgtgtttaatatacatatgctaatttattataaaaaccaaattaaaaatatgcttattgatggaaggcaattcagttttggttataagaaaagttataagtgaaattattttataggattatgtacgttacagttacagttatagtgatagttatagttgtagttataattatagttaaacatatcataaatttaaataagagaattgctaaaaaataattgctggtgtttagtactttctggtgtcatacaattatttgtgtaattaagtatttatgtggtgattggttggaggtaatgatttctccacgtgtgatgagaaacacccggtaaaaacaaaaacaccctatgtatatgaatatgatcatatatagtttgtgtgcatgcatatcttacaatactgacatatatacaccatgagtcgtgttgaaatataagaatgtgaagaaacttactttgagagtatatatcactactactaataaataagttctcccttgtaaagtacagtcgttagtttcaaggtttgtttatcatttgctgagcaccttacacatacttgattaattagtttatttttaaagaacttaattggtacttttccttctttatatcatatcaacttatatagtttttattatctttaccctcccaagatataatttaattatcaattaggattaggctatgtattccgagctacaaacttctccaacaaataactgaactggatctcataatctaataatctgtttgaaaatttttgcttttactttaaaggcatttcttattttggatcggtatctataaagagaagttataaactaagtatatatagttatagtacacaaactatatatataattttgtatattccatctatttccaagaaatttgaaattattaaagtatgaaatatatatatatatatattgtaagttggtgtggaatatatatataattcaaataataaattttacgagtatctctttttgaaagtacataatgcataatataactataatatacattatcatatatagaaaaattaatatgtatatatatatataatttatcttagtgacgaaaataaaaaacacccctataagtaaaagtgataccccacttaaatgtgcttatattatacaaactaatgtaccaatcttctcgtatggtcatgttttgatcttttacaacttaaaccactgaataaatagaaaacaagatcgaatttggtatgtgtaacccatgaaaaaaatacatagatgcttaagaaagaaagaaaaaaaaaagcaaattttcttgaattcatgtaatgttacaagatcgaatagttcatagcgccccatattttaatttagaatagaaccttttcttttctcttttctctttcctgttttggttgcgtatggtaagtgtttgttgcttatgtattttcaatcattttcttattggttggaagtgtgatcatgaatttgttcatatgttcatggc

SEQ ID NO: 83012 - DNA, 755 bp, Cannabis sativa
agactattttaaaaattacagtcctatggcaaagccatttacaattcgagtcatcttctctttagctgccagcaacagttggccaatacaacaaattgatataaagaatgcattcttgaatggggagtttcaagaatgtgtctacatgactcaacctccgggcttcaaaagcactgaatttctagaccatgtttgcaagctcaataaaccaatctatggtcttaaacaggccccttgagcatggttcaacaagctaaaagcataccttgttagatggggatttcgcaactcaaaggctgatacatctctctttttcacaaggaaaaacaacaagctattacttctcatggcttatgtcgatgacatcataataacaggagaagatattgcccaaatccacaaacttattactaatctcaacagacagtttgccttgaagaatctaggctctgtcaactacttcttgggctttgaagttactaagaatgccaatggaatttatctcactcaatctaagtacataagagatctattcaattctaccaatatgacagaagtcactcctactcccactcccatgattcaaggaaataagctatctttagcaagtgggacacctctgtctgaccctactttttataggagtgtgattggtgcactacaatatctcactatgtctagacttgacatctcctttgctgttaacaagctctcttagttcctaaaagcttcaacttctgaacattggttagcct

SEQ ID NO: 83013 - DNA, 1374 bp, Cannabis sativa
tattttagagaaaagtatatcagcacacttatttgtattagattttttacttgaaaaaatgatatggtgatagtaggagctccagtactagtcctctgaaattgcattatgttgaagaaacagttaggtaattgatatagaacatgttgggttgacttagctatagctcaaagtgtaaaagagcaggcataaacctatgatctatctttctatcgtgtatgaatataatcttcaatgttcctctttttgattggatttgtaggcatctcattttgatttattatttgcaggcttgcaagcattgtttcaatttagtgatgcaaggataacatcttcagatatacatggctagatgagagagcatactcaaatatattttgaactatataacaaaacaaattgaagagcttggaagacttctttgaagaaatgaaagaaattgaagaagaaagaaaatttgtataatacatttaatgtatttggttttagtctttcttcataaatataataaatttatgtgtttgttggtgatgttttgtatacatatgaaattttattgtactatcaatctgtttaaatttaaatagtgaaaatatttataaattttgttttatgaatttgtcgacaattataaatttttaaaaaatccattttctaaaatatcatctagtacatttttcaaaattatattaaaattattttttttaatttaaaaaataaataatattctaaaatatttttcgaattatttttagtgatattttttcaaatgtcaccaaagaaattatagtgacatttgtatctttactcacacgggtatatcttacattttttaaaaatgtcactaaatgcataaatgttactaaaactaagcaataataacacttctactatcacttccaagattaattgcttgacggacatggtaagatctttatggataatttaatatgactcgtgatttagagtgtaataactctaataatgaaacttatgagagttgtttgaatattgaagaagtgtcattagttgaaacatggaagtgatagatcctacaattgaagatcaagatccttttgaagtagcattaactcatcaaaatttgactgaattggatcttaattgacaaataatgaatgtggtgtggtgaatgaagtaaatttcatccatgatcatgaaagaatatgaaatcacaagcaaggtgatggaaagccaagtgaagagtgagcaacaaaaagaagggttattagatgtaagtgtagataatgtgacattgaaggatgaggaagcacatggcatcatggattcgaattcatcaatgatattgacttatacaccaccaatggatctatattttccattaacaccattccc

SEQ ID NO: 83014 - DNA, 552 bp, Cannabis sativa
tgagtgctacagtggacgttgctccatataagtttgacccaagtagctcatttatgggccaagacatttctgtgcaccttaatgaaaagagatccctgtctaagttctttcaagcccaatagggttatatttaggagctttaagcttatgggtcctctggtcaaataaaagaaaaactttcgatgttgacattggcgcccaaccttcctcagaaataaatgagcaaactacacctgttaagaaagagaatctgttcgaagggttaacaaagtggtcaataattttccccatggaactagaccaatgggtgcggttaatgatgctaagtttaatcaggtatttgatgggtctttggaagaactactggctagcaacgagattgagaaaattgtttgtgctaagaatactaatgtattatctcaacaagttgacaaacaatttctatggggcaatcaactagatttacggcgtggaaagccaaggctcaattgttggatcttgctatcccgctcaaagatgatgtgttggttaaggatgagggatctgttgtga

SEQ ID NO: 83015 - DNA, 1210 bp, Cannabis sativa
aaaaaaatactaaatttgacatttaatttaaaaatttcttaatccagtccagaccaacgtggaactctgttcaccaaatacaaaggcagtgacttgtgagcatttctgcaagagaaggcatctagtttagtaactagcccagtacaattaattatatagaagtagataacaaacaaaacatgggtgttctccaggacgccatgggagacgcaattctgacctctatgtggatcgtcagcatacccctcacaagggttttgatctccatcttcatttcgcatgtgggtattcaaccaaagtctctctcaggacttttcacatcaaccattgctacatctcttcgtctcctaacctttaacttgttctcaagagccttaggtggagcaaactttaacccttctacggcaaccgctttctacgccgctggcctaaaatccgatgcctctctcatctccatggctacccgattcccagctcaggctaccggcggagtggtcggtgtcaaggcacttctgaaattcatgccaaaagagtacagaggttttctcagaggcccttctctgaaagttgatttgcacacaggggccgcaaccgaaggggtcttgacttttacgttttgcttttcagtccttatggtggtggtgagaggtcccaaaagtccatttttaaaagtatggttgctttcgtatgtgactactggattgtactttttggggtctgggtatactgggccttctatgaatccggctaatgcatttggctgggcttatgaaaatgacttgcataatagttgggaacagttctatgtttattgggcttgccccattattggagccattgttgcggcctgtctttttcgggccttgtctccaaaaccagtgattaagatcactaagaagaagaaagagtagaaagaggtagttgaatgtgacttcatgaatttataagtgtatagattatgtatcaagggatcaaaatatgctgtaataaatgcttggtgaagtgtgattactcagatataatattgtaatatatatttgtgtttcatctgctggtatatagtagagtgcgtatgatatttgctttgaactaaaaaaaatctaaaagacttttcttcattatcagaaaaagaaaaaaaaaaactttgtatgttgtgggcggttggagcacaatattaaaaagtatatcacaaagttttgttttttttttt

SEQ ID NO: 83016 - DNA, 733 bp, Cannabis sativa
cttgatttctcatattggttcagcctctttaccatcttctcatagttgtccgttgaatttaaactctgttattcaagtcccatctattactaaaaatcttgtgagtgtttctaaactaactgcagacaacaatgtttttcttgaatttcacaaacattggtgttttgtcaaggacaaggatactggctaggttctacttcgggggaaagttagagatggactttacatgcttggagatgaatcaacttcaaaaccaagacaagccttactatgtgaactgttttctgcttatagtacctcaaacactgatgtaatccatccttgtacttcaaatgatattaataaaaaggctaatgattccacttatgtgtctagtagctcctctctttttcactctacagttagtaaacatatcaatacttggcattgtaaacttggtcatcccaatgatcaagtaatgagcaaattattaccccatatttcccacactggcactataaaagatctgcatttttgtaatgcttgtcaacaggcaaaaagtcactctcttccctttcctccatccaatacccgagcttctcaacctcttgccttgattcacattgacttgtgggggccctcccatgttctttccaaagatggatacaagtactatgtccatttcttggatgactacagcaggtatacatggatatttccacttactctcaaaggacaagcatttgatgttttt

SEQ ID NO: 83017 - DNA, 916 bp, Cannabis sativa
aaaaatcgttaacaaaacaacacgtggcaagtctccattgttctcctcatcttacttaccgtggatcgtaccgctgacaatctcccagtttcgttttcggcaccttttctggatcttgcaccaaaataataaaaggtacaaaaaatttacaggtgtaaaaaaaaaaaaaagaaattaaaaaatttccatttttgtcataaatctccttagatatttccattttttaatttttttaatttaaataaaaaataaaaattatttaaattaaataaataaattggaaaaaattgatgatccctttcgtgaattggtcactcactttctatctccatttctgaggctctctctctctagttttgttctctaatggagtctctacgagttctgggtggtatcatccatatcccaccatgcaactcgttctccaactcagttacatctaagctcgataatggcagagcaggtagacaagtgggtgttacaacaacaacgaggaggagaagaagaaggaacaataatagtaatggcggaggattgtgtgtgaagcttactggttcggttttaggtggaagcgatgaaagtagattgggttttggaggagctggtgcttctacttcacgagatcataatgatgatgatggtggtggtcggactcggaggattgatcgtgaaaaaggtctcattttgggggcagagagagatgattctggctctgttgttgggtttaatttgatccctcattctggtatgtttctgtgtttgtttgtgtattttgaggttttttttttttttttcatgttttcaactttgtataatacatttccaatttccaaatacaataaagaaaaaaactttcttttcttgggaagatttttatatatttatgtatatatggtcaagggtgctttagtttgtt

SEQ ID NO: 83018 - DNA, 597 bp, Cannabis sativa
ctctcaaaatttccttcccttttcccatgaattatgcccctatttataagaatacaggttcgcagttattttttttgggattaattcatttacaatggttaatgaaacgtggacattcctccctttcatttattcacatatgagataatatcttattaactcaattgctccttatctttatcctctatatggttattgctaacttggaaggttacatcttattgaatatgagttctccttcgtatccatcttaataggaaaaaatactaagtgttgaagaataactcatctcattatattccttcattagtattagcaatgcaaggtgatctttgagctatgtgtgacgcgaggcagttgagtgttgccacttttaatctgcccgagcgagtgagtatcatcttcacgtatatttatttgagtgtattgaggcagacatatgtctcgtcaataccagtttaatagttattattcttgtctggcataagactagacggtcaatgagtttgaatattttctgttaaacttatatttaattgtaacgagttatttaattacatttaatgatacaacatcattattatattctttgagttg

SEQ ID NO: 83019 - DNA, 982 bp, Cannabis sativa
ccaatcgagttagcaggggccaaacattatctttcaaaaaatcagttcaatacctatcatacgcagatgttagtagagcaacccctttgatctctggtccataagcaagttcagtttcaatgccattgtcaacaagttccagaaaggttgaacattttttatatgggtgacccagacggccacattccatacatcattcaggaagtcgttcataacaaattcaaaccagaatttgtctataatttgttgtaaacgtatattctgacctcttctcaaaggctttgtaacatcaagctttactctaatgcgtgagaatggtccccatcctttgtttagggaatctatataaacttctaagaattcaccaataatgtcccctaaggcttttgtcaatcccttagttttactaaggaaaggtagcttataaactagtacccaaaatggtgaaaatttgagatcagtatattatacattctgtagagcagttggtttttaaagtacgatgtggtagttttaaaagtgtcatggctcttgggttaggactctttctttgtctccttcacagccaaaggaataatcatgaataaagcaagttctttttcagagattcgggcaggaaactgaccatcccaatgaactttcatttgcttttgaagtgttgtcaagtagaccggtttcctggtaaggacacaatcaagaagagtgttatcattggtggagtctaatctctgagattcatcataatcaaaagcgagaacggattcctcttcttcttcaagattgactatacctttcattttgtttgttaacggatccatgaatcaagcaagaagaaacaaataaattttaggtagatgaagataccaagcaattttcaaaatctgcagataagttaaggcctaagaacaactaaaaaactgaaagttaaaaccataatggacaataaactgccccagaacaataaacggcagacactcattta

SEQ ID NO: 83020 - DNA, 2358 bp, Cannabis sativa
ctcgcacaaaggtttgtattgatgagtgtagcttttgtaaacagaagggtcattagaaagctcaatgtcctaagcttacaaatcgtgctctacaacaacagagaaatcattctaagccacctcttatgggtaactaaccacagtttaacaacgaaattcgacctctacaatttagtattactgcaactgttccttcacttagctcttatgattttgctactctgtcaaaacagtttcaaaagttcctttctactcaacctaatgccatgtatgtctctactttggtaggtcaaccacccactagcacgtcaggtatgtcaccttctacatgggttttggactatggtgcttcacactatatgtctctgcattctgcatcttttatttcttcgagtcccacatcatctgtgcctgtcatgactactgatagtactcccatgccagttgttagtattagtcctgttgtcagtttaatttttttgcttcttaatgtttatcatattcctaatctttcattgaatcttgtatatattggtcaattgtgtgattctggttattcagtatctttttcttctacttcatgtcatgtgcaggatccacaatctcggaagatgattaggacaggccgtagacaaggtggattatatgttttggatgaactgagatttctagtatatgcaactcccagtgttaatttatcttctttttcgtttctctccttcgtcttctagtttttatttatggtactctcgccttggtcatctttcaaagtttcgtttaaaatttttagcttgtaaaggaaccttaggaaattttcaacctcatgatatttctgattgtagtggatgttatttggatttatgccctaaaagtaagtaattaatggataatatattagaaaatatataaaataaaattataagataaatgatacattaattataatagtataattattaaatatttgaaatttttttattcaaatggagaaggtataatcttgtaaggatgtacaagagaattaagattatacgatatgaataaaaaagtcagtagtgtattaaagtaatgagaatctttaatagggaactgctaaacattgtttactatacactataactctagtgtgtgtgattttgattcagatcacatatgtggatagacatgtagtaaaggtgctgcgtataattcgattatgcatgattggaccgatatgtaataaacatatttcattaacatgttgtttaccataaaagagttattcatatcacaaggatgattattagtagatcagcctgaatcctaagtatacacgaactcatatttgtgttcatcgagttctttgattcactcgttaaagtttttcagagaagatgattcttacaacttctattttgggagcttaataacatgagtggctgggaacatgttatacaatagtggaatctaagctttcctaacgattcgaatattaattcccttgtagtgttaattttgagaatgctaacagttggatctaaatctataataagttatagattaactgctcacattgaattagtggtacataaggaatcaaaagataattagaagggtaaacgataattttgaccaactctaattatgaactaataattagagggtgaattgcttatattgattatatcaatggactacaactaagaattccgtaaatatagttttatattttcaaagagtgtaattccatatttatagtggaataataatggaattaataaattggattattctattgatgagatcgataataatcaagtatttattggagcttcgaaatataggtccatggtccccgagtcacctctatacaacactgtacatggaaagattttatttgatgaatgaatttgagagagaattaatttctatgggaaataaattcttaagggaaaaatagtaatttgtgaaattattgttttgaataattatgacaattatgaattgtgtaattaatagtatttaactatttattttttattgaataaagctatattaattagttaaatataataatattaaaagagagaaatatactattttagagaaaataatatttattttaatccttgtgaaataagatattaatgagaattaatcaattataatttatcggcagaataaataataaatcttatttatggtaaaattgataaattaattgaccttaaaatatgactcacacgtgtaggcctggtccacacgtgtaggggaggaaagtacactacatacctcttttaaattgatgcctttaatttttaccatttctttcaaaatctattatgtttaccaattttttcaatcattctaccaatttta

SEQ ID NO: 83021 - DNA, 698 bp, Cannabis sativa
gaaagtgttaagcatagcaatgctggagatagtagacatgggcttcacttgaagatcgtccataatcatataagtaaccactcctttcacaaacccaccttccacctcagccccagaagatgaagatcctcccacattagtagatttagggggtgacacaaaaatgagaaccttattgatcaaacttccacaattagggcaaatggcttttgggtcatcagatacataacaaggactacatgtactagatgaatgataagtactaccaaaagttttaccacaagagtaaaacactttcacatgagaagtggtatcttcattagtcaataagagatgagttgaagattctcctagggcagaagactttggcttaagaaggatattcttatccacattagtttggatgtaagtctcacttaagtcttcaaagctttgatagagttttcctaaagtaccaaccatgcccttagcagacaatagccttatgatggtaccaacaggcatagataaaagagagaagagaaaatcagtgaaatcctttccagcttcagcaaacaaaacccttttctcttttgtatcaatcagaagctttagtgagataacattttttgatctagtagttgccatacagttgtttgagatttttttgttttctttctttagaactcagtgagcctatcttaatttatttttttcac

SEQ ID NO: 83022 - DNA, 634 bp, Cannabis sativa
attaatcataaacaactgctaatttctaaattaactaagcgggctttacaaataccttactctcagtcgacctaatatcgcctctttcatttacaaattaagtcaacttgtacatgctcctacaaaaaaatttcagctttcttgcaaacgtatcttgagatatcctattagtactgttggtgaagggacttctcaccagctcctacttccacaatcaggcttcaatgactcagattggatgagttccctagatgatcgaaaatcaactagtgaatattgtgtttactgcgatggcaacttagtgagctagagttcataaaaataaaagtgtgtcacaagatcaagcaccaaagcagattatcgtgctttggccctcaagcctgtaccaaagtcacttgacttcaatccttgtttgataaaattgggaccaagtgtgaataacattcaataatttggtgcaacaactcaagggtgcgagaacttgcctcgaatcaagtttttcattcaaagaccaaagatatcaaaatcgatgtccacttcattcgtgacaaagttctgaacaaaattattgatgcgtgatatatatacctgttggttttatggcctaaataaaactctttacaatctgattagt

SEQ ID NO: 83023 - DNA, 817 bp, Cannabis sativa
gcaccgcaaaaaatttcaaactgcatttttaccgcatttttttgcggtgcgggctgtttgagcggtttgatgaacacccctagcttgtatatgtatgtagctatatatgagttatatgagaaaaacagagtgggagagaaaagctttgaaagcttgtgttattattattctgtgttcctgaaattatagatgttacatgagctgagttagttagagtaataattaacttagcttagtctatgaacatcctaactaaccgagagctttatatggcttaacgttactaacacatgaaattaaagtgtcttttggttgaaggaaataaatatataagaataggaaaatataagagtaggaatgagaatgagaattggaatatgaatagaatggaataaaatttaatatacataaaaaaaattatcgtgctaagttaattattcctctaactaactcaactcatgtgtaatattgtaataatttacaaaatttattatttgattggtatttatatatgtattatttatttgaactcttgaaattatcgtgcaacatcagaaaatttatggcaaaaccaaaattatagttcagttagatttttttttcttaagagaaagagtgagagtactttgaaataaataatgactaaggaataattaaactataaaagacttggaatttctgataagattattgccaaatcgttttccaaatagatgtcgagaaggcaaaaaaaaccaaataatctaagccattaataattataataaaaaatatgggtttttttatttttacacttgaaaatagttttttttttttt

SEQ ID NO: 83024 - DNA, 1408 bp, Cannabis sativa
gtatgacctctttgatcaaagcatcgcacttatcaagtgtatcagattacccattactattggagaaaatccaaccacgagaactctgatggtgcagtttgtcgtaatcgatgttccctcagctttcaacgccatgataggctaactagccttatacaacttgaaggtgtaacatccatctaccacctctgccctaaattcctaataaggcatgaggtatgatgtcaagaggagatcaataatctgcctgtcactactacaacttggctttatctaaagccaagaaatagaagatgcatccatcagatcaggagcatacaagcttcatgatgttcagtaatcatatggcttcaacatgtaagtgtgcgtagatggcatgcttgttaagtccaaaagggctgggggcatatggaggtcctagacagaaaatttaaaatcctccgcagctacaacaagaaaaagctcaaacacaaacaagatccaagcccttttgaacatgaaattgccccacaacaatcaaggaagtacaaagccaaataggacacactgccgcactaagcaaatttgtgtccatgtctacaaataaatgtgtacccttcttcaacattctcaaaggcaaaatattcaagtagacaaaggaatgtgaaacttcattccaggagctgaacaaatagattggatcggccacatgtgttgcccaaatccctagacaaagaagagctaggcgtgcacctagcggtcatagaacatgttgtgagtgctgtcgttacaagagagtaagagggtatgcagcaccctgtatactacaccaataagagattgatcgatactaaaagtcagttcccattaatggagaagctaacccacatcttgctcttgacttctagaaagctaaggccatacttccaaatacacccaataaaagtgaacatcgatcaatagttgtggtaggttcaacagaaacttagagcatcaggccaataactcaagtgaaccattgagactcggcaaacataaaagcacctcaaaaccaagcatggccaccaggccaagctctcaccaacttcatggctaatgatagaagcatatctccccaaatctcttagagtttaggagaaaagtatgagccaaagaagaagcaagggaaagaacccaatgcattgaacacttgcctaatgtaggcatggcccccacgacacctgggggtaactgagggacaaggaaaaaaggtcagttacaaagcttctaacgataaggctgaacatgaagctccgaatgctggcctcgggctagcacacgaagcatgggctgacaacctggacatgcacgaggactgtcaactagtcgtaggttatgtcctaggttaatatacaactcaatacaggaagatgatggcctaccagagctg

SEQ ID NO: 83025 - DNA, 1119 bp, Cannabis sativa
  modified_base (864)..(869): a, c, t, g, unknown or other
tcaagatatcaaaaaagataaaaatatactaattaaaacacctatttccatagataattattactacaagtacaatagtaacataagccaatcaattaaaaggatgaatctgaatgtgatgttgatatatatagagttgaatgaacagtactttatcttaagttcctaattgagtcagtgcatgcgtgcgtacataaaaacatacatacttattaatagtggaagttgctttcaaaggcactaataataagctcactgtgtatatataccaataccggcctatcttattctgatctattcttccatgaacccagctcaactatagcctataggtacaaagctgtctacttaattcatatacccaaacccatccccatccccatcatatatatttatatataaattgactaattattagtagccggcatgacttcatataaaatatatatagagagagataggattaggcttggaatatatagtatccttatattcaactgtattaatttataataggtttatttgtagtgaaaatatatatctaatctattctaattaacttatgatatgaatgtatgtatttattaggtggccaaccttcatttttttttatttatattaatcttttctgcattttaggttaaattttgattttttttaatgaaacttaattatcaaaattataataataataataatactagttttataattttttttatttacttatgagtaaataatattttggactatgtgttttgcagaaattactaattgaactctttgttttgttaaataacaaaatgaaccctgtattttttaatatgatataaatatatcactgaactgattttttgtcaaaannnnnnttaataataattcgatctaaaagtattataacaaaactatttaaatttatagtatctgttcgtgttaggaattgtcttcaagttggttatactaaaaaaatatcaaaaattaagctcagggttatttttaccattttggaaaatacaaactccattttgtcatttaacataatagaatgtccaatcggtaacttttgtaaaacagatggtccaaaatagtatttaattaccctttatttataatgaatca

SEQ ID NO: 83026 - DNA, 727 bp, Cannabis sativa
  modified_base (26)..(37): a, c, t, g, unknown or other
  modified_base (693)..(701): a, c, t, g, unknown or other
tttctttactttatatgtgtttattnnnnnnnnnnnnaagttcatatttagagtgttaaacaacatacttgtgagtaggtctaagatcctggtaaaataaattccaacacaaccaagtatacaacatggtgagaaagtatccgctccaccagctccacaaccacaaactgattatagttcagaaaatgcaatctcaatattaatttacaaattggtgtaatactaaattacaaatattttcaatttacaaattgtattgattatttttttaatattattttgaaatatagagatatccatgttggatgtatattcagctagagactagttagttgtcattgaaagttgataggagttcgatggtgaaggagtgatatttgaagactggcaagttctcgatctagaattccgattacccctacaaggattatccttgaattttcatcaatgaagtcaatatggaaaatacaataattccatgtcccgtcgttcaccaagcatacgccattgtaggtcatgctataagactttatgtagtatggctgaaggactacattacgacagtcgaaatagagttgttatgttttaattaattcccttaacttattatgttttattgattaataaaaaattctaatttaattgtcttatttttcctatagacgtaacaccctaactgttgggttttatgcnnnnnnnnnaactccatttcaatgtaatctatttt

SEQ ID NO: 83027 - DNA, 531 bp, Cannabis sativa
aatgtatacgaagtgacaaatttggcaaaacacttgaggaatgtcataaactatacaaatttccacattaagaagtcaaccttacaacatgttcaacatttttagcaatttaaaggacattaattacatttcatgacactacaaaggaaacaaactatctattcttagaatccaaactcctactcttactgtacaatagccaaaagacttgccttttgagaataacataggtgatggctaaagttccttctatcaccatctcaattttcccatcttcacaaattgatatggccccatcacccaaatctttctaacaaaagtgaaacctcagataagttcttcaaacttgaatgggagagtcaatagatcattcttcagttggctgtttcatcaaatgaaaagcacaataaataaaaacaaatgataccagccaactcatagtagaaagactaaacagtaaaagaaattggctttgtagagttatattatagatattaatcgatgcaaagtaccacataagtgtgccatcct

SEQ ID NO: 83028 - DNA, 744 bp, Cannabis sativa
ataaatgaatattcaagattacattgaaatagagttttagttagggcacaaaatccaacagaagaagggataagcttttgaatatatactcagtcctcgagcacaacctctaacacaccctgagaggctgagtaaacgagaagcccctactcgttacaaccaaccacgatcgacttccacattcactagttttttgaactcaatcaaatggtggccgaaatcaacatcaatctgattccaggttaatgaagatttagttggggtcataaatgactcagtttggcttctaatgactgacatgaagagattatgcaacctgtaatatttaggagcccatcctatagaaattaatgaacttgataatttgttttgagagctatttattaattatttgttcttatcaggtacttgaaggaacgattgttgtactctaatggattaaataaaatatgcatttttaaatccttgtatcactgccacccatgtcgagaatacaactggccgttgtaaagcactggtcgaacatatggccaagactgagccagttaaatgggttgtagccccctacaataataggtaagtaaatttaaaattaataatttcataatttataattctacataatatatattattatgcgttaataattttacacatgtttatttgtgtagaaaactatttcattggatgcttgtactcattcaagtacgcagacggtagcatacttggattcaaacaatgacg

SEQ ID NO: 83029 - DNA, 1159 bp, Cannabis sativa
  modified_base (1098)..(1101): a, c, t, g, unknown or other
cgtctgatgcaaccaccacgcaactacgcagcaaccactctgcaaccatcgtctgatagtgtaaatagtgtaagtggtattttggtaattaaaattacataaaaagtataaatattgattttaccttataaaggtatttttgcaaataaaatattaatttatattttctatgtaattattctaaattattaggcatttttaatttttacttttaaaaacaaaaggcaattaattaccaaacatatttttaaattttttaaatctgttaaatctttatttgataagaatatttttatattgattatttttattctttaaaaattaatgggattgatggatttgtggagattgattttcatatgataattgattaattgattaacaattttatttttggtattgatttcataataaatatattgggtaattatataaagatgagtttttattgtatatttaaaatatattttttaatcatttattcaatctttttaaaatacacacacaattattttttaaaaaaaatttatataccataattaaaatacatatatcatgataacaaacttatataccataataaaataaaaactaaataaatattatttaaaataaatatatacaccatacaattaaaatatataaaaataataatggagctctatttaatgatgtaagtcgttttgggatgggttgcttggcccgaaatcatgtaggccatgttattgaggtctacactaaaagcaaattggagactgttaaaccagagattgcaaaaattattgggatcaaggaagctctaagttagattcagcgacatacttggtctaatattttattggaaacagatagattggtctgtgttcaagctatctatagtaacttgcatatgtcgtctgagtttggtttgttggtgaatgattgttaatttattttatctactatgagttatgttgttatttagtttgtagaacgatctgtaaacaaagccgcccattgtttgacgcgtagtttttgtttttcctctggctgtgtttttcaggattatcagttaactcttgaatttcgtgtagcatgccaataaaattatatacatannnnaaaatatttgtattatgctaacaaaattatatacaactattatacatagcaaaataaa

SEQ ID NO: 83030 - DNA, 599 bp, Cannabis sativa
ttttttaggattatttaatgaaaattaaataaaggagttttgtctagacacatagaaatggtatatttttaaggtaaagaagatcctatttagcttagagactaagcttaagctaattgattttgtttttttttggaaatgttgaacgccacgtgtgctactatattgtgttatgttacaagtacaatttaagactatgtatgatctaaatacaagtacaattaatgataacatttcacctaaaacactttgatggtgaaactaccatgtctcatcatctcaatctacacctaggtagtggcatgataccaactcacatttttcattgtcaagatactcttcatcagggcatcatttcggccttagccgagatgcatatcgttagggcatcatcttaactctagccaagatgcacatcctcataactgcatcatctcggctcaaacaccatcacctcgtactaaagcttactatcttggaccaaagtcgagaatattatctcgacctcttcacgaaagcatcatctcgaccttgtctcataccactaccttagcctactaatcagttaggcatcacctcggcctcatcttctcaccaac

SEQ ID NO: 83031 - DNA, 750 bp, Cannabis sativa
gcagatctagaaatatagtttgcattgtattttttaaaaatgcttgctatatttgtcacttccttcccagttaaaaattactttaaatttactacaaataatagtttgggaaaattttttactaaatcccatatgttttatttatctttgtcattaattgtatatttaattttgattaatttatttttgggtcaaatatacaatcgcggtggaagtgttgctagataactatatcaatgttagttcatttattaatataaacgtatacatatacattaattgtactttgtaataaaacagattttgcagaacaggttcgttagacaagaataaggtgatgggtaaaatcgtgttttgtgatgatttaacatctggtggtggacccctactggctaatgcagctggtgctgtgttgtctggccgagaatttggagagacttcaagtccttttcccttgcctacagcatacctcactcgaaaggatggtagccaagcatacatatatataaactccactaggttggtaatttacattatgccataaatagattataactaaaacaaacacattacattagtaaataaataaattaatatataaatgattaattgatgaattatattgcattgcagaaacccaactggaacaatatccaaaagtactcaacagattaataagatggcacctatggtagcttccttttcgtctaggggtccaagcccaattaatcctaacatcctcaaggtata

SEQ ID NO: 83032 - DNA, 2052 bp, Cannabis sativa
atttgctgctcaactgaaaagtaataataagtcaatatatttctttgtaatctttttttttcaatgtaaaaactcataatatattgtggtattattccttaaaccaccaatcaatattcagttaagatagtcattaactaatacaattgtcaaaaatgacaagcaagcatattggatctattggcctatataaagaacacttatccaaaaaaaaaaaaaggagagagacacaatacactagggagagaagttacagtgagaaagtgaaaaagagagctgggattggaaaattatattgcgcaacattgatgattatgttagctcggattggtaatttaatgagtattgcgggattataccatggaagattcactgtgattatttccttatagctcctaatattgatctcttattctcatcaaagaaagattggtggcagtattttcaaattggagtacgaccaagttcacattgaactttggatctgaactagtataattctcgtgtgttgttgtgtttggaagctatctagattcatctttgtgtttatgtttttggtttgatatgtgtttgttagttttgttcttgtttgtttttttatttaatttttgtttgtttcgtgtgatctgtgtgatcttgaagctgaaattacagaggttaatttctacatatcagaactaaatttcttatatagggtaaatagcatcataagtactcaaagtttctagtttgtaagtaccataaatctaatatttatttttagcggcataagtattcaatgtttgtaaaattttaatttttttttaatttcgtcagtacaaactctgttattatcttaaacaagacacatataagacccagattctagatcattgagtcttgatagaaacatgtagtatcagttactttcaaatgttcttttaataaaatcaaaacagagactgtactgacgaaagtagaggaaaattacagttttacaaacattaagtacttatggtgctaaaaataaacattgaatttatggcgcttacaaacttaaatctttagatatttataccgctatttatctatatatatatatattgcttgtgtttttataaaaatagttatgaaattgacattttctagttgtctttgttcaaccacttggcttggttggttcctttgtgagcaatttgtaaaaggttctacattgattgtgatgtcagagattaataagccatagccaaacaaatctcaaaaacagcagcaacaataacagtagaaacaatgaaacagtagtagcttgagaattatgaaaatggggggaactgtaattgaactaatagaaaacttgagactagggtttcttacatgataagatgcaaagagatttgttggggtatcactctaagtccccatcaaaataatacgtaagagtttgtgagatttttcgagaatgtccctaaaaataaaacccgacaatatcatactaatgtggagaaaattacaaattttatagtttttttttaagagaattttcatttttatggtttttaaggtataagttttgcaaaaaaaaatataactttttcacaaaaatattattttataggaaaattttagaaaaaaattaaaagaaaaatatgggaaaaaacaatatttgataactgattatctctctgcttaccattaaaatatttgttacccttaattaattttctcatattattaacattttcttgaattttttccataaaatatcttttttgaaaggaaaaaaaaaacataatataaaaaaagtataaattaaagtgaagtggcaacccaacaaaatttactccaaactttgcataaccaaatctcataacttaattttctaaaaaaataaaataaaatctcaaactttcctttttcttaatgacaaatcaaatacaattaattattagatactgtagttactaataatatataaaaaaaaacaggaaactaggcagctagctagggagcttatatatatatatacaaaattatacagacgaaatggtgttgagagagaggtaggaaaatatc

SEQ ID NO: 83033 - DNA, 765 bp, Cannabis sativa
tctattagttacttaattacataaatttatatatatttcttaattttatatttcttttttgataataaacatatttataaaaaataaccataatatcatatagcttaaaaaaaatatacgaatatcatctatctaaaataaagagcatgcatactcaaatatataaaagatacttctaaaaatttagacgatatatatttgtaagatttttaacaagaccaagatcactaaaaaaaaaaaaactattttagaaaaaaaaaatattggattagccccaaaagtactaaaaaaaattgtggcagcatgtacaaaaagatttagcaaaaggttccattaaaatatgactattaacaccacacacactctcactgttgttaatattaaaacaatatattatcattacttctttaaaaaaaaaaaaattgatagagcatgatggtgctttatatataatgtctaaaaataaaataaaataagtaaagagtttataaatatcatcatttctcaatcatgagttgctttatatatgcaaatgtatctaaagcgccaaaaaatgttagctaatagccatatttaattagcattttagctaataactatttgttttaaataaaataaaatatttttgaataatataaaaaattttagcaactttaaaaaaatattatttattagagagattgctcaaagggagtaggcagtgatcccaaagaggaaaatctgtattaaatcaaaatactcactctaattatatttgacaattaa

SEQ ID NO: 83034 - DNA, 868 bp, Cannabis sativa
gagagccatgtacaacaatttattctcacaaccacaatggtcaatcaaatatgggtgcttctagggcgggctctaagatataatgagtcataaaaaaaatatttttttaactttatttacaaaaaaaatatatataatatttattaaaattagtaaaaaaaatttataattttaaacagggatttttttttgtcctaagctaggtgagtctaaacgtaagcctaacccgcttatatagagagttggccatgagtacgtaaaattaaaatgtcacaatactgttatataaaaaattaaaattaaaactattttaatattaaaaaaaaataaaagtgtatgggtgcacttattttaagagatgcatcactgcaccctattcataaaattttctatcaaatattacacaaatgaaaagttaaaaaacatacgagtgcttttgcagtgcacttctttcttggtgtaccactggactcattcatgtttttgaaattcagagagtttaattattttatatatatatataataatgtatattataattatttaagacactttgtaaaattttgaaaaatttaaaataatttacaatttaaataatataatttaaattatttattttacaagcgtataaataaaagatacaagtataaaacagatcgcttgaatcttattttcagagcgcgttgaattatttaaatttctaaaaaatttatagaatatgataaataaatatgagattatcatatatacctataattaaaactaaaactttggatgtggaaaataagaaatggtgcatcactgaaccatagaatttctcaaaacataggtagtcacaaatagggaacaaaagttaacctcttatgtt

SEQ ID NO: 83035 - DNA, 1197 bp, Cannabis sativa
tagcttcaactagtattgctcacgctcccagtgccccttttgctagcaacctaacacaaccatttgccctgaaattgaatcaaaaaaatttcattctttggagaactatggtgttcacctagaaatttgacctgatgatgtggacaccacttttgacacgtggcaagaaggaaaataattttgaggcctacctcccgagattagggtggtcaacttgagtattgggaactgtgccagtaccctagttgacattaagaggcacccaggtaggcaccaagatctagcgaagttgtttatgggtgctatccttcgatgagttcaagcaaataggttacaatgaccctaaaatgatgaaccatgaggttgaggatgtcacgtggacatcccatggctcaacctagctctagcagcaatactagatgcccaggttgatatcatatgcgccgtcttgcatcagtttcggttcacaaaaactttttatgcacaatctgcttagccattgcactaggatacatgagagacatgccccaagcaagtttcaaacattggagataagtctataagaaactacacccaatactctggaaccctaatgggcgcccaagttgacatatcgtcgacatgggcgacacgacgactattgtttaggtttttgggaactttctggaccctaattcctcaaatccaacaaggaacaatgccaggacatgagttttcttcaacgacatcccaaatgagcccaaatcaaactatgggtgcctaggttaacattacaacctagcactgatttcacttcaccgagtaacgccagtgctagtttgaaaaaactaaaatccacggagtaatttttaccaaaaggaagattgaacatcaacgagatgtattttggagactttgaactctgtctggtcacccagtgatagcccccaggttacattgggtgccaggtcaacataaggtggccggtggcactttggtacacttttccagagaagtctcccaaaatttttccttattttgttcaatgatgaagatacaagtgctttcaaggatcaaatgaaaccaccaagagcccaattaaaaagctaggtgactagtgtgacactcaccccgccattaggcgcccaggttgacatattctacttgaacatgtagttttgtcaattcgattgcgactccgtctcaagcattgttctt

SEQ ID NO: 83036 - DNA, 1276 bp, Cannabis sativa
tatattaattatatgtctgtaataattattgatatttacaaaaactcagtttttcaattttcctacatgccgaaatagtagggagtgcattgatgcataggtgcactgtagaagctccatatactatttatgtgacttgtgaaatatgtagtatatatttttatacaatatggaagacatacaccttaggaagttgatttttagaagaaacctatttacgataagtgtagacctctaaatttatcaagcttaattctgaagtcatcctaaatcaagaagcgattgattgagggaagtcatcgaaggagacaatagctcattcgctcacaaggcaggaccccatcatcaccacgcgaccccagcaaggggtcacctcccctcacctcgagcaccacctgagggacatgctcctttccctcgccaactatgtgaggccttaactcactgtacctcccaacacctaatgacccatgaaattccttgcctcgctgcacctctccttacctcatgatccacgctctcgagtgaatatccacacgaggccatgcctaaggtcgctgcctactccctaagcgggccatacacttgcacccacaatcccttaggctataccgactcagatttttaggcttttcttgatgacaagaagtctacatatgggttggttttcactcttggggtggagcaattgtttggagaaatgtcaagtaattttctatttctgactctaccatggaggtcaaatatgtagttaccgctgaggcgactaagaaactggtctggctaagaaagttcttcacagagctcggtgttattataggtatggaaaaactactggtgttactttgtgacaacactggtgcacttgccaacagtaaaaaaccttgaagccacaagaggagaaaatacattgagaggaaataccatatcatcaaagaattgtggcaagatgagacatgctggtagaatattttgatactgaagacaacctagccgacccattaaccaagacattaacaaagactgcatttaaaaagtacaaagaaaatctaggatcagttgaaaggtacttattattttatgttagtgcaagttagagtttgttgagttttgtgccttaattataaccctaatttcaatgttaccttgaattacatttatcaataaaggaacaaaattattttattacttgtttaatataattcttggttcacatgtttatttcatgatcattagttcgatatataaattatattaaatccttatcacattgtta

SEQ ID NO: 83037 - DNA, 661 bp, Cannabis sativa
tctgattttgagcattgtatttttctttttttaaagttcattatctagtcctcttctgtaacagcatttgaacttcacagacagatctcttgtttttgaattgacttagatttgtgttcatttagcattgtttcttctctgaggaaatttcttttgtggatggtcactggagtaagattcttcataatattgatctgattttaaattgtggttctccatgatcctaataaatattggaggacactgatgaagtttttgtattaggggaaccggattagtgactttatttttggttcattcttttttctgtggaatcctgtttggctacattgctataataaaattatgtccttaagaagtagaggatggggtttaagctttgtgggtttaagtttcttaaatattagctcaaacttctaagctttgtcaagttaccgaatcattatgaatcggcattgcgttagtttgaatattcatttcattatttcttaagtaatgataattacatctctgtggcttcacctggtctcaaggatatggaaaaaggattattacacttctcttccgcgaactgataacttcttcactcttgaagttgctttttgatccagtctgatcaattttttgtcatttgcatcctttaataatttgtctgattctt

SEQ ID NO: 83038 - DNA, 1767 bp, Cannabis sativa
attaaggactgaaataaacaacacaatttattagttattaaacaaaaaagaattttttttcaaccaaaaaacttcgttttctatttgttgtacatatcttattaactcatgtgttacggtattatcatttggtattatatgtagaagacaaacacccaaaaaaacagataacaaagacctaattgatctaaaaaaacaactccaatcaaaaacactatcaggaaaagaatggacaaaatcaacaacttcagtaacactctctacaaacgaaacgaaaaaacccatcaaggaacaactctcgacataaaggaaatcttaacagcatatatgtgagaatcttgtacttgtgagaattgactcacttgaagagaaaaaatattttaactaataataaacaataaatacattagtaggaaaattaataaaaattataacaaataaataaacattgttacaaagtttataatagattttcactacaaataaacagtaataataaatagtaataatagtcgttctaagtgaaaaaaagagaacacttatcttgtcaaatgtaattgatggcaacagtagatcttgaacgcaagttatttcaaataattaataacttaaatcactcaataactttacaactctaataatcaataattgatacactttaataataaataactaataactttaatagtaaataatatatattttataaaaatttaatataataaaatttagaaaaagaattatatgttagaaaaattgataataaatccaagatgaatgtatttatctatttatctatctatctatctatatatataagaaatttaatgtaactttattacttagttatcatcaaatgaaatacataatttatttcatatatatataatattaaattttttaaatatccgccgcgaagcgcggattatttactagttggtatatgatatagaacaaaataataatatataataattaagtatacgtacctattaatccatagcaattatctcaatttgatagtgcaatactatcaagtcttcctccttaagtctctaaatcataagtattttttattttatcatattatcaaaagtatacaattgtgatgagataatacgtatttatagagttagggaggggaattagctacataactctagttggactgggtctgctcatcaaaggctttagttaattagaaaagctcacatttttgcttcaactaaactttacacatacagatgctaagcccaataattactgattactaacaatatgagctaatataacaaagaattatctaatcaacccaagttttgataaaaccaataaaagttaatgtaagcccaaataaaagtctatcattctctcacttgggttacattaattttaatacatatatattatatattaaaataattttgtttaaaaatgactcatgggttgaacaataggaaaatatttttggccattttaaatatgatagttctttgatagcacctccacataccgttccaatttaaccattgatattgaactatgactattgttttatttttaaatcaacaaaagacattcataatcacaaatactaaagtattaaatcgagatggtcaataagtctagtaatgtagtaaaaaattatgttcaacatgcgattaattttaaataacataatatccttatcagtcctcaattttattgatatcgtaatgcttaataaataagtcagtgtcactaaacatgcttaaaaaattaagccaa

SEQ ID NO: 83039 - DNA, 556 bp, Cannabis sativa
ctcaataatctaattccaaataaagcatacatgtgttaatctgaaacatgtggaataagctaactttaatgaagtaagccattgggtactccttcggctaaaaagtaacgaacgattgtttagtaagcgagtgttagactgcacaatgccttaatgaagttagtttgcattattaaatgtttgtcaccactgagaggttagtgagttttaattgaattttttatcattaatacttatgtatcctgattttaaattgctgctagtagagaatgaatgagtggcttaacatagaaaattcaatttcacaattaacagctacctgatttgatttaattggaattttatatctatatggaatttggtttgttatagataatgaatgaatactaaatggaatttagtttgctgcatggcaatgtagtgtgctttactaaaattgcttctcagtatcacttcatttagtaactttaattagattttgttcatatgctatcaacaattctagaatatgaaagctatagtcacttactggtactagatcatttggctgctattt

SEQ ID NO: 83040 - DNA, 580 bp, Cannabis sativa
catttattgattttatcatttttgtattttatttggttttattttggatttggtttatttttgtatttatttttgttttgaatttttgagttgattaggatctaataaatgtaatggtggtggtggtagtagtgactagtggtggtttcaatgctggtggtggtgttgatacttgataggattacgatgaatggaaaagaaggaggagaaaatctaagaaaaaagaaaaggaagaacgaataagcataaaaagaaaaaaaagatattaattattttattttttaaaatgatttaatttttattttaaattaattaaattatgtggaccaataaaataatgtcacatgtacactatatccatgtggacaattcatattgccattaacggtcaaaaatggataaaaatagttaaatattaacagaatatgaattttggaagttttgccatcaaaatttagattttgagagttaattgccggtgaagtgaaagtgttgtgagttttgtaatattttattattaatttaattattgcattaaattataaaaaatgtacacttattttttattattttatttaat

SEQ ID NO: 83041 - DNA, 614 bp, Cannabis sativa
atctcatgcgattcgattatcgaaagccagctcctatcatcggcacttgtgacctcattaatgctctcaacctgcatctgttctgaattttccacttccttcgaccctccctctccactgtcggcagcctccatctcgatctccaccagttccacatcgtctttatcaccatcaccgactacatctccggctatccgacccttgtgttctctctcgtaggtcgacgacccacataattccaagtttgactctcacaagttctctccatctatctgttcttcttctccatctttttttcttttccccttcagctccatcccgatcgccatacaccttctcatgatcaaagtcctgataccaacatgtattaaaccatccatgaaatctgtagcttaaatcattaagcttgaagagttttagttcgaaatccatgttatcgtgttggagagttatggtttcaggtatgaaactgaactcatcacccatcaattggagccttaagtgagataaaaaactagcttcagttgtatccttgtccacatccactaaaccaccacaaatatccccaattttcctgaaaattctcatatcccaaaggtgttggaaatatttta

SEQ ID NO: 83042 - DNA, 821 bp, Cannabis sativa
agaagaataagtagttgaaataaagtagtaaaattataactagagattggtccctttatggctaaccactagtgtgatttttgccctatattttattcttttttaatccatttaattcaaccctaagccctagttgaaatactataaaagggaaaactgcaaataaatattctaagtattttacacaagttagaaattacttttccaccatctttctttgatataatggttcatgtagttatgcatctctctaaaaaaaccatactaggtgaatgcagtacatatggatgtgtctcatcaagcggtcaacatctgtgtacaaacaatatgtcaggaatcgttcccgttcagaaggatttattgctaaatcttatgtggttaacaagtcattcatgtttgtgcttttaaaaagtgaaaactcgattcagtcgtcctgaacaaaacaatgatgtcatctcaaacatgccagaacaataattttctgtattcaagcatgtcagacgacaattgggtaagaagacattagacataagcaaatgatgtatcaaatgatgtattgcatagaagttgagctatagtaagttgactttcaattaaaaatgatgtatcaaatttctattaccttataagttatttgttatttatttttattaaatttctaaatatatcacaatcattcaatagtaaatagctgaaaataaatgtaactatcattattacaaatttaatataaccattaaaaccttttatatatatatatatatataaagtaataattaaacaatttatagagtattagattagtttcaagtcttaaaaaa

SEQ ID NO: 83043 - DNA, 695 bp, Cannabis sativa
  modified_base (420)..(420): a, c, t, g, unknown or other
ctacactattttatagtgtaacaagtatactttttttttttttttcatttcatccctggctaacaaaacaaaaaactactctcaatttctcgactctctctttctcaatctctatttgcacgaggtggacagccggtcgacgtcggagagaccaataggctcacgaatcacacacattgattgtggtaaacgcacattcactggaacaatgggtaagtatttttcaaacaatttcttaaacatttagaactttagaagtatatgtagtttatttttagtaaatctgtgtagttattgtttggggtatttatccaatttaatccgtgccgtattatttttctcatagttcattcgattggatcaattattttagattgattactttttaatattagttttttttttcacataactaacaanaaaataaaataaattattgttgttgtatgtgtccaacaataaattaaaataaataaaataaaaataataaattcaaaagaagaaaaataatggtatgtagaaaaaaatatttaattttgtttaaattttatgtagaaaaaaaaatatatctactataattatataacatcaatatataaatggatctgcacaggaaaacaaaaaaaaaaaatttttacatcacatattgaaattttaatttttttttcttttttattgtagaatggatttttttt

SEQ ID NO: 83044 - DNA, 510 bp, Cannabis sativa
acaatgttaattttgacgacttttctaatgttgacgacaattttagtaacttttctaacaccgacagctatttcgacgactttttgacatcagtaacaaataatactgcttaaataaataaaaacattaaatatataaaaatacctaaaaataaagaatatgatataaattgatcaaatttaaaaatccaatatttaagtaaataacaaaatactgtagtgagtgtaatttaccactacaaaataatcaacatagaaaaatctcctacaaatgaaaagcactggaatgagccaataattataaataagcataggaaatcagagtgttcacagaagctagagtttcgtagcaaatcccaattttgtgttttgatgatgatgtggcaggtggagaagccttagtcaaagtaggcggctcgtttgtggtctctgagtggctgaaggtagtcaactctcacaagctgtaatatacgagtcacgaccacgtgcttttaaacaccacaatcagtca

SEQ ID NO: 83045 - DNA, 1257 bp, Cannabis sativa
attgatatgatgtaatatgaaaaatattaatttttaaggaattttagaaacataaatgggaaaaatttgttagagttgttgattggagccaccacaaaaagttagtgttttttttattcttatattttaattttttttcattaatattaatttgtgtattatatgttaatttgtaaataaatgtaatttgtatattaatttttttagtttaatttttaaaaaaacagatttaatagtttttaaaaaaatagattttatgtatttttttttataagtgttactaattgtataattttttttaggtatatgtaagttttgtgtatgtagaaataatgtgaatttgtgatgtatttgaagattgttggagtgtttaggacaaatttaaaattttttagataggttaaaatatagttgttatgccgccgaaatgatagtagaattttgatataataaaaaaatataataattaatttataataagttattaaatttataagaaattattgaaaaataaaattataaaatacgttcttatttaaataattaattatttaaaaaattgtagtaattaaatttaaatttaaataatttaaaactaagtaatgagttaaaataaagtatatatttatatatttttttttttaaaaatattaaataattagattttcaatttaatatattttttaaaaaatttaatatttaaatattattataaagatattaaaactaagtatcttaattaaaaagaaatttaatttaattttttacaaaaattattaaataattagattttttttaatttatcgtcatttttttttctttactgtattcactgttaacgatttttactgtatttttttctcacaaaagaatcttaattcccctcagcagcctcaacaaatctaaagagcaattcagtgccttagttgtaaaggtgtttcaaagaatttcaaaaaggatacaaggagtcggtagataaaacaaagcaagaattgcctccagaatcagcgaaaggggatcttgcatcagtatgctcgtggccagacgatgagagagaaacaatgatctagtttattgagattaaaagggggttctgaatttgatttggattgagtagaatatttgtttattcgtatacaaatttgaatgcacatggtattttttagtttgacaagtcgatttggttgttgatcggtttcgtttggagtttggattaatctttagggtttcttttggttaattgcaattacgcctggt

SEQ ID NO: 83046 - DNA, 514 bp, Cannabis sativa
ttaaagatcttggcttggttgactactttctagatatacaagttactagaactacagctggaattcatctctcccaaaacaaaatatctccaagatctcctaacccaagctggtatgcgaaatgtcaacacacaatcaactccaatgaacagtggtttgaagttgtccagctatggtactgaaccagctcctcacaccactctctacaggtctattataggggctctccaatatgccaccattaccataccagaactctcctactgtgttaacaaagtatgtcaatacatgcaaacacctttgctctcacactggactacagtaaaaagaatcttgagatacattgctggcactcttgactatggcctttacattaaaccagatccagattttgccttggatatgttttgtgatgctgattgggtatctaacttggatgataggaaatccaccacaggctattgtgtgtattttagaggtaatctcatagcttggaaatctcaaaaacaagtta

SEQ ID NO: 83047 - DNA, 877 bp, Cannabis sativa
gatttcagttgtaaattagggtttgggctttcctatataaaggccttaactctaacctagaaaacctaagactaattctagcctccaatagtctgaaaccctaatctctcttctttatctctcttgtacacgcccaatagctagattgatctcacttcctctctcacaggcctctaaggctacacctctatctcattagtaatctgcatacttgatccatgcattgcaaccttatagagagctatatgagatcccacttatagtgatcgtattatctctaggtattaatacaactaaaagggagtaggtcattaccccctaactaagaggaccgaacgtctataaaaatccttatcttatttactttattatttttgttgtgtaacacgtggcaaacatcagatttatacgaccctaatatcggttgattaactttgaggtcaacacacttctttacaacgttcgatttgcatgcattaatgtactatgttgtgcccatgtgacaacttgaaatataaaccatgagagatcacctataaataatactcaacccgtcattcaaaaggattggaaactttgtgtaactaaagaatttgaaatattaatacaatactctctatttcactattgttgctctctaagtttcctgaagcttctttaagattacttctctttcttccttttgtcattcattacataaggtttccgactagaaacatcgttaataagtttttacggtcaataaatttattaaaacatttccaagaatagcaaaataagggagagtaattttataatgtactatttttttcttgaacgagttttgtcttactgtggattgctataaaaaatataaatattgatttctaaatcttct

SEQ ID NO: 83048 - DNA, 977 bp, Cannabis sativa
tatgcatgtacagttattgtttgagtaattgcatcaattgcgcttcttaagtataccgatcggtttcctattaatcataaagaagacaggtaacttgtaatcttaaattatgaatactactttctttttgaagcttgttatttcaggcgaattgacatctaaagttaagatggcatttagatgaactacttagctgagactcgtgttgtatcagaaatggctctttgtgaccagcatattggtcatggtgcagcaaaaaccaactagtcttggtcccaacttagctcatttgggatatcaacgtctagcttatgtgtggatttgcacacatttaaggttcgctcaaatcgtcaaaaaataactataaggaaaagccattagaaagaattcactcgggaagagcactgtaatatcctacgttagtgtctttaataatttttaaaatagtttttaattttaaatgaaacataatttattttataatatttttttttttaaaaaaaaagcaaattaattaaaattatttgaacaaataaaaatgttttgtcaatgtaatattgatataagtgcttttggatttttgattttggaaaaatataattagtctgaagatggaagtgaatggaaatggaattgaaaaaaaaaatgaagagaaaaataaaaccttttctaacggtgcaagacacaacaacgtcagcacttaactttgttacctttgccgttaattttaacggaagcaaattataaaattgcattgctattagtaatttcaaaaagagcgtaacatttggcgcgtattttctaagaaagatcccgctaaaaccctagaaccatttcacagtctattttctaccctattttccctttcaccaaacagtaaaactcactctaacaaaatcgactctcaaagccctatcgctgctcattcatcttcttccttcaattcgttgaacaaggtatctctctctctctctctc

SEQ ID NO: 83049 - DNA, 825 bp, Cannabis sativa
caattgtaattggatatccaactttttgtaattagattggattggatcggttcggttcaattggattggattggatgatgcctattcatgttcataaaatcccaaaaataagattgtttcgtggtataaatagagttaactacaaaattacgttaaaaatctctatcttttctttattactcagtaactaaattcattgcgtgtaattaataatatatattcaaaagtattaattattaagcctcgatcaatgttgacgaatttatgagttaacattctttatattttatgttgaaggtttcttagctttgatttcagattgtgagagatgtggaaggattaagggatgtaaggtggagagaggcgcttaatttctcacatgttctttgcagatgatagttatttatactgcaatgcaacagaggagcgagctcataatgtgctagagctattactgtgttttcaaatggcttcaaaacagcaagtgaattttaataaatcctatgtgttttttaatgctaatactgatgttcaagtctgggcaaaagtctgctcaaaatttttgggtgaaataagtctgtcattttggattttttgaaggagaaaatgaggaagaagattcaatattcaggggggaaatctctttcaatagtaggaaaagaattgtactcaaaacaattgctcaatccttgcccaactatgctatgaatgtatttctttcgccattagagacttgtaaagaaatagagaagatgaccagtaagtattattgaaggtattcttcaaataataatggaggagtttattggaagagttggaataaga

SEQ ID NO: 83050 - DNA, 542 bp, Cannabis sativa
  modified_base (508)..(516): a, c, t, g, unknown or other
taacgaccttaaaagttcaggggccatgatttggtacatgtcaaagttcggggagaaaaaatcctaattagtctttcttttttttgtctaaaaaatatatgagatgagaaattacctttaagaatgctcaccatcgtctagtctaagaacatacttaatcaatccatatagtattaaaattgtgactcacatgtaaaagagtctcaagagattagacaataactctcaattcattattatatactaaaagagtaaaatctagttgttttactaataaatttacaaggattattaaaagctaaaatacaaaatgtaaatcaagatgaacatcacagatttacaaacttcaccttttttagaaacacattctaggcggttagtgtttgggtttcccgaactagggtaaaataattccagtataaaatgtaatgatcgcatagttaaattataggaattagaagatgatttagggctcgtttggaacatcgtattaggtcgtattgtattnnnnnnnnntatattgaattggattatatatcata

SEQ ID NO: 83051 - DNA, 1177 bp, Cannabis sativa
  modified_base (86)..(91): a, c, t, g, unknown or other
  modified_base (1115)..(1121): a, c, t, g, unknown or other
ctaaatcacatcattcataacataagtgagtgatacgctaaatcactttccggggtcttaaacttaaaactaaaagtttccctatnnnnnnataacatggcaataccctaaacaacacaaaaatagaaaaaacaagggttcccaaaattatcccaaccggtagaccggttccccaactgaaattccggctctgtggggtttcttgggagccaactggaattttggttcctacaggcccctctgaaccggaattctgattcagtgcaggaatgagtcaaaaattcataaatcattcaaatcaactccaaacttcatgaaaccttccagacctactatttagaccccaatgaacataacccaagcaacaaaaccaactaacatgctcagaaacacaatccaccatttgagctccaagtttgagttcaaaactcaaaacttggttaaatctaactaacatccatcaattcaagcttaaaccaacacaatcaagcataatttaacttctaaaaacaacatctaataatgacagcaacaacagtagccaaatcaccattttatgcaaaaatccatccttaaaattcaagaaaataaaggtagaagttaaaagactataccttggcttgagatcactaacaaatagctgagaatgacttgaattacacaaagaaaaccctcaaccatagctggttcttgaagacatgaaagagagagagaattgagagaaaatgagattttgctttactttgactttttcttgaaaatgagataatttcctttttgattaattccaactaatatcagccttaaacattactaaaaaaaatcagatttactactaaaccccattctcacaaaaagacaaactaaggcttggcaaaatgacaatttttgcccttccatactaatagccactaaagatcactaaggggtaatttgggaaattctaaaatcccgactactctcgacattcccaatgtctaactataccacccgctatactaaaatactaagatatgattatactaagccatacaccgcgttccaatgttgtcgggcacaaaacatataaaattataaaatttctacatataacatataaaatgcattctgaattnnnnnnnatcatcataaattaataatttagaattaataactaattttcataattaaaccctaa

SEQ ID NO: 83052 - DNA, 1902 bp, Cannabis sativa
  modified_base (410)..(412): a, c, t, g, unknown or other
taatacatttagctagccacgaaccttttagtcacaatagtcacaatataagaataataatttataattagtcacaacttttttacttttaagttgtgactaaatgtaagaaaatttgtagtgtttatcttgcgttgaaatagaataaaaccaaaatcaatttctaatttgtattccattcaattttattaggttctaataaaacacacactaaacgtttatgtccattattaattaaaatagtcgtagtaagttacatacttcaatttgtttatttgttattgtcaaatgcaaaatagtcataccataaatatttttggtattcacaaactgataatcatctataacatctaccaaaagtttcatatcttccaactgattatgtctcacacaaacatgcaaaatggtcnnncactttgacccttcaaaccgacttgaacagcctcaggagctactttaattagctccctcaacacatcaattcgccctctcatggcagcaaggtggagagggtttctcccttcttcatcccaagtcgtgcacaagagttcacaatcaacgactgaaagtagtttgacagttttaaggtggccgttagccactgccaagtggagcggggtacatgcaacgccacatgtcaagttccttggcgatttcgggcttgtgattgaggattttcttacaaaatctacatgaccgaacataactgtcacatgaagaggtgtctcagaaaaacttttattgatgaagagcttaattgtcgagatttaaactatctagttgaagaagttctcttaaaaccgcgactttcccttcccgagcagcttggtataaagcaagctactctccatgtatatttttttttataccgaagaactctttgagagaatttattcaatacttaatttgataaaaaatgttaagttcttgtctaactaaatacatgactgaaatagcacaccattacatataacttttctaccaacttaattatttctattttataataattaaaatgagtatattccatgtatttattgttcccttttcaagatataactctcaataaattatatgtggcctatatatatatatatatatataacacaatgatattttggtatttcacatttattttacgtggacaaggcaatgtgatggattccatacatacgtaaaaattatttgacgattattagccatatgcataccacactcatagttctgctagacttcactgaacaccactatacctaataggagaattactaaaagatattatattagtgtctaataacattctcggtgtcatactattattgttataattaaatatggggtctcataaaatttaaaaaaaaaataacttttagagaatatcgctaactaatagtaaagcaatcagtaatacccaataacaattactttttaaagcaatgcatatatttgaaataaaaaataatgtctttatattttcccagttatatattcaaaaataatttttctgtattacgttaataccaattgattaccttattaatcataaatgataattatctaatttaaattatagtattcaatatatatttttgttaggttaattaaaatttttgcccccaaactttgatatgtattaaattatgtctcttgaatttttttagctgttaaaattttttcctaaactattgatattattatttaaagacttctatctaattttaataaaaaaaaaaaatctaacgtggattaaaattgaaaggaagtcaacacaaggattgattatataaaaagggtatataatataaagttataacacatgtgccaatacaagtaaataatatgaaatagaaacaacactctcacttatatttctaggcaaataaataatataatatatatata

SEQ ID NO: 83053 - DNA, 652 bp, Cannabis sativa
cttgtaataaagacaagttatgaagtaataagctgcaagagatgtaattcttttgttgaagttgtaacgttggtggtttgttttgattatgaagtttgcttcttcttgtaaataaatcctatctacttatatgtagaattttagaattttagagcctattcttctaacgaatcctttttcaatatgacaatggaagaatacgaagtttggttcaagaaagattgaactattacaatggtgataattttccctagaacaatatctaaatggagctttgaacacttaggaaacccccttgaagatcttcttccctttggcttctcaattctgttcgcctctctccatgtcaaaccttcttgctctaagtttacaactcaacctcaccatacaaaaattctctcaaccctctctattcgattttctgctctaattataaaatgagactgaggcattcttttatagacacaaggagtcaatcacaaaagctgttacacataacataagtaagtacttaaaactaacagaatttaactaacttttttgagcgtccaatccgagctatcttcgaatcatgcaatgtcatcattgttaataatgtgtctagtttattaggggctgatataacaacaatttacacctcagtacctaataa

SEQ ID NO: 83054 - DNA, 821 bp, Cannabis sativa
aaacttttgtgagggtggcataaaataacaccatgtgtgtttttctagcataaaatgtcaaatttcccttctaaaatgaagacgagaattcttttcactactttttttgattgccagtgcgttgatcagctcttggcagctctaagcttttcccacatttccttagtttcggagttgactacatgtgataagttatctgacaaattcaagtcgagcatattcttaccgatatcatcaagtgatgctttttaaaaattgtgaatcagtgaaagtgattgagaaataacctcagaccgaataaatcggttgagaactaggcttgtattcatatagagtttagaaaatagtacatctaagatcaggactactaacagaaaactagtgttcaacaactataatagcagattaagcgggaaaagaaaactacaatatcagaataacggatagctaaactcgttctctaacaaaaatatcttccactccattcgacctaccacactagaaaagtagaaatcatttcaaagcagagctattagttttagcaaacatcttcgtcagttcttttaacaaagaaaaatgaatcgacctaattgtccatttagaacgtttagtgaactagttaacttgaagaaatagcattttgtaattttgtagtcgcttatgacaatcatcacatctttgactttgatttaatattctcccgttcacaactcaagccattaaattagtctagtcaccatgcagtgcataaaatagccgatacaatctaatctaatccgtaaagtgcaaatttctgtacttgtgcagattgaattggattg

SEQ ID NO: 83055 - DNA, 1533 bp, Cannabis sativa
gttctttctgatgattctgatcatattgtactggcgggtgttgctgagcaaccctgcctggaaaaatgagctttatttgttggaatgcttggggtttggggagcccccgagcattccgaaacctttcccttcttgtgaagcagcataaaccttgtttactttttgttattgaaactaagctaggagctggttctagttctagttttaagtctaggttatcttttgataatgttttagaaattcctagaagaggtttagggggaggtttgtttcttttttggactgctgctgttgatgtacagattaataattactcctctaaccatgtggactattttgtatctatgaatgataatattaatactaaatggcatctctcttgtttttatggttctccttatatttcgaataaaatggatacttggaccctcttgcatcggatgtatgatattgctcctagtatgccttggtttatatttggtgattttaatgattaccttactttaaatgatagatctaatgcttctaaccctcctgtgtatgctatgactaactttcagcattttcttaataaatataatttgcttcctctgccgtatatagggaatagatttacttggaaacatggtaattcttttgaaaggcttgattggtgtatcgttaataacttttggttagatctttttcctaaggtgtctcttcatcacttaggtttttttggttctgaccatagggctttaaaggttattcttgaggataatctttttaagtcgtctggtagcaggaggtttatgtgtgagaattttcggatttctgaacctgactttctctctgttgttaaagatggttggggaaacaatttttctaatctcctcaatgccgaccccctatcctccttcctgcttaagtaagactcctgtcttaagactgttcaggcttggagttctactaagcaaaactttaattgtagaattaagtctttacaggatcgtcttgagtctctcctctcctgtcaacctcattctgattttaacagtaatcaagctaaagagcttcaatctcaaattgactctcttctttttaaagaagaggttttttggaagcagcgttctagaataaattggcttaaggctggggataaaaatacaaaatattttcattcgaaagccaattctaggcgtaggaataatctaattcgtggtattgtcttggattctggtgagcatattgattctcaacaagatattagtaaacactttcttaatttttatagtactttatttacctcgcaaggttcgaatgttggggctgtggatcaacttttgcagtttatccctaaccatctctgtgtttctgctattcaacagcttgatgagtcttttaatagtgatgaggttaaggatgctcttttgcaaatggcaggggataaagccccaggtttggatggggttaatgctatgttttaccaaaaaaattggtctacttttggtcctgatttatgtaatgctgttctatctattcttaacaatcaaa

SEQ ID NO: 83056 - DNA, 1112 bp, Cannabis sativa
  modified_base (684)..(703): a, c, t, g, unknown or other
  modified_base (857)..(859): a, c, t, g, unknown or other
tttatggtgattctctgtctggctgagtttttttttttccgcgttggatttagttgttcaaagctaccgttgttgaagatggtggttcgtgcagcttagagcaagaggtattcttgtaaatttttttgctgggttgtataaaagtttatatgaccggcctaatgtaatggtgttatatttttgtcattttaatatgtagaaattacatgaattatgagattttttagtgtttactttttatggcatatttaaataatcctttgggtttatgataatttgaattgtttatattattatgagcttttttatgccatatatgtgtaaaagaagattgaattcccatattttatgtttctcctttacaaaaaaagaaaagtggagatctatctctttctctttctctctctttcccgttatctcttttggttctactgtgcgacgccagagtatagaccggccgggagtactgtgctccgaccagtgctcccagtctattctgagagtcactaaatatttttagtgacccttcattgcgggtcactaatgtgggtaactgaaaaggtaatacacagtgacccttcaagttggatcactaaaacattttagagtcccacaatgtacgtcactttagccttttaaagttctgcgctgtcaaactataaatataaaagccactcacatcgnnnnnnnnnnnnnnnnnnnntttttttaaaatatttcatatttacccaatattgattttggccttgggaaaactaataaatatgagcattgctataaggcgtcagtggtgcctagcactttctcgacatgttacgttgcgattggttaccgatactccctaaaaactattatannnaattatatgggactcgatacttagttgcaccaatagcgatactgacacataggaaagtattaggcaccactggtgccctttagcatttctcaataaatattgatcctttattgataattaatattttttttatctgaaccttaatggtaattaatattgaaatggtataaaactaatttaattaatatctatatatatatatatatatatattattattcatgtgcaatttcaaataaaagaatacacttttt

SEQ ID NO: 83057 - DNA, 523 bp, Cannabis sativa
gaaataattagagcaaacagaattttaaagatgaaaaaaaatgatgtataacaaatgttgaaattaagctacacatagagtgactagattaataaagcacccaaatatattaattaagatatgaaggggagtgatgaataataacatttcaaaactagacttaaaaaaatacacataaacaaattaaatttaataaattaagcataaatcacacaaacatatctaacatatagtgaaagagaaaatcactagatataagacatctaagaaaataattaaaggatatatacaacaaaaataaaattaattaaaaaggtatgtaaaatgacacttatttgaactcataaacaacatgaagaataaaaatgaatttggttctttattagaggatttagcaagtttgatgtttagttttttttggagtattccctaatctatgtatgtcgaacgaccaatgtggatgaacatggattaacccagcatagtcttcgagtggatggaaaacttgtatggtttgatgaga

SEQ ID NO: 83058 - DNA, 595 bp, Cannabis sativa
cctcctcccaaggcaccgggtaggggcagccaaagacatagctaggcagcctcttctagcaaggctgactaggccaaggaggtttcttaaaattacacaggcaagtgtctttcagatgcggataagtagctccatgggctaggtatgttgtctcctttcactatctgacgaccagcaccatgaaagatgtggcatctataagtttttttaattcgcaccttgttctttacttcatgcactgtgcaagcttattaattttgtttcttctttatatcaagctttcttgaagcttgtccatacccatgctagggtcaagggctctgcagtagcctttagaaaggagattgagaaaaaagacgctgagcttgccaagaaggatacccaacttagggagcaaggtgtcaaccttaagacggagggcactgagcctgaaaaggggaaggccgatctggagttggaagagaaagggttgagggaggtgaaggaccactagaaggtgtgggccagctgcttagccaccgcaatcaagaggtgactaatttgacggcaaaaaatgacaagttgaagaagaagttagatcttgcggagaagactt

SEQ ID NO: 83059 - DNA, 1824 bp, Cannabis sativa
gggtctgaggttcgggtctagggtttgggtctaagtcttgagtccgagtctaggtctaaggtttaggtccgggatcaaggtttgagtctgaggtctagggtctgggtttgggtttgagatccaagtctaggtctaggtcgaggtttagggtctagggtctatggtcggggtttggtgtctagatttgggtctggggttcgagatctaggtttaggatccaagtctagggtccaaattggggtctaggatccgggttcgggttagggtctaggtccatgtcagtcagggatccgggtcggagttttggtcggggttcgggttcaagtttgagatttggggttcggggttcggggtctaggtttggggtctaggtctaggtttggggtacgattctaggtttgaggttcgggtttaggtcagggttcgagttcggatccggtttcggggtccagggttcgggtccaagttctggtccatttttgggtttgggtcttgggtccaagtacgtgagaaaaaaatataaaatataatatgttagacaaaaaaaattatttttgaaaattgaaacacaacattttgatattttttttctagttctttaactcatttttaaaaaattttgccaaacgacccttatttgtttttaaaaactagtttctgtttttaaaaactcaaaacagtttttaagttatgaagccaaacaactcccttgtctctcctttctaactcgaccactattacttcttcccacttatcatttatttcttcttttctatattactttcttcctcccaccattttctcttttaatctcgcaccattttttttactctctcacactattctatcatcatattctcactaccagtgatggacttagaatttttactttgtgacggcttatttataattaaaaaaatatttatacctatattacaatcactcttattagatttatttaattttgcggaggtttttctactattttagtctataagtattaaattaaaaaatttacatttaattttttaaaagttaatatttttgttagtaggactataacctttacattagtactagtgggtccatccttgcttaatactatttctacatatatcatttgttgtcatgtttttatctctcctcatgttgatttcctattagtctttaatgtacttttgtcatgttttttctttctaacatattgaagagacttttaataatacttttatttttttaattttctaatcacaaaaatgagaataaaagttatatttttaaaattttattattagaaaataaaaatgtgttttataatcacttttattttttaaattttaaaaatagaaaataaaaatgtattctataacttttattttttaattttactaagtcgagtccaggtccggatctagggccagggccggagccgtggtctgagtctggaactgcggttagggctggagtctgggtctcaaggtccatattgggatcagagtgcaaaatattaattaagagaaaagattatttgactaaattatgaaagtgtttttttaaatttttttttttaattttctttagcagaagcgtagaagtttggtctctctacttcattcgcccagctcactgatttaggtgtctctttgatctcactatctcctatccccatttttgctagatctgcttctagagttttgcacggatcgtgaaaagtctccatcagaagttgatttgcaactacatcttggatcgaagggagatcatcatcatctttcctatcgattgaaacagaaatccttaacttcgacactacctgcttttctt

SEQ ID NO: 83060 - DNA, 750 bp, Cannabis sativa
gagctctttctttgctgcttaacaccatattaccacgtagacccgtctatggatttgaatggaataacaacatgggcctagttcgaaagcaatgggggcgtccagggctttatagaatatcatcgcatcataattggggtttcgtcttttttgatgtcctactatcgtgaatcatttcaaattaagtccaacgaatttagaaacggagtttcatgggtttcaaatttgtccaccacctccaatggacctatatatgagcctaccaataagttgggcctccaatggacccacgagcctttagttgcgttgggaccattagtatataacaaattcattgtatgcatcgttcgctgcaattccttcagcgagaaccaccccgtatccattccatgaccttgacaatgttcttcaagccctccattcatttcattttcaattgtacattttagtacctacaatgatcgccaactgcaacaatgtaacttcttcaactcttttacttaagatatcccagtatataatcctaatttggttaacaatctaatgtgaatgtcgtgtctttagtatttccctatctcaaaaatgacaaattatcaatgcttcatgttaaccttttgttttgtttataaaaaaaggtagcattaattttaatcaatggatcaaaatttctataagaatacaagaaaaatcagatcatataacatatagttcgattcttttttcaaaatccaagtgtgaaaagtaacttat

SEQ ID NO: 83061 - DNA, 545 bp, Cannabis sativa
acaagcccaatcttctctcttttctttagttattagggatggaaatgaaaagagtaataggcgggaaatcccctttattcccatcatattgtaagtattttaatctctatctccatcctactccggttgtgggttgcataataaaaattatataaaaaaatgtaaattacacataaattaaaatattataccatcgaatttatttttgaattataatttttatatatttctagaagttgtaattttatagcgactaagtaggtatatcctcaaagcttaacaaatccgattgatttatgttttatacctgtgaacactcttttgtaatgaccacaaaatttaatttcttttaatctataaaatgattttctctaaaaaaaaattaaaaattcaaagtgtgaaatattatccaaaataaaaatgaaattgttaaaagttataatttgctctaaaaaattataaaaaagagattgtttaaaaatataaaaaataagaaaaatttataaaaataaatttgtacaaaattttaaatatttttatgtttt

SEQ ID NO: 83062 - DNA, 1102 bp, Cannabis sativa
ataatttctatatcttaacttcgtaaatttgtcaaagttttgataaatttatctacatgttcaatcataaaggtactatttttaagtcggttagtctttttttaacagatatattagatactaaatgtaacatgtcaatttttaattgatctaaatcataattttaattaaaaataatttagaataaaaaaaaatctaaaaaaattattttaaaatcataaaattattttttttcatgtaacttcacaaaacaaaaagaaattcaattaggaaaaaccaaacacccacctgactctcaccccaccctcattctcagccacggtcgtcttttccagaaaacaataaaatccaaaccctgatcttaatccactcattgggaaaaatcaaaccatacataaattcaaatatgtcttcatcttggctaaccaaatctctgtttaggagctctgatcataccaagggagagagacaaaagatgatttgggttttaatgatatccattaacattgttggaaaagaaccgatcaagagtaatagaactagagaggtttcaacagacgagggtgctgctagtgagagctgattctctcatcgaacacgggctctgggaacaatgtcagcaaaaactcgagtttagatctaagcatggtgcaatatggattttatgcaggtttgatggaatgatgataatgagagagtgaggtgagggaatagtaagagaaatttaggtctgagtatttttttatgcaagcatagtttttgggtatgaatatttttttaggcatgcaaggtaaaagactgaagaagaaaaaaaaatatttttttataattttaaattactttttttttttaattttaaattatttttcattaaaattataatttggattaataaaaaattaacatgtgacattttattagcatctaacgaatcaattagaaaaatgactaataaacttacgaaaaaataatcttaaaaactattaaaccgtcaatttacaagattaaagacttatctgcatcaaacataagttttacttatgctacaatttttgtttcacagcaagtgaagttaacttgaaagttttaatgcaatgatttc

SEQ ID NO: 83063 - DNA, 546 bp, Cannabis sativa
ccttcatcaaatttagtccaaaagtccttatttccaacacaatctgagttatatagcagcgactcaaaacaataaagtttgagcatatttccattaaccaaaaacgttatgtgctagagagactacttcaattgccgaacgagtacgattactccataaaagctcattacgtgcattccaaataaaccaactaaccattaagacttcttcaacaacatcgcctttatgccgagatcagaaatcaacaaaccagtcttgaaaattaacaattgtcgaaggaggcagagcaatagcagacctggtccagcaatattggggaaaaaggtattcaacaagaaggcggtgtgctgttttagcagctccattacagaatagacaatgtaagtcaacaaagacatgcttaatttgtaattgaacacgagtcaccaaacaaccagtaagggctctccaagcaaaattaagaacttctggtagaatctttaacttccaaaaatgcttccacatttttaatctcgagtttatagaccaattgcccttcaaaatttg

SEQ ID NO: 83064 - DNA, 3283 bp, Cannabis sativa
ataaatctttgcagttagaatatggtgatactgagaaataattagctaatatttttaccaaggccctagactcaagtcgctttgactccctcagaaaatcattgagagttttcattgtctaatcttttcttgttcttgtttttgtacaatttcgttgagttgttctttgcttgcatctaatattgtttcattcttatttgacaaatcatgattatgcttttgaattataattagttaaaatattgtacttatcatactttcgaggttgagttaaaagattcatgttacttttaatgtgtgattgggatttataatgttcttacagagttgagcatttcttgtttcagtattatcaagccccttactgggatagagctacccatactgaggtgtgaaagtcatcttttgagtaagctggaacgttgtaattaagagttatgataaggatgcactaccatagaaaagggcaaccttcagtatggtgtgatagcatccaattgcgggatcaaattgaaaaaggcaaaaaaacaaaaatcttgccaaagataatgatcctatttacacacacttatgtctgacaagtgaattcaagtgtgcaagtctcctcttctttaataaaaattatcctaattcacattatttgtaacatgtctatttttctcaacatttgttaagtgtggtgagtttttgagattctcattagttattctcttttgaaagcatatcatgaatatttgtcacttgttataaaatttaattagttgcttgctctagaataccttttttcattattgtacatattttatttatttttatatgttttggattttcaaaaataaaaaaaataaaaaataaagagggaggcgtttgtgacttgtcttgtgggctagaaattttgtgctttgtttggtaagtatcaacatttgatctaaaattgatttatttagacaattttcccttaaaagtttgatatcatattcattgtattttgtcattgattttgaagtattttcttaaattggtctatttttggaaagtatcttagttattcttattttcttttatttttttatgaaaaataattttggaaaaagagtgggggcagtttatttgtgttcgtgggatggtggcttttcaaattttaagttggtttccttttttgctccattctcacatgattatttaaaccaactttctttgtcatttaatttcaccacctacccgattcctcttctttgtttctttgtttcatattcttactttcagattcccatggctaagacaaagaacctagggcatccaagcaagatggtggaatccgaacctgccccctcaagtactactcctgtggctccaaaattgcatcctgctactgcaactacatcaaacccaagagattcatcgcttcctcagcgtgaatcttagactgtgaagcccaagctgaaatagattcttaaacaagtggctaggaaatctatgcgaccccacaaattctgcacttcatcgtcttcatcgtaaaaggggtctcctccttgtgccactacatcgtctgttgctgtaactgggaagggtgttgctgcatcaactccaacaggcccatcctcttgcacccgtgcccaacaagcatctctcaagaaggaactttgcactaaatgaagccatgacagaccaattcctcctgccaagaagctgaaattgaatccccctcgacttcttcaagttctgaagaagaagaaccaatggaggtcccctctgatgatttcgagaccaaattcgtgtctattccttctgaaaaagagcttccaaaagattttggtgtctcctttgaaagtgaggaaattgatctcgaacctgagcctccattgaccagatccgctccaacacctcctagtgcttattctgcagccaaagccaatagtgctgccaaaggcaagcaacctatgcagagttcatcttttggtaatgtttctccatctcaagctgtaaattctagattctactatcatgataatcagcgtgattggaatctttatgctacccgaaagtttgaaagtgagaggaataatgatttgcatgctcatcgtgtctatggtattgtaaagtttgtgcaatatcttcattgggaaaaatactcttactggttttgaggcatatattgatggaattgtcaaataattttatgctaacctgtctgatgattttcttgatgagaattctaatttttttttttgtaaagtgtatgttcgagaacattggttttccttttttgaaaaagacatttccaaggctttgtaactgctagaagatgtgacaaatgctataatgtatatggatcgccatctgatactcactgaactcactggtgcacgagttgagtggaaatctgggtagagtcttcgcattactcatctcacatatgcccatgcatcactcatgaggtttgcccttagcagttggcttcccaatttcaacaaaaccgcggtgtctcaagatgtggcctcttttctcttttgtatcacctcgagggcatctatcaatttagcttcctatatcttggatcaaattatgtcattttgaagaggtacaaggagtactcataagcttgtgtttcctaacttaatctataaaatactatcctctcagaaagatgtggcctattctcatgagacacttgagcctcccctcactggcaccatatttcaaccctcgaagtactttgatggagcttttcccaagcatcttaaagctggtggtgctgcttctgatggtgcaagttcaagttctgctcctccagatgtctaggaggtcaagtatgaggttcaacatgtgaataatcatcttgctgccccattccatcaatgtggacatgtggaggtgtaaaagtaatcttacattagtttccaggtgttagtcaatcatggaaggtgacttccattttcagtagtagtaggtcaacgtggcaaccatctagtagtggaggagcatgttcaccgaggagttgtttccaggaaagcttttattttgatggttgttcactttttggcacaagaattaaaaaatagtatcttcatcatgaatttgcacctcaattctagagtacattgattgcttcaacaccatgactgctggagtccccaactatcaaatgtaatttgtgcttttgaggataagatcatggattgtccatccttcttcacatggattgccattttggttataaatacccttaaaagactccatttaccacttttcccccaatttcaaactttcatccttcaaaact

SEQ ID NO: 83065 - DNA, 1169 bp, Cannabis sativa
tcataccttcagcccaaaatcttcctggaacattcttcacatgtagcatgcttcgacatgtttcttggacaccacaacacgtgaaaatgtaattactttattattatataagcaattacaccaagacttgaacactttatcttgatcacaacacaccaagcactcactcatttatttactagacactcacacttaaatgtttacttgcacactatttgatgagacactcttttagagttttattggaacttagttgaacacactaggacacactttacttgaacactcaagttatcgctcaactcaccacacaccaccaaaggacctattcccctatttatactactcaaaggatggtacattattatgctagaatgttctagcaaattgtcaatttattatagcctaaacattttatgactattactctctataattctagaaaattctataatattaccaaaatgatagaaaattctagatacttgtagaataggtgttgatcttttaatagattgaggtcttatgaattgaaaaagaataggaatcattttagttaatttgtattgaaattggaagaagaaattgtagaacagactagtaaaataaatattgacaagttgatgaatttaatagtctaggtcctatttatttatattcataatcattgtttgcttactttaattttatagttaaattatttttttagttttaataatatttcctcattttttgtttgctaaatagaaagtagaaaaataattattagtatttgataatagttttcttgggacgatactcatgcttatgcactactattacttaaaacgagacgtatacttacgttacaaatttttcatatcaaatatggtagagtacatttgcattcctatttcccttggctatttccatgcatgtatctctgtgctttatcacaaatccattcaagttgcctagcatgagtttttctgttgggcttcttatttgcctataatttataaataagtttcagcttcttcgtatatcagaaaatctttttgttctttatcacggattcttcaatgaaggccctttaaaaatatttcaattcttcagggttttgtggcatatcaatatatcaatatatatataggaaagcattcaagatttatgtggcatactccccttct

SEQ ID NO: 83066 - DNA, 1582 bp, Cannabis sativa
tttatataattatattattgctttaaatgagagagtgaatattgtgtggcccatatacaaacagtaaagtttacaattaattctcactttgtcaaacaatatataatttcaagagtatataattacttcttttatgaggatgtactctgttgaggcaacaaaaattattaagacataacaaaaaaagtattagtattagatagacatttatataaagataaattgttgcataagtattcaaagttttgaatttgtaaatagtataaatctaatgatttttttaacggtatgagtatccaatatttgtaaaattgtatttttcttccagttttatcagtatagactccgttttgaatttattaaaagaagatttgaaagtaactgacactacatgtttctgttgaaacctaatgatatagaatccaagctttatatgttctctgtttaagacaatatcagagtatatactgacgaaagtaaagaaaaattacagttttacaaacattaagtacttatgctgctaaaaaaattattagatttatgcggcttacaaactcaaaactttgagtacttatataactatttaccgtattatttatataataagtaagaaagatatatcttctaaatattatactaagatatatcctaatttggctcccaagagggcatctacatctactttcagtctctaactctcattataacacgaaaagttacacaaaattaatcaaccaaaaatacactaaaagtttttgaaaatttttacaatacaccttctaaaaataccttttaaaatagaagcactgatcatgtactcctatttgtttggtatcttaaattatttttttggtcaaattttttcttatttgtcatgtacgttatagttttttaaaatatcttgaaaaaatttagaaatttaaaaaaatttaacacgtcaaaaaatagggttcaaacaatgtgttctattcgtgactattttattttatactcgtgtgaaatagattatttttcactgcttttaatattgttaattattcaaaatttcttaaagttatataagatatatatcttaaataattataacgcacacgaatataattttttttttttttttttgatgaatcagagaatttcattgctcaaaacacatttatacaaccaaatagcattctccaagtagaagaacctaataaaccataatctttacaaactttacaatgcttctaaccattctctctcactctttgatgctttctttggccatgtacaagatattctcttctttgacacattttttactttgcacactatactatttacacttagtatcaagttttgccatacaatatcatttctagctctccaaatggagtatacaagggctgccaaaactgcagcaagaatcatctttttagccttgctaatcttcgtttttcgtatccaccttactatttgatgcaaagaattggaagccatcctccaagaaagccaatcctttatttcctttaagcagtttgacgagaaggggcatcttttttgagatttccatcataaacatatgttggaattattttaccag

SEQ ID NO: 83067 - DNA, 1227 bp, Cannabis sativa
tttttttttttccagataaacggaatttatccattttacccaaagcaaatctttttctctttttctgtgatggcccagataaatttcgctaatatggcttgattccatttgacaccttccttaaaaccaattccaccataagccttcggtaaacagaacttttcccaagaagtaacatgtaatttacttctatctccattggttccctataagaaacctctgcacaatctttcaacttccttcgtgacactatgaggaaggataaaatactcatctaataattgcgcagcctaaacaatatagagtgaataaactgaatcctccccacgtttggcagatgcctgcttgtctaggaatggagatgttgttggatttttttaataatgatgtcacaatcttcagctttacatttagttggtctaagaggaactcctaagtaacgaagcggatatgatccctccattaacttttaagtctccaaggattgctgctttttcaaaattttagactcccccaaaataaatttgatattttcccttcgctgatatgaagccccgaggtattgccaaactcatccaatatgtctttaagaacaagcattgctttccttgtttctttgctaaacaagattagatcatttgcaaagcaaaggttaacaagacacaaacatttgcatagaggatgatatctataatttgtaccaaaggcagccatttggagtcttctcgtgaggtattccattactaagacaaagatgagaggtgatagtgggccaccttgcctcaagccttttttaccttctaaggaaccttgcacccttccattcatgcatatgcaatagttagtagatctaacacattccataatcctatgaataaatctcaaaggcaggttgtaagcacataataggtccttaaggaagtcccaacttatagtatcataagctttgcttatgtctattttgatagaacatcttggggagactaattttctcttataattctttaaaatatcttgtaagatcatcacattgtgggttattgatctacctttgacgaaggctccttagttttaactaaccaatgagggtacgtaggacagttgaaagtcttagacacatgagcttggatatatagttgtgtactgtggtgcaacaagaaatcggcctgtagtcctcaactctagaaggactgtcatgcttaggaattagggtgatcatggtggcat

SEQ ID NO: 83068 - DNA, 882 bp, Cannabis sativa
ggtaacctatcttaacactagtaaacatctagtcttaagttcaataggtaataacaagtcaatatagtgaatatggtactcaattgttctatctaagcttatgaaaactcaattacgcttaaaaagtgtctaaagagtggtgagacactaaaagtccacctatatggactagaggtggtgttgccatttatgagaattgggagtaatctttagagagtccataaattaaaatttttcacatggccattaacgggacaaagcgagaaatgtggtctcaagtgttatcgatttgtaataaaggaatagtggttcaatactacagtagccaaaattccatcaaattttgtgataataacactaaggtaagattcaagtcgaaatatattttactttatgcatccaagcaaggcatctataaaatgtatatttactcaatcaaagtgagagaatattatattttagtataatgtttaatttgagtgattaaataaaagttacaaagtttgttacatagatgatatatttaatgtagtgagagaatgttatattatttatttattaaagaatataatatataaataataattgtaacaaatcaattaagtgtaaatattcctatcataagaagtggagttacttacattttgtaacctccacaacacatcttaattcttttgaaattcaaatgtataatgaaaatatacctatcagagatttatttttatcatttaaaatgtgtataaatgatattaaatcaattgggaatgatttggaatgctttggagagttatttataaaaactggaaaaatttgatgactagtaactagttactgtttttagtgctttcttccatcgatcggagctctttggattgatcactt

SEQ ID NO: 83069 - DNA, 1522 bp, Cannabis sativa
gtaaatgacatgtccaaagatgttggtaatatacatctattgacattgctctcaaagataaacttagccaaatctaatcaaagagaaaggctcattgaaattgattttattcgatatatatgctcagagaagagtatgattaaattttttgaagaaatagataatagagagaaaatatttatggaaattttgtcacgtttgaggtagtgaattaaggtaaagtgatcataaaaatgaattctgaaaaagagttcactctcaacaatatgttgtatgtaccggagatctgtaagagccttgtaactagttcactgttgagtaaacatgaattttgcctagtatatgagtcagacaaggttgtgttgtccaatagtcaaatatatgtgggaagaagttatataacaaatgggttgtttaattttaatgtaatggttttttaaaaccaattaccaatgaagttaatagcgcttctatttattcgattgaattttttaatgtataaaatggaagactaggacatagtgatactatgtgtacattaattaatttgaatcacatacttaaatctcacattgatataaatcataattgtaaaacctgtgttgaggcaaaactaactagatcattcttcaaaaatattaaaatgaataatgaacccctagattcaatacgttgtgatgtatgtaacttgaaatttattcaaagaaaaatgggaggaaataaatattttattacttttgtcgaagatagtacaaaatattttgctaaaaagcaaaaatgaggttatagataaatttataatctataaaagtgaagttgagaatcaacttaacaaaaaggtcaatgtgttaagaaatgaccaatgtagtgagtatggatcaccgttttgtgaattttttgctatgaaactacgacattttatttgcctcaaaaaatagagttgttgaacagaagatttgcatattaaaagaaacgatgaatgcaatgttaatcagttatgacattgcttagaacaagtgggggaagttatcatgttagctaatcacattttaaataagttactaaaaaaaaaaagagagagaagaccccttttgaattatgaaaaggtcgacaaagtcttccttcaaatacttaagagtgcgggatgtcttgccaaagtggttgtaactttacttaaaatggtgaagatagtttcaaaatttaatgattatattttcactagttatacacataataatactatcaatttttttgtgtatgagtcgtaaatttctgatacttttttcacataatgtgaccgacttagaatgagtccatcaattattcttgagatttgaatagccaaaataatatctgctagagccatattttcatgtcaaatttagatttcaacatactttatatagatttgaccatcttatcgttgcttgctttctataataagtatgtcatcaacataaagacataaaatgatagtcatgatttgtttctttaacatgaacatagtcgtcatattcattga

SEQ ID NO: 83070 - DNA, 942 bp, Cannabis sativa
  modified_base (874)..(895): a, c, t, g, unknown or other
acaacttttctcaagtgacgataacaagtctctgaccaaaaaggtaaaaaaaaatcatatacttgtaacaaatatccacttttcttaatgtaattggtactgcaaaattttaagatttcgagaacaaaaacaaatttagattaaattcaactctggaaattgttagtctcaattagagatggaaatgtttactgcggggatgggtaatcgtgaggatccactcttaatggagtagggacttcctatttttgccgttaatggagcggtggtagaagacaattttaacacctgaagtagggatagggcgggagcgacggggacaatactatttgcaccctatctgatgtcaatataaatatatatagtttttcttttatttttaacgtatatatatagtatatatatattattttttttatcaaaaagagaaaacttcattaatcactaacaaaaagccaaaacaatacaaatagaggctccacacaagctgcccaacagaaaactaaagattacattttaatctatcaagaaaatttctttcatctaaagataactttctattatttacatggtataatctctaaattataatctattttatctttttaagtatagctacaacattttttgagcagccttcaaaatgatatttgttttagttagaccaaatacaataaacacatgctgccaacgttattgtaacagcagcaaccactcttgaagtcccgctagccagccatgtgatccagctcctatagtccctaggtctggcaaaaaatcccaaccacaaaaagatctcgtctgtcactttcctggataagctacactcgaaaatgttgggttttatgctctaaataaaacttatttcaatatnnnnnnnnnnnnnnnnnnnnnnagatcagaaataacatttaatgatgcatgattcacttgatttatttc

SEQ ID NO: 83071 - DNA, 886 bp, Cannabis sativa
ctatttacaatgatattaggatgccacatcaccgcttcatacttctagatatatagatatagatatatagattactccctacaatatttatattattattagggtttttatataaaatttttgtaaaccattcaattcaaggtgttgagaggtttaggacgaaatttttgtaatcgtatcgtattagatgttattttttaatatctaattggattggatcaaatgttagatggggtgtacgtaaaatataaatgtatatgtgaaaatttacattaatttttttttattagatggattcaatctaatccaatacattaaactcgaatatagtaggtctaaaatattagataaactcgaattaaaccaatagatatacattaaatacattcaatggatagaacctattcatgtgaataaaattattagatgtggttcaataaacacccctaactagagtaaacaaaccaagtaactcaaatgcaaatgaactaatacaatgaatacaatgatgaattaatcagcaaaacatagggacgaaacaaaggatttatttatacttgttcaagaagatgaatgtgaactttatctctactctagtttaaaagcactattacacttttctttattgattttaaagagataccaatctcaagagctaaaagaattcaatctcaagtaagtttttccatcttgtaatcacattcacagcacacataaaattcacaactctgatctgaaccaattaatcccaactctctctaaaataactcactttttctttctccctagaatctctaaactacttgtgtcactgaaatgataaggagtaccaacccctttttataggccaaataacagagtatattcgaactaacttagcaaaatt

SEQ ID NO: 83072 - DNA, 1983 bp, Cannabis sativa
  modified_base (31)..(39): a, c, t, g, unknown or other
tttcataattaaacataaacaactgctaatnnnnnnnnnaactaagcgggctttacatgttctctttcgagagacttttgctcaggcgaggtctttcaagtttgaaaatttttgggctagccatcaagactgtgaagaggtggttagacataattggtcttcgttagcggggcaaaatattattcagaaaatacaggaatgtggtactgctcttcagcattggggaaaggatgtgtttggcgacttttcttctcgcattaaacaatgcaatcgtctgttaaagcaatataagaagcgacgggatgaggacggtaagagattattttatgaggctaaaaggagctctttgttgttcttaatcaaagggaggtttttcggagacaacgatctaaactgttatggtttcaagcaggggatcaaaacagcaagttctttcactctaaagcttccgcgagaaaacaaaataatcacataactagtttgaaggactcggagggtaatttgagaaaatgggatagtggactggagaatgtcatggttgagtactacaaggaactctttactgccgaacctactagctgggatgaggtgttggactatgttgtgcctactgtccgagatgagcataatgaggctttactacggcctatattagatcaataagttaaagatgcagcctttcaaatgcatccggataaatcaccaggtcctgacaggatgaatccgaaattttttcagaaatattggtccattgttggcattaatatgatccatacagttaaacattttttgcaactgagcgaatgctggtagggatgaataatacgaatattgtgctagttctaaaaaagaagaaccctgatcagatgagagagttgcggcccatttctctttgcaatgtcattgccaaatttattactaaggtccttgctaacagaatgaaaggattgttgtctgaggttatctccaaacatcaaagcgcttttatccctgggagattaattacaaataatattatggtctcttttgaaatcctacattatctttagcggaagcaagtgggcaacgatgggtttatggtgttgaaattggatttaagtaaagcttatgatagagtggattggtatttcttgtctgctatgcttgctcggatgggattcgctgataaatggattcatcttatctttggatgcttgtcctcggtaaagtaccaggttgtgagtagtggtcgaactatgggtcctattgtgcctagtagaggccttcgacaaggagacccgatatcaccatatctgtttttggtgtgtgctgaagctttttctagtcttattcgtaaatttgaagagaggaagtggttgaatgggtgtaaagtggctaatggggcgcctagtgtctctcatatgctctttgcggatgatagttttctgtattgtaaggcgactaatggagagatgaatcgagttcttcagttactttggatgtttgctactgcaacgggacaacgtgttaattttgggaagtcttttgtcttttttagcactaatacttcatctgatatgcggcggaccatctgtactactcttggaattcaggaagtgactgagcatagtaagtacttggggctgccgagtactgtgggtaggaataaaaatgtcattttcgattatttaaaagacaaagtgcagaagcggatccagtcttgggacaataaattcctatctcgtgcaggaaatgaagttcttataaaatcagtttttcaatcacttccggcctatacaatgaatgtgtttcttattcctgtaggaatttgtgaggacattgatagaaccactaccaagttttggtggaggtcgaacaagaataaaggcatacactggctaagctgggacaagctcacggaacacaagagcaagggtcgcatgggattttgagatttaagggacttcaatctagctctactagctaagcaaggatggaggcttt

SEQ ID NO: 83073 - DNA, 515 bp, Cannabis sativa
gacatctcagctttcctcgaggaaagtgagtacacgtgtctttttaataggagtccggtctcgagtttctaggtgagaaaaatctcactataacacattttattggattgaattcttggatcaacatgtgtaactcaaccaaatggaaacttttacttatctgtgactataaaaaatcaaattactaatcgaatttattctcaccaaaaaaatctctattaactgaaaaaaaaatcattcataaataacataagatcgaacaagaatctagtaccaaaaattgcgtttttcaaactactgatagtatctacaaattaaagacaaaattgttactaaataaagtaacaactcaaaataaaaattgcaaaccaaagccacaaaaaaaaaatccattaaaaaaaacttcataatttaataactatgtgaatgatcgatcaagaattcaatattgaaatcatttattgttacgaattttatggttactacgcaagtatacgcaatcaagtagtatctca

SEQ ID NO: 83074 - DNA, 1193 bp, Cannabis sativa
ctatgtagagaaactataccatgtataacaaatttgacattatattctttcctaaaacattaatacacgcaatggcataactatatagaaaagctatactctgcaatgtataacaaatttgacaaaaattatccagccttctatccacaacgatctattttctttttccttttctaatgttttgtttttgaaaacgaataaaaaaaaaacccaattattattatgttaatttattgaaattgtgtgaattataatttgtcaaataatcactagtaatattgtgtgtaaatttacactaaaaagggttggttcatttatatattttaaagttgttttgttttttttatttatacaataaaattggtataaattataaatatatggtattttattgatcgcatttcacacagcaacccaaattgcaacactcaatttataatttacatactaatttttttaattttttttttaaaatttacaggttaagttttaaagtggtttctctgttaatttttacgtggattgctatataattttttgtagcaatttaagttgctctgataattggtttctatgtgaaatttcgtaaaaatataaaaataaaaatgttagtgttaaaaagaaaaaagccttaaaaatgaggtattaggatgcatgtcaaattttcctttcatatgatatttattttctaccttttagaaagaattttcctttaggattcattgaattgtattaacgccctcccattcaaaataaatttaatattaaatccaccattcaaagttcaaacacttcaggagatttaaattgatggatgaacttgttaagttttttttttttttttgtcagaatttgttaagtttttctgaatattagctccagaaagaaaaatacttcagaactttaacatttaaggtaaaaaatagttaggaaagaaaatatatggaaaaatctatataatagaccaaaaatattaaaaaaaattacaaaaaatatatcaacacaaaaaaaaaaattatttttactttttgaatttttttatttacaaaaataaattttcaataaaaataataaagtatttttttagttgttttataaccagtaattttttcccccaaactttgacatataccaaatcatactcctgaatttttttggccgttaaaaattccccctgaactattgaaattgtt

SEQ ID NO: 83075 - DNA, 810 bp, Cannabis sativa
acctctgctttaggatttttttctttcttctttttaggaatcttttcatcatctgcagcagtcctttcaccaagtaattcataaagttttgcatcaatgagtttctatgacaaaaacaaaggcacaagaaacatttttaataacaagttatgtaatatataaatagggtttgtatataacaaaacataaaatatcaccttcacaatttttggatcagcccatggcggcctcttccgaacatttgcgaataaatcacccactataaaaaagcaacagatgtgaaaatttgatacaatacaatgtatacttaacaattgcaacatgaaaaatagaccaaagaaaactattaaaacagtaaatgttatgaggtcaggtaatatattaaatgtaatgagcaattccaaataggaaaattaccgtttgttcgatacctttgctccaaaatggcactcttactctcttcaaacacctcatttacggttctttcaatttcttcagctgaaacctcgacacctaattgaaacacgaaaaaactccagccaaattaaaatgtacagaagattcacatcatactattacacaatgtaaaaatgcaattcaattaattatacctacgccacatgcttcttcaaaatcttccaacttaaaatcttcagagccaatattcgtgagaaatgaaaaagcagcttctaattgagctggagttttaatctgcatttaccaacaaagtaagaatgtacaaaatgaaaagttcacaaacagacgatttaatgtagtttgtatgtctgaacccacctttgatgaaacaac

SEQ ID NO: 83076 - DNA, 1044 bp, Cannabis sativa
gacatggtgactggtcatgtcattagcctttacctcgatggttcttgtctctacggctctatcaattccaacagcactctctttcaccttgttcatctccaaatgcttgatcttggttataataacttcactttctctccgattcctactgccataggcacactttcgaagttgctatatcttcacttgggttcttcttacttccaaggtgagattccttctgaaatttcacttttgtctaagttaatttatcttgacttgtcatataatgttggtggaaaagatccagtgcttgtgtatcttttgaaaatcaatcccaattctaaaagcatattccaaaacttaactgatttggattctcttttcctaacaactgtccacattgcctatgaattaggtgagtctttaacaaatttgacctctttgacacatcttagtctagggggttgtggattgtatgggcctattccaccttcacttggtaaattaacccaactcaatttgttaaacctcaaagagaatgatttcacaggttacatcccatcttctttccaaaatctcacacaactttcctttataaaaataacaagcaatcgaatttctgggccaatcccttcttggtttggaaatcttagtgaattatcgtatatgggattttcttcaaacagtttgagtggttcagttccaccatcattgtccaaactcagtgatcttgagagtctctctctgggggaaaacattttaagtggtccattgcagctagattcttttcttaaactgagaaaactcagtgaccttgatctaggcaacaatatgatttccttactcattgatgaaacaaaaatagatcctaacaccacacttccaaaattttattctctagcgtttgctcattgcaacttaagcaagtttcccaaatttattggccatcaaactaatcttgtagagttggatctttcatataataatatagttggtcaaattccccaaaatctgatgagtattcaaaccttggaagcgatacatttatccaataattggata

SEQ ID NO: 83077 - DNA, 707 bp, Cannabis sativa
gcttctgccaaggttattctgtatgtggaaggatcctatagctctgtgtatcttgaagaactttttagcgtgtatttagaacccatttgtagttttccgtttgctgttacgtgtagaataatgaaattgctttcattagatctctggtagagaataaatatcaaactaaaataagaaactacataattaaagataaaattattaatttcgcattaattagggacacggtatggatagctatgaccgcgatcaacataccatagacagtcaacatcccatggactaggcttcactagcccaaaatgatgcattattataaaatctccattagttggaaagggtacctaaatttgacctctactactctataaatacgtattgaataattcatgcaaaggattggaatttcttaactcataagcttgagaagagaatagagtgttcatattcattgtgatcctttatgttatttccagcctatctcataataatggagactcgttgactagggctcattaacgtcccaaccacacaaaaacttcgagtgttctcttcctatttcattcttttaaacgtatcttctttagctctaatattaaacaattcattttcaaaaatttcggtaaatatttttgtgctttcattgagagctaaaaaaaacagtgataccatccacgattacaattagtaattatggtactcaccca

SEQ ID NO: 83078 - DNA, 981 bp, Cannabis sativa
gtaacccgacgaggagtggaagtgaatcgagatcaaatagaagaatttcaagcagcaacacaatctcagaccgtaaaggatatacaaaaattaactggaaaatagtcacgcttcgccgcttcatctcaaagctttcagataagagtttaccattttatgacatgcttaagggaaaccgcaaattcaattgggatgataagtgccaacttgccctggaaacactgaagagatatctaactaccccaccaattttgtcgaaaccagagccgggagaaaccccatactcattaatgtatggaatgaaagcagtcatcccgacggaaatacatgtacccacttcaagaaccgagttaagtgacgaagaaaacactttcctactactgtagggcgtcgacaacgtagaagaaagaagggaactcgccttatctcatatgcagaaccattactcataatggcaagacaatacaacaaaaaggtcaagcctaggaacttcttctcgggggaatcgctcctcaaaaaagtctttcaaaatactgaggaatctcgggcaaaaaaattatgaactaactggaaaggcccatttcgtatagtaggttcgacgggaaaaggagcgtataaattagctaccatgggcgaaatcgagataacaaggagctagaatgcaaggtaccttaagaaattttatgtataataattataactagaactatgtattatcctgtatgaaaaaagagttacaaataatgaaaagggaggattaatccaaactgggtatatttagacctttcacaaaaggcaaaatatgaatgaactgcattcacaaaaataagacggcacctaatgaccaaagtacgatcaaagaacaagttgcctccacgcagtaagacgacacataaatgaagtaattcgcgtgtacttaaaaaattatacaaagtaaataaaaagagaaattaatagtaatgcataacaaagtaagcaaat

SEQ ID NO: 83079 - DNA, 965 bp, Cannabis sativa
agcatattattaataattataatcagtgattaattaaaattattcctacataaacttacataattattaattaactagtgagttgtactctctagaagtttttagccgccgcttgatttttttgcctgattagggctcgcaggccgtttttagtctttttgattttcaatctattttcaatttcattgaggttattgttatcctttttcctaagtgttcttttcttctcggtcgatcttctttctttagaggtgtgtctcgaaaatttaagttgctcattgacactgaattaattcttcactatagtgtcaatcatcgtgtagtgtgttatttttattttctatatatgatttattttttatgtttctttttattttcaatataatagtgttgatatgcaccacattgttatggtagtaggactctattcattcatgcatggatgagatttttgtcttgtttgtttttgatttattaggggaatgtcaattggcttaaaacatgtttgtgttagtagtatgactattttttccatgtttaaatttaggagattctttaatttttattggcctcatgctttatggtgcaattatttagtacgagttatctctatgcttcgtcggttggttatttatttttattctagattgaataatagggttgttattatccaatttttgttagaagatctttggcgaataggtgtgatttgtcaaatgtttatttgtattataaatctagccctcttcacgctttggttgatgcttcaacactctagcaagtagcagcctatttgtattttagttgaagatattattacggttttgattcttatattattttgtaaataatatggtgttcttattatctaatcttattaattctgctaatatattatcatgtaattttagataataatgtgatttgtctattaatgaaaatttcatttttttcaaaaccaataa

SEQ ID NO: 83080 - DNA, 707 bp, Cannabis sativa
tccattctcgctagcatttggctcagaggcaatgctaccactagaagttaatattaagacccatagacgtgagttctataatcaagtagaaaaccaagagcttctgaacttgtcctttagtttacttgaagaaagacgttatgagttgcaattaactaatgcattctatcaacatcgaatcataagatacttcaacaaaagagttaagagaagactctttaatgttgtagatttagtgctaagacaagtatttgtaaacacacgagaatcgtctgctggagtgtttaaccaaaaatgggaaggaccctacgttattgaagcagtagtgggagtcggggtttataaattagctcagctcaacgactcgctaataaagaactattgtaattgtgaacatttacgaccttattacaagtaaaattaaaacgtaaatgatgtatttatctttgtaagatataaattcttattatttataaagttaaagtttgttcaagtaattacaaagttttctttaaaattacttgaggggcatatatatgtgtatattagctggaattcatctagaaatatatattatattgcaaaccaatttcaaatttttttcacaaaggaaaggataattggttaaaattttctatggacaatagaaagtcatggaattgaaaaacctttccctaaaaagaaaaaaagtcaaaaagtagcagttg

SEQ ID NO: 83081 - DNA, 1231 bp, Cannabis sativa
aataataagttctacataggatatatatgctgttctttttatcattttttaccttcccaacctttaagatgatattattacttaacaataaaaactctcctttgtcctattgagtaaaaatatcgatgttgttggtttaataacactttgtcatatatacataataaaattgtctcacttaggataatattaatttgattatgttcttatcgatcaggtctgtagtaaaatttgatacatttgcacgcgtacgtacgtaaagtaaattattttaccgataatttagggttgttgcaaattaattttcaatttagaaaattgaccacaatagtgctcaaggtcactatttttattagtctgttaaataatctaataattactaccacaattaccccgtgttaaaataatatttgttaataaatattattaaaaaatttaaataattagaaattatatataaaacgtaaaaactataatattatttttattttctttttcttttattaaattttttaaaaaatattatctaagaaaataagaacaaaatcctattgttaatccccaaccccactcatgctcttcttcttcagagaacctaattaattttctagcaaaaaaaatataattacttaagaaaaactaattaagattcaaatttaactcgtcgtcattcacgaccgcatcatctctcacaaactcacactaccacaatatgagtgtttagatattatttttcaacccgttttataaaaagtgaaactaaaaggtgtgaaaatactcgctggtttaaaattgacattacagaatttaattataccctatgccgtcggttggggattggataattttgagggtttttgattaaccctacagcgtcgattattagagattaaccgacgccataggtgcactcattacacgacacgtgcacctatgcgtcggttaatctataataaccgacgccatagggttatataaaagagaacatgcctttgtcttccttacttcaccttcagcaagaacaatataaccacagatcagagaactcagaaaatacgacgaaaccctcacccacttttattaaaaatcgatatatctcttttattttaacagtatttttttttaaatcttccattttcaatatctaattacactaaaaaagtttagttttttctcctatttcactgtgctcgaacctattaaaaaaaggtggtggtataactccggccac

SEQ ID NO: 83082 - DNA, 686 bp, Cannabis sativa
ctttattgatgttgaataaaatagatttcattgaaattgagttttatttagggcataaaacctaacagccaggcccatgaactcgcatggccctctaaagatctatggactacaggctttagggctctcacaggtttgggcacagttgacaagtacatgcgtgcgccatctttatttaaccccttgttggacatagaggactttagatctttggagcgcgaccttgggccaaagaaacggaaagcctttaatggaatctctataggcccatgtcctaataaggctccttcatgcgaaatatcgactcaccattgccaaacctcatgtgatgctacatcgtcttcacaacttactgaacaaggagatctcaagaacaaaacctcccttactaccacatcaagtttttccccaggatcctcaattgcctctacttcaaaaaggaaaagaggaagaccatctacttccagcctcactaatcctgttaaaagcccctctgagtcgcatgagccctcgcctccgcctaggagaaggggacgcccttcaaagtcatcactcagctgtaactcgaattcatttgtcaaaaaaaaacatcaaagagtgaagcaagaaaaggcagagcgccatcagatcgaattgggagaatagggtctttgatctaaaagttgacttaaacaaccacttcgtaa

SEQ ID NO: 83083 - DNA, 1101 bp, Cannabis sativa
attacacaacttacccggtatttctccttacggatcacgggactactgactgtcacattaataattttagcttttagatctctcttaatcaactctaaaatggaatgcacaatataagacctatcatataaataagtatatatatttatttacaaattataaacacttgtaacaacaggagagataatataaaaaaattgttattccttgacccaatccaagttagccaaacttaaaactagaaaggccaagaagtacacctaagctaacctttaacactctgcacaaatatttgagagaaagttgcactgaaaaaataaatgacaatgactctcaagaacctaaaaacctactcacaaataggtcattaaattaaatttaaatggatattacaagttaacaactcaattctaattagcgaatggccattcactgcttgccaaagaataaacttatgtttaggcacattgagcctacaccaaaaaactttgggcacttgctcacgatgaagaacactatgagaaagcttactaaccttgaagttttcattactacctgctttgaaaacattatctagcgaaaacaatttcttatgattgactagcttcctctgataccaactgacatctactttcaaagaataagaccaataatcttgatcctttaaataaatattatgtacccatttgacctaaagaagatattgcttcatagaaaggtcccaaataaacttagctaaaacaaccttagtgatattgccaatatcacctagttcctttggtaaaaaaaccttctcccaatacgtaaaatacaatttactttgattgtccttagctacccaaagagattgacgacacaatttatcaacttcttttgccacactctgtggagtaaaagaaagtactcatccagaaaccccataagtataaaaggagttagttaggttctcgctacaaaaataaatgcggcgactagcccaaatatgtaaccttgttaggctatgagttcctccgagttcaaatccatttggggcttcgacgatactagacgagatgagatgaggtggtgtgtggttttcgacaagagagagagagagagaga

SEQ ID NO: 83084 - DNA, 961 bp, Cannabis sativa
atatttatatcaagtgggcatataaatcctgagataaattaaagtcatataatataatatatgtacatgtagatcgattcaattatatatgcatgtaatattgcgtagtggaaccttaatattataaatatatttattctatttaagatttttgtcactctaattatgatttatgtatattgtgcttgttgaatttcttcaatccattaaaaatggtctttaattatttacagtattgtaaattaatttttctaatagaataataatatacctatattttgtaaagcgatctgtgcgattttatctttttgaggctgattgtaattattctggggatgtgttacctatggtttatacatccttaattttgaatgatttgatttaataaaacttcatcattattcaaaaaccaaaaaaaaaaaaaaaaaattatcacatctatatcaatggtgtgattaattttaaaatattttttaatttaattttatgtaactattgtaatcatcaattgattttttttgaatgaatgaaactttatagatctacttaaaaaacccaaagacttacacaaattcaaataaattcggccaccaaactcttgtttcaattcaacaagagaaagagctaaatgcaagtttatgagcaatacagttcatagaacgagggcaaaacaaaaatttagaaacatgaatatttttgcacgtaaagtaaatttgcaataccaaacaatagttcaccacccaactcattcctactaagaagagtagccacaacttgacaatctgtttcgaaattctacattgacatacccaagtctaaaacataacaacacaccagccaaaaccaccattgcctcaaccacaactggagaaagcaaccccatcactggtactatcatagaagccacacacatgccagcatatggtccctaataaccgccccaagacccactctacactca

SEQ ID NO: 83085 - DNA, 504 bp, Cannabis sativa
tcatgttccccaagggaccacgattaacaccatcaaagacgaagacggtcattggaacacccaaaaaatagaagaatgctttcacccggatgatgttccattgatattaggaataacctctggttcgacaacccaaaatgatgatttgatttggcactacaccccggatggctgctataccgtgagtagtggatacaaggtgggcactaacaacgaacaaatagcaggtacgtcgaatgacaatgatgctaagaaatggtggcgtggtatatggaagtttgaggctcccccgaaggtgagaaatttcatttggagagtttgcaatggatggctcccggttaacatgaatttgagggcccggggaatggatgttaatcccctctgctgctggtgtaatcaggaagaagagaccatagaacacagtctttggtattgcacctcagctaaaaacatttggcggaatttcacgatatggccaaccataaaacacagccgaaacaaagc

SEQ ID NO: 83086 - DNA, 1170 bp, Cannabis sativa
atatatatatttatatgaaagatagatgaagaaaatatatatgaataaaaacacactcacaacattgagtggaaatcactaagggaactctctaggaaataacttgaacaaggtgttacacttttttctaaaaatttattttcttctatctctaagcactaagggaactctctaggaaataactttagaaattatcaagtattgtattttctagcaagttcttgttgatagaaaactgattatcacaaaatgaacactttaaacctctatatttatagtgtttgatgatcactctagaaaatcaaattctctcaccctcaaggttgttattagcactttaataagtgttcaataggataaaaatattagaaaagagagctgaaaaacatgcttaataaattcatgcacgctcatgaatgttattccaaaattggctctaggtaattaaaacaaccgtttctagaaaacttaattttgaattttgtaacctctctaagctacattaatttttaatattttgatacatcataatttgatatgtatgagtatttatcctcttccaacaactataaaatagcatttgatttctataacatatatacaatttacttacttaaattacacatttatatttgtgatccataagttacaaaatagttactattttgagtaaattacacattttatgtttatgatccaaaaaggttacaaaatagttactattttgaattcttatttatgttataataattagtttatattaaactataggttatacaatttattcaccaaatactataatatatcttattctcataataacatatatttatcataatttaatctacattaaattattaaataatataacaattcccactaaattaaaatttgtgacacactattgtaatatttatttaatcaataaaataaatattgtattaaaatataacattctcccactttgattgaataaatatatactaaatagaagtcttacttaggtgcattaagtaaaatatttttcgacttgaattttaccttagtataattaacacaaagtctgatgaaattttagttgccgtaacattgaaccactattgttttagtacaaaccggtgataacacacacacccttactaatgttcacttgagattgcatgtctcgct

SEQ ID NO: 83087 - DNA, 849 bp, Cannabis sativa
aaaatagaactaattcttgttatgtatatttatgttatttattattttatccatattaataattttatgataaataaatgatattttagtaaatttttataaacttacttttagaaaaatacttcgatgtgacccacttatatctatttactaaataatttaaaattttgcttctatttatttttctttaattcatttattttatttcctctaacttttctctactaccaaacatagagtagagttcaaaaaaactatcacatgccactaataaacatgaaaataattatagcacgcactcaaatgtcgaggagaaaatataaattaataagcatatacaaatttttattagtatcatcaaaattgttttacatagaaaccaaattaattatatatatataatgaaatgtgagttgttagggacaaaacctgaggtgaggaaaaatatgagtttgtataatgtatcaacttgtaatgtaaagtctatgactccaaatataattagccaacagttgttatttaaatgacatggataataaaaagacatattgatcatgtttttttttttcacttttaatatttatcctactccccacatgttgtatcctgaattcaaatataatatatatcatatatattgaaaataaaaaattagatatcataaattgaggccattattcactattacaaaaaaaaaaaatataaatattttagaaaaggtatgaaaatatttacatagtgataaatattaataattatgtggatgtccaaattttttatttattactattaattgtaatcaacattttctttttcttagtttcctattttcttagtttcttaatattt

SEQ ID NO: 83088 - DNA, 768 bp, Cannabis sativa
acaacaccactgagagaaaaaaaactggatctgataagatccatcataggggaaagccccttaacgagcaaacgaaactagccctagcgcccaattgaaactcgacaagactctcgatgacgacccaccccataatccataacccgaacaagccaaagaggaatcaaattttgaagagcataacacatggacgaaagagaaattgtagagaagtcattgtacttggactcaaagtaagaacaaaccccccgactatggcctcaagcaaagcctagaaaaaggtcgttgaatcttggttgaagagggagaaaagaaaaactagcggcaacgatggtgactagaacagtactagaaaaaaacctagtcgtaaagagaaaaccctaagtgaatctttgggtgatcagattaaattacaattaaatattcttattacttaatatgaaaaaaaaaaatcttaagtatgaataaatagtcatttacagtgagaaatttgcttttttcaaagaagagaaatttgcttttaatgaatataattaggcaaacattacaaataacccaaagtaacatcctcattgatgcctatcttcctttgatctaaaaatacctctactatttgaatcactttccttccctctatctcattttctttctctacctcttttcctccctcctccttcttctttccatagagcatttatcaagccacctgtctgaatccaccgttgccaccatcttaggattcatgttctaaaaataagtatttaatgg

SEQ ID NO: 83089 - DNA, 824 bp, Cannabis sativa
tctaatttaattttttatatagcactataattgtggaagttgatcctctaaaccaacctaaaactaactcatctacacttaactaacttatctaactttctgttatgttagttagttagttagtgctgatttcgcacctattttctggctgtgagttgtacccataaattggctagtctttccacttttgtacgaagagaattaagagagagtttagagagtgagtgcttatttttctaagctgtgaaaccatgttcttgaaggggtcaagaacagagggtgtactcaggtaggagttgagaaactgagactgtttctctggtgtttttctcgagtgttgcagagctgtgttgctcttgaattggtacttgtattactgctatcttattctccatgttaatgaaagaattggtgatgttttctcagctggagtatggccagggatcgaattgatctctaggaccggaaccaggataaatcttgctgtctccttctagttcaattctattttgttactttgtaatgttaactggtttatttatgtatgttattgttgtttaagttgttgatttaatgcaagttttagattgaattcttggtgttattgttgctgaattacaacaaaatcagagttgcgggttcaagatccaataaagggaagtaaagaatcaagattcaatcaagaatcatctgcaaccaatcatgacaagagtaacaagattcaaacttgataagttcaatgggacaggagattttggcctgtggagagaaagcttaaaaggaatacttgttcatcaaaaagttgccaaagctttgaaacccaa

SEQ ID NO: 83090 - DNA, 1338 bp, Cannabis sativa
tcaaaatttcttcaccacatggttgttatctaaacattaattggtaattattaagataaaaatgttggggaagagagttgggaacatgcttaataagttcatgaatatttataaacattatttcagaacttgctccaaacgaaggagtacaaccataaaataatttgttatcaaccataaaacaacagtttttaaaaaacccaatattaagttttgtaactcctctccgagttaaatctttctccaatgttccaatacccatttaaatgatataaatgagtattatagtggtttctaacaacaagaagcttatctcattaatttcttaatttcttaatttcttaataattcacttaattacatatataaccaaatgtgatttttaaattataaaattattttcaaattttataactacccttatatgttacagatcatgtgtatactatatattatatagtttaatcactaaatacattatatatatattaatctcatattgttaggaatagtgtgtaggtggtacactatatctctactgttgcaacagtacccaatcattaccaatgattagttatcatatttttacattccaaaatattctcttcttacaaaaggttgttatgcctcgttttctttaatgtcgtgtggcaatgcctaaatggctattttgtattcatcttttgctatataatgaaatcccagtactcagtctcattaagctgagaaatccaatttgtcctagttttctatctttgtattagaggaaataccgaatcccctccatgtccgctagacaatcttagtctcccttcactccaccaccgaccaatcaaaaccctggtgctcaaatgtcgattagcatagggaatgcctgctcctctcaaaacctgaccaacaattacactcaacctttcaataccctaaaccaaccattttccctcaagcttgatagaaacaacttcacactatggaaaacaatggtatcaactataatacatggccacagactcgacggattcgtgaatggtaccagaccatgtccccctgagtttgtacagactgaaactgctgctgaaggagaccaagggacttaagttacacttaattcggagtatgaacactggattatcagtgaccagctactcatgggctagatctacaactccatgacagagatgattgcaacggaggtcatgggttgtgccacctatgctgaactttggtgcgcattggagaatctctttggagcacattccagggcaaaatggacgaatatcgaacacttattcaaaccactcgcaaaggtatgactgtcggaaatttattttaccagga

SEQ ID NO: 83091 - DNA, 1583 bp, Cannabis sativa
aagagtttaacttgaaaagttatccccaaaaagttagtatttaagagttgtttgatatgtcgtattgtattgtattgtattatattgtattagattgtattgtattgcattagtattattatttcatacaatactatgtttggtattaacttgtattaaaaagttgtgcaaagttataatttattttaaataaactcgaccccaacgtacaccgacttcaagtcggggcttggtccgggtccgagttcggtttgggtctgggtcatgggtacaggtcctgatcctagttttgggttaggtcttgagttcgggttcgagtcctaggtctggtacggtctaggaccggggtttgggtcctaggtacaggtacgagtctgaatcgaagcccaggtctaggtttgaggtctgggtccgagtccgaggttcggggtccaaggtttaggtccagtctaggtctggggtctgggtccgaattcgggtcctaggtacgggtctgggtcgtgatcggggtcggggtctgaggtttggagttcgggtcaagactaggtcaagggtccgggttggggtccgagtccaaggtccgagtcgaattctgagtttaggtatgggtctgggtcagagattaagcttgacttcgtatcctttgtaaatattataatataagttaatacgagctatttgttatgtagtgaataatacaacttacattgtattaaattttttggtcgtaataattaatacaatacattattttatctaaacataatattatttattatttaatataatacgatctggcctagcaaatcagcttcatgtttattatttatctacttttatagttattatgaatttcttttttattttcttataaccatatttattatttttcaaaaaaagcaatatattaattctggatttctttttttggtaagaatatttattatagacctaatatcacttttttcttttttttggaacaatagactttttttttttttttttttgagtgattggaacaatagacttaatatcactgagctagtttatatatataataatatttatacaccaatatttatcaattaattaaatgtcaattgccaaccctccctctcttcaaaaaaatcaaataccaacacaacaacaaagtaaaaataataatattgaaaagagaattaaagaaaagaaataaaaaaaataattagttaaaagagtatattaatccgaccaaatcggacggcggagacttattatttgttaactaatttgacttgttttcatttatataatactatatttatttttagaaagtgagctgttttcatttatttacaaatgagtcctttaacttttacctttttactctgtttcatttaattcgatgaaacgctttgttctccattaatatttctcttcttcttattattattcttatttcagttttctcaaacgatcagcctaaggatcgatctgaatctctcatttcatttcaggtaaatatattttatacattcattgcaaactcttgaattttccctaaagttttattaaacacaaatgtgtatgagttaaggtaatta

SEQ ID NO: 83092 - DNA, 657 bp, Cannabis sativa
aaataatttccaacataactttcatgggaaggatcgtgagttgtgaccagtaagagtgaattgccattacccttgaggatggttccacaactagaggcacttcttcaatcctgccccatttccttgatttctatattcgaccttttgccactcaaggagaggatcaaattgttatctctaacatcttgactggcatcttcagtctcctttcccctatccaatctttagccttggccagcccattcaccacggatgaaattaagacaaccctgttcaacctttttggggataaagcccctggttttgatggtttaaatgcccatttctaccaaaaaaattggcataccataggacaggatctttgcatagccatcctcgatgtcctcaataatcactctgacatctccccagtcaatgaaacaatcttggtgttaattcctaagaagaagaactccaccactctttgcaatttcatacctattagcctatgctccaccgtgtataagattatatccaaggttttagccaacatggtgaaaactgttcttgactccataatctcttgtaattaaagtgcttttctctctgataggcttatctttgataatatcttcatttccaatgagcttattaatgccatacactataggaaaaaga

SEQ ID NO: 83093 - DNA, 974 bp, Cannabis sativa
tctcagcccatataatttaaaaataagaaatttttctaattaaatagaaaaattaatcataaaaactcaaaattttctaatactacccattcatggataatacccgttaagagtgcaccctaatgtgtaatatgtttatttatagaattgaattttgttattgcatattttatgagtgaaagaattttaacatttaacacctaataattcacaattacttaaattatcaatttatttggatcaaacattaaataacaatacattaatatgagatgatattgaagattttaaccaacattactaaaaagctgatttaaaagaaaacaagtacacattagcaagacatagcttaaatggctaatctaaaactacaataggttaattagaagtttagaatttgagacaggaaagactatgcctttttgccaattcaaagtagcaaagtaatgagagtaccctattgtcaaccaaaatagtctattaaaaatgaatgtggagatcaggtggaaagcttttcaataaaaaaagtaatgcgcaaacttgcttttaaatgaaaattgataattttttaaagaccaaattcaagtgtcggaaaggcaaattaaaagggttttgcatattgtggcatttgaaaaatgtatgagctataattgaagatcttgtactaaccacaatagtcaagattttggttatgatggcctattgacgtaagattactattacaccgacaaggataataaacatgctttatctcttaattatctccaaatcaatgtgttcatttcatcttttataattcaaaccagtggcacgcacaggcaccatatattaaatagaacactttttaatgggtaatattcattactcattgatggatattaaaaaaaagggaaaaaaacaggaatattctaaaaatggaaaaatattacaacaatactgtgggccggcccaatgaacatttgtacagcccaaaa

SEQ ID NO: 83094 - DNA, 868 bp, Cannabis sativa
aatggtgggcgtgaagtctccgtaaaacgtgatgctcagaaggcccgccctttatgaccttcgagccatctcctcagtgtaccatttacccgtcaagttcccaacgacgactggtatcggttgtctccttggaaaccaaaacttcccacgagtgctacaacacatcattgtcacttgccaattagacctcctctattgctatggcctcagagaggacaaacaagacctcatctgctgttataacactagaggggatgagcaaggggttattttagcaccaaaatatccttaccaaggggttattttagcaccaaaaggcttgttttcttgatctcaaaattaggatcaaggaaatgaaattgattctcaagttcttgtcggatgtctttgaagaaagtacaacccttggaatctctttaaaaacggaagctcttgctactgcaaattccctggtggttaggcagtcgagttagccttaataggattcactttctgttgaagtaggtcatactggaagaagagtgagccgctttaattaaatagaggtttaagtcctataaatataaaattcaagcttatacagggcctatataggaagagtttaatgatcagattcttttgtcggcacaacctctttgataagataaagctttagaggaacaagattgaggttaggaaaatggagtataattcatcaacgaaagcttgcgaatttgaatgcacaaacgaaagaggatgcaagcaaggcacatcaaagtatataacctatcggtatagaacaacagatatgagttttttgtgattatatatgatattttttttttcgcatatcaactgttaacttctgttgcttatcgttgttaataaa

SEQ ID NO: 83095 - DNA, 768 bp, Cannabis sativa
atttcttctcattttcatttttttagcagataaaaagtttcttagattctaagattttagaacttgttaaagatgttgattcttctaaaaaaaattaaagcttaaattaaaaaaacatcaagataatagtatgctctatgtttttttatggaaattagtttttatgttattatggttttatgtttgtcgacttctgttaattaatagtttttgataaaacttattttttatatattttgtaagattgataaagttgaatataaaaataaatctaagcttagaagcaatattaatattaatgttggtggtgatgataatactaatactggattatatttagagaataattttatggtagaaacattaattttgttcttataatattagagacattttttaaccttccacttttaagtgagtattagattaaatatttaacaactactatttaaaaattctaaaacctctttttttttttttttttgctaaataaaaaacttcatcattaagataaggggaaaatagaagaaaataccaacaccaattcatggctgcaacagtttgtgcaacctccccaacagtgagaaaattagaaatattaaaagaagttgctcaagcagcaatcatatgagcatctcaagcaacaatcctatgagcagctcaattattacaacaaactatcctagaaatccaaattcagaatggaaaacaaagatagaacttttttaaaaatttccaatctggaacacaatagttcaaaagttccga

SEQ ID NO: 83096 - DNA, 863 bp, Cannabis sativa
atcaaattttcatccccaaatggagaactgattagagctcgttacaaggtaatattatatataatggaaatttgatgaatttcatcatggctcatgagatctctctctctatatatgatatatttttgtgtaaatttggtactaacagtttgtatgatcttttgtcatttttccaggttgtgattccagtaatcaagataaaaggagtcaatgaaagtgagaatgtaaagaaaccatcacaaaagtacatagagatagttacagttgataactttgacttctggttcatgggattcttcaatcaccagaaagctttcaagtgtcttcaacaggtagtttctcaagcttagagaaactacttgcaaaaccccaccaaaggatttattagtgctgtagagattgaaaagcaaaattgtctatttaattcagttttgcttaaaactcacatgtatttatgtgaagagctagctagtaagggctcaatacggttacaaaaattgtacaaatttttgtttatgaggaaaaaaaatctctttttcattcttctatacttgcttactgtacgaaagaggctagacaccttgtcaatacttcctcttaactatttaaagtttaggtttgatgaatttgaaatactctacattgattctctaaaaaagaaaaagaaagaaagaaagtagtctataccactccaatatgccaagtcaaattcaaagttctacttgacaagattctatatctacacattaatatctagattaatgtatgctcttataaatggctcaatgttcttacatgcaaaattttccaatctaatgcaacttgtgttattaataatgattaaaatacaatcatcacaaaaa

SEQ ID NO: 83097 - DNA, 664 bp, Cannabis sativa
agagagagagagagagaagatgaagtgaattgaatcaaaggattttattataaggtagaataataggtgttacatttcagttgcaggctaaagtatagctgacagttgaaaactgacagctgtaatgtgaaccccatttcatttttaattcaatatcagttgaaaaccgatgctgattcttaatgacccttaaaattgaaaggtattcttagctataggcatcagttttaaacactaacttaattttattagcaacggtcctcgaaaaaatcaatttgaggaccgacgaaaataatactttttgtagtagaggtaagttgtgaaataagagttgaagttggcattgttaagagtgttaggtcctgttcttctaccttatttggctgccacctcaccttaattcctacattagtatgatattgattgctttggtcctaagccctcatggttttatttttagacaccttcccaaaaggccttatactaatggagtaggtggaacactaacattctaggcaactcttagctattcttctgatatggaccttagtttgataccccaataattctcccttcaaactaagaaccatgtacttgttgttgggttttgtgccctaaataaaacccatttcaatataatcagatttacttattaataaagatc

SEQ ID NO: 83098 - DNA, 546 bp, Cannabis sativa
tagaaaagtattagtttagggaaaaaaattatcccctaatgcatgcatagaaattcaaatttcccttagcatatcaactaaaaacgttattgccttgaatgtctataatatgcttttggatacatacacgctacatgcttcaatagggaaattgaaaaaatatgcatcaaatatcttaatattttatctctaaacgaatacatatcaccattaaaaacatatgaccactttatctaaaacctaaaaatatccctctcataactcaaccccatctctctctcttcgtctatctctaaccacacacgacccaaaaccccctcaccactactcacaacgccggccccttaccactgtccacaatgccggcttcctccaaatcaaaaccgagcacttctctctcaccgcctaccgcctacaccgccgaccctctttttttgtgtgatatatcatttggagtattgatacgtatttattttaaggttataacgtataatgtatgtgtttatgtgtgcaccgtgagttttgttagatttaagttcgatttta

SEQ ID NO: 83099 - DNA, 635 bp, Cannabis sativa
gtaattgggtgtttgatcagtttttctagtttatttgaaatctattttctctcctatttgacacttacggttccctcaacttctggtaagagtcgcaacgatcccatgcaccttctgtccacttcatactttccatattttgcaaggacatatctgattcaattaaaatgaatgtaactgttattatttttataagtagatgataatcacaaatacaaatgcaccatatacttaccctggatctaatgtactactgaaaacaaacttgtaaaacccaaaaagtttaaggggcatcgcatccttagtcttgaacggcccaataaccgctctgcctaacttaataaattcctcataagccttctcattaaagtcatcttcaattaaagccacattttcagtttgtgtcttcttcactttcacgagggaattgcatttgttctgaaaagatgcaacttcaagtatatcaaagtgctcatcctcaatgttcttctctccataacattctttaaaatctacattttcctccataacttcatttttaactaattttgtagcagataacaaaggtgttgatactgattccaccacattctcctcgaaatgccctacagtaggtgtcttcaacatggaatcat

SEQ ID NO: 83100 - DNA, 1335 bp, Cannabis sativa
aagcaaggaatgaaatctagaaataatacgagggtagaattagatatgttccaagagtgaaaataaacaaaagaaaagtctagtaaatgactatacttgtaatattaaagtcgagactgagatttgtcactctctttaaggggaatagaggtgtagaactagtagacctagatgtcgtaagtgtacttcacagaactgactgggcaaaccaagcttttggaatgcttctctagcctttagtagatgttatttgtaatatctgtatcgaatataaattgtactaagagcactcatattagtgtagctaaaatcgctcatatttaaattgttagctaaaaaatgataaaataatgctatatcaagtgagctaaatccttcttcattttagctcaattcattcttagagcacttctaacaccttctatactctattatttagaaaacatcttcaaaactctactttttctattttacaacacttttacattacaccatacattagtttctttaaaatacatcacaatttttttttttaatattttaatatattttattcacttcaaatgtataataataatatatacacatatccccatgcaaaaataattattaaaactcaaaacaattaataaagtatgtttagagcaatgaataatattctataaatgtagagcataaatattaaattttaaagaaactttaaaatgaaaaatgagtttagaccatctgttgtagctatttttagtatagctaatacaaattaatcattaataaaaaattgataattaattaaaataccaagaaaatcgatggcttttcgatgattttgtcttgtgtgattaattttgctatattttgtactggaataatattttggatagtttatcgatggtatatcgatagtaggctgatatttattttctcttggtattttaattgattagcgatggtttatcgatagtaggctgacattttttttcttggtattttactttattattgatggtttatcaacagtatatcgatgaaattttgatgattctattttgtgtgattaattttgttttttttcctatattttgccctggaataaaattgtattgatataccagcaaaaaattattaaaaattatcagccttagctttggtacaatataatcactgaaataatattgatataccatcgaaaaagtattagaaatattcatcccttaccttcttaccataattattgagaatatatggatatgtaatcaaaaaaacatcaataatttgttaaaaaattcagtttggcgagaaaaccaaatcttgccattttaaagtaaaaaataagca

SEQ ID NO: 83101 - DNA, 562 bp, Cannabis sativa
  modified_base (43)..(45): a, c, t, g, unknown or other
attgatgttgaataaaatagattacattgaaattgagttttannnagggcataaaacccaacaggtggtccctggggtccgtcctatctttgtaaaattacatttgttgcattctaaagcgctcaagcagtggtgcatctgtgatacatttcacacatggttttgtgtcttcttcctcaaaatctgacacagtgccattttcatttctagagatcttctctgtgagcttcatcaactcttcgactttgcattccaaccgttgagttttgtcacttggagattcccttctgtgaacacgatcattaatatgatttcttaaatcgttctcacagggtttggctttcttcgttcttactttctctctcttctcatttgatcttctttgaagatcatttgtggaaagactttcactatttccatctaagactagatacacttcatcaaaatcattgctttgactactggagtttttgttacgatgcttgtccttccgagaagtagactttttgcctctggcattagtcttatctttctatgcaactctgcctctagaattagtctg

SEQ ID NO: 83102 - DNA, 672 bp, Cannabis sativa
  modified_base (34)..(62): a, c, t, g, unknown or other
tgtatttttttctaatatttatttcaatctattnnnnnnnnnnnnnnnnnnnnnnnnnnnnnaaatttccaatttagaataaaatcctaaatataaattttaatttaatatttataaaataatattagatggttttgctctgctagggctcggacaaggttttgacttttccctcggcgatgaagggcttccggtgtaccagactggtgtgtattcgcatgcaatggaggaattgctgtccaaaaccactcaacttgatgtctcggatgaagaagaatgtgaggttgaccagagttcatcttctacgattgctaaaaacaatcttagggggagactttgttttaatgtggaccatagcagggttttctcaagaaagtactgggaagaatatggaggcttaaggaggcagattggaacataaagattcaggaaaaatatgattcaggtatgttcctatcgttttgttttgcttctgaacaaacccagtcaagaattttagctaagatgtcgtggtatttatctaatgggttattgattttgggaaagatggtgaatactaatgaatcttggaagaacgatcttacagcgttccctatttggggtagagctctgggggtaccaatagattatcttactgaaaagaacacattgagattggcttctatggcaggg

SEQ ID NO: 83103 - DNA, 1464 bp, Cannabis sativa
  modified_base (1391)..(1398): a, c, t, g, unknown or other
aatatttgactaatctattatattaagcctttataatactattatgacgataaaaatataacatttatttttttatttctttattttaaataaaattacatataaactttttaacttataataaatcataataaaatgaataataaatatttattatgtttatttttgtgaaaaagttaaaatatactatttaattaattttataaaatagcttatttaatttttaataaacatttgatattataaacaataaaaaatatatattggtaaaaaaaatttaaatttgttatagataatatttatactaatcatttgcatatttttttcttcttaattttaaacaaagatgtatataaattattagtacattattatttatttattttataaactatattgttaaaataaacatatatttataataaattatactaaaacagataataaatatttataatataataaaaaaaaatagtatatctattatattatattatttattatttatttaattttatttaaaacatgtttatttattttcaaaaaataatttatatttataataaatcgtatattttataataaatacaatataaaataaacataaattcataataaatcacactaaaatagatcataaatatttatattataataaaaaaaatttagtatttttattgcataaacttgttcatgttttttttttttctaataaacatgttatattcattctaaaacattgctatagtaaaccactatacattattatattttaaattttaatgggtaaatacaattttggatcctgtattttgtaaaagttactaattagactctctattttgttaaatgacaaaatggaccctgtcatttaaaaaaaacaaagttccaatcggtaacttttgtaaaacacaagttctaaattggtattaataatttaaacattgacggtaatattcttgtaaataaaattaaatattttataagtataataattttataataatataaatatttatatttttaaattttaagtgttaacattttagtgctttaattgaaattgaaaataatcgacatattctttaataatgaacataaattgatattatttattaaacatacataatctgtataattttttcagttaattcttagtaaatataattatataatataataatcacaatataaacataattgtttataattaaaattttagtatttattttttagtaatttaattagaaattaaaataattatattttattataataaacatacatgcacctggtttgtaattttatttgtatatttttattttaaaaagtgtttaattttaacaaacatgttatagttacttatttgaccttctgttttgttaaatgannnnnnnnaccttgtattttctaaaattgtataagtagaaccctaaactaattttttgtcaaaataaaatctaa

SEQ ID NO: 83104 - DNA, 1319 bp, Cannabis sativa
aaccactccggcacgcccacttgatgatggattttaatgaataaaatttatattattcttatttcgctcctcaattgatattatagcttctacaaattatttctattttattttattttttgaaaaggaaaattatttttcattatcaaaactgacaattattaaacaataataagaacaaatagatggtaaaaaaaaatctggatattattttaaatagtcaaagtggttttgttaaaggtaaaaacattgtgtacaatattataatttgtcaagacataataaaaggatatgccatagaaggagccaaattagctttgtgagccaaataatatgttcaacgaatcgggaaatgtttcttgagagttgagatgatttgtgtatcctaaaaaagtagggtttttttgttttgagtgtagcgtaatggtttttacaatcatatattagcttaatagcttaaaggtcctggattcgaactcatgacctcttccattttcccatccctccctcaccactaagctagccttagtggctaaaaaagtagggggtttggagttcaagatatggctctttggaatctttgtgccattgggaagcatgtttgggtcttaaacacttcaatgtataacactctttaaatataatattgatgatctcacacattattatttaatatatatcctaatttttacctacaataattttttaacttcaatttttttattaaaaaagtaataaatagcatcaatgctacaatatagaatctatgcaaatttttcaaatgacattctcttctatctaatggtatagcatcttaatattttgccacataatatgtccacctcaccaagtatcctctaaagttttaccattggagatgctcttagaggataatcttgggtaaaataggtgaatgtggtgtgtattagggctgcacatttagacccgcaaacccgaaaaatccgaagacccgacccgccccgacgccaaaaaaaccggccaactgagaacccgtatagttgggtcgggttgaacctgaaaatgactgtaacgggtgtcgggttcgggtcacatattagttaagttcggtggtcgagttagaacccgtaacccgaaaatattaaaaattaaaaactgttttttcttttattaaaaaattaatacatttacttacctgtcttgcctattcgtattccactattgactattctgtaaaactaaattacatttaaatttttaatcattttcaaatttcaatgaattaataaatgaatcaatcaatgaataagctattgatattctaaattctaatctattta

SEQ ID NO: 83105 - DNA, 764 bp, Cannabis sativa
atgttgaaaaggtacctatgtcctgactcaagtagtcttactagttgaggcttctttggtaagtgaagtttgctgaataatgccagtttttaccatggactcctctagtatcttacttaaggaattcttccatagagtcacaattcctttctcactggctataagcacagtaacgaattgacaatgattaccccaacacaaatcacattaattcagaattcatatttgaaggagtagtcgtagattagtcacacaattttgtttgagcctcataagactttcagttactataattattactagggtaatttctcattagggtagtaatgacatagcatagtaatcacactctattataaaatataatgtgtgtttgaatatgaggtgagaattacatataaattcttaatcttttatttgataaaaatagttagtaattacacaaaacaaaaagataataatttttagtagtttcatatttaaattgaaagttttagtagttagtaattacacaaaaagataataatttttagtagttcatatttaagctggaaagtgtaattgatatatatttcaattacttttcaattagacagttaaaatataattacagacaaacaaacaaaatattttgtaattgatatctctattacttccaaaactgtgcaattctatttcgcttttggctttcccaatgcgcccttaaatattttgtatagaatatattggtaatctctttagaaacatttgtatgattaactctt

SEQ ID NO: 83106 - DNA, 798 bp, Cannabis sativa
cacctacaactaatacaacaactgctcaaactttgcatatgattgctctgactatctttcctctagaaacaatgtttgcaatgcccacagtttacagaccaagtacttctgtgtagccagctacacagacaagtttctccagctttagagcggcacaaataggatacagtgtagttctcagacaaataaactagcaaacagaaattctagagtcaaatgtgagtcattcacagagcaaaaaaaaaaaaaattccaaagctctaagctaaaattaatctgcaaataaaggaaaaacactagaatctaggtttccgagtatactagcctaattgatacttgtgagaatgtttgcaaggccacttgttttatggttcattacaaaagacctccacctatgtacgaaggtggtaaacaaaaaaggaaccaaaacaaaaggtgtgaataccacagtcatattggacatataatgaatgaatgtgactaattaagggataaaattgaaggattagtcacgaacatccatttatccaattgggtgaggatactagttatctatcccgaataagcagtagcatatggatagcctggagccataaattctcctcagggagtaggtctccaacaagctcctagaatacaagctccagctatacataccccgtagagggtatagaatgctccagtagcaagacctattgttgctcctaaacctggaaatccatacccacctggaagcccacatattgtcggatgccccagaaatgcacaaaaaggtaactgaatgagtttcttatccgt

SEQ ID NO: 83107 - DNA, 925 bp, Cannabis sativa
cacgtaacgatcacctagtatatatatatatatatatatatgaatatattggataatatatattattcatatttataatataaatgtttttgttagagcttcttaatttttttctttagctgatgatggaggttctattgtaactagtaatatttaataatattaattaatttgaccaaaatcgagcgtaggtttaacatttttacaaaataatatacaaaattaaaatatttttttcaaacatataaatgaatccaaataaacaatggtataaaataccaggttcaaaatggtttataaatcttttataaaaaaaaaaattagaatatatttatagatacctttgagaggactttcccatccatagagcatcatgagtttgatcagttgcttctatataaactctatgttctaagtgatccaatcgagccatccatgaaagacttaattcatgctcaatctacacatattgttgttattattgtaattaattaattaatcacatcaatcgattgtttacaattatcatttgcttatgtatttacttatttggtagtctgtattttaattaaaaataattacactacaaaactatttatggctcgaggtacggatatacataattatcaaataatgacaaagtttattttgaaacaaatatatgagctagtattaattaccagtttgttaaagggatttgtatgtcgagctcctactgaaatagatttctcaagtaattttcttgaaaatgttcttagttcatcaagctcatgttcaccatgaaaagcaaaatcagtagctctgtaaagattcaacgttgtaaccaagaaggattcataatttgattctatacaattttttattttctcattcttcatgaaccaacaaatgttacctacacacataaaattaatattggatatat

SEQ ID NO: 83108 - DNA, 711 bp, Cannabis sativa
tgaaaattattttcaaaaaataagtcaaacacctttaattgttttcaaaaaataattttttattataaaaataaattataatttttttaattatgatgccacaaatatattaaattattccagataacaagatcgtaaaagagatgcataccaaaatctctacaaattaataaaataattaatctactaattaagctattgaggataaaaataaatattaaagatttcttccaaatttgacttcttccttcgcacaccaagcgtcatgagtaatgctttgctcggtaataattaaagttatattaatatttttgtgaaataataaaattatcgagataggaatataggatgatgagtgcattccaatctcatatgctctcattacttgtgtagcatcatctaattatataaattttatgaatattgtttggtagttccttgttgaagttatcattttttttatttatttttaagtagggaatagatccgcgcttcgcgcggttttaataatttttttaaaattatatattttaaaatttttcttaattattaataaaattaaatctaatacttttcattttttttaattattttattaatatggataacatacactaattaatgtatatagaaactaattatgaaataacaaaattataaataattaagaaaaatgatctaatgtataaaaaaatgtaaaattaattttta

SEQ ID NO: 83109 - DNA, 1027 bp, Cannabis sativa
aatgcgtttagctgtcccaatctttgatgtctgagaatggtcctgaatgtaacaatagttagctgtgaaatgcatagaatgattgctatgttgtagtaatgcatgaactgataacaagttgtaatgaaactgtggcacaaacaagacattgtgtaaagtaatgcagctgttaatattgacagtgtcaatatgttcaatttgaacttttgtgccattagggagagtggcgtatttgtttatggtgttatgagtaatggcagaaaaacaagatttgttacagcaaacatgatgtgttgtcccactatctatcatccaagaaaagggggaagtaatacctgaaaaatggttcacgacagcattatcattcgatgttgaagcatctgttgaaggttgaagtcgttgtatcaacatggagatgagttgttgacattgtgctgaggtgagttgagagggattgatacccagtatgttggtagaaacttgagatgtttgggggaaagttttgcttgtggagacaagatcaggtttgcgagtagtagtgttgtcattggatttttgatttccataaccaggtaaaaatcctatgagaaagtagcatttatctttgtaatgacctggtttttgacaattagtgcaatggggacgaggccttttatttttagaggctgcattagtagcaggtgtggaatcgggtaaggtagattgggtgttggttgcaggagcaacatgtggaagggttctttggcgttctttatgaatgaccatggaaaaaaactttgttaagagagggacaagggttaagaagaagaatctgatcacagattgcatgataaaattcattgagaccctttaaaaattgaagaacctgatcatgattcaggtggtcttgggtatgaattgcagcaacacaagtacaaggtattcttggccttaattggttaatttcatcccacatagcagtaagtttagtgaagtaggcactcactgaatcatctccttgataaagataggtcaaggtttcattcaa

SEQ ID NO: 83110 - DNA, 537 bp, Cannabis sativa
ttgtcattatatatttaatattaaaaaataaaataaaaagtacaattttaatatctcaaccaaaaaaaaacaggtagagttgacgttattgagttttcacgcgattgaattgataggccacgtcagcacacgataacgaaacagaaaaggaatatctccaacgtgataccgaagggctatcgtctccctttctcgacgattccagaagggtctatcgtctccttccctcgtgacgacggtgactgtgacgacagtggtgcaacaacggtgagggcagcaatggtgcgtcgacgatgaaggtgcgacgggctgggtttctctcttgcgtatatgaaggcagggtttctctcttgcgtataagaaggctgggtttcaccacatctctctatggctcatggtgatggcgggcattgctcgtggttgacaatggacggacaggcatctcctctgcgtgctgttgacgaccgacagagacccttggtctatgcacccttgcaatcggattggtttctggaaaagaaaatctttgtattaggg

SEQ ID NO: 83111 - DNA, 1193 bp, Cannabis sativa
tagtcgtattattatactcttttaattaatcttaaaacacgtaccaaaatatttttttttcatttttttcatggtaggtgttcattaatgttatttatagtgctgaaaatatatttgaagtttttttgaatgtttcaagaatcttgttttcggtattgtaaattattcaaaatttcttaaaaaatactgtaattataacgaataatgttatgaaaaaaaaaatatactctaatagcataattgttagaaatggtagactagagagtagagactagagtatgtatcatcttataacctatagatagatagggaagcatgactttaaatgtatcttgtgtaaaaaatacatagtaatatacaatatacatatacatatatattggtagtaacaaatttaattcgcttgtgaaaaaagttaggtatttataactatatacacatcatataatatcatttatataccaaacatttcatggaattaataattataattgattatggttaataatataatgtcttcatgtgaaaaacgtgcagcagccagccacaattcatgacttttctttttctaaatttgtatcactttattcgttcttttttctttttaatgggttggtgtaaaagtaacttccacatattaattaggatttttgattgctaaatttaataagaaatgtgaaatgatattagtgatgtttaatattttattacgtgttaaattgttaatattattattgttacaattaaatattaagtgttcaatagcaagtagggatgtacaaaagtttcataggactggagacccgtgagaatctgcctctaatggggcagagaatctctaacttggcgggaaatagggtgggtacggggttgattttcatttctagaattggggacgcgacataatcaagtgtggtactccctaccccaattaagccttgaatatatatagtattgataaatgataattattatgattctatatatatttgactcaagttttatattttaattaatgcagtaatttaattttactaacaattaagctcattaatctataatttagttaatgcccctaattaatttagttggtttctatgtacatataagaaactaaatatatgtaaaattatagaacattgctattaggtactagtggtgcctataactttttttgacatgtcgcgttgcga

SEQ ID NO: 83112 - DNA, 542 bp, Cannabis sativa
ttgtaacaaaactcactgacacttagttcaaaatgtaagagagaactgtacaagaagggagttgttgagatagaagccaaaacctgaagaaatttctctggttcagtgagcttgattatgaatatgacgacgcatttgttgagtgactcttttagcttcacagtttgttgtagaggcagttttaatcaatcaatcaaacgtggccataaaaattgaatgtaagtgatactaatgagtataagaaatagtttaaggctaatgcgttttcttgttctcggcggttggttttggttgtagataaggctatagttgtatgaaattattctccctttccgatataacactcgctctcctcacgtggcacagtatactgaaaattctagttatttatttatatattttgaaaaatctattatatattagacaatataatgtagaaattatggggaaaatttgaaaagttaacttatataaataaataatagttttgagttgtggttttttttttaagttatatgaattttttgtgttatatttatgta

SEQ ID NO: 83113 - DNA, 1035 bp, Cannabis sativa
cttagaagtctagtccaaattattcagtcaataatatatatatatatatatatataaatatatatattgggttctttttgtaacaacttattaagtttttttttatttctaatattttagaggtaaatttgcatgtgaattgtatcagcacttgagataggaaactggaacattgaaaatttaaaagatatggaacaatttcaagcaatatattacaggttgcaagttggccaacgaaccatacacctaagttcaaattatgaatgtaataacaaaggttgttatcattagtgtatgatttcatatttaagattattcttatctttttttaatatatatatatggagggaattatatataatcactaaatatattcaaataatatatattcgtatttggtatgtaattgtttaatttataaatactttttgttttatttatatattttatagatgaacatctactttgttgaaacaatcttaattcaagatttgtttctattctcttattaattctctcatattttctaaaaatagataaaaacagtacaaaaatcctcggcaaataatacttgataggttcagccctttagaaagaaggaggagcttcttctaatgtaattttttagtgagagaaagtgagatgtgaaaagtaaaaaaaaaaagcttttcttccaaaagtacctatatagtacatgtgggaccctttcttcacttacttcacctacacattaaaaaaaaaactaaagcagtgcaaataagatcagacagtcaaggcaaagtgttttaaaagattaaaaatgtagcaagttttattcagcaaaggctacaacagtgccgactgcaccaacatagttggtaaagtccatgttcgtacaaacatctacatagggacttaggggggaaatgttatcccgatttttgacttcttgatgtggcatgcgtacatgaacaaaatcagtgccacgtggcagtacaactcaccaataagaaggccaagccaacacctaagcaaacggagaccccgacactcaaa

SEQ ID NO: 83114 - DNA, 1008 bp, Cannabis sativa
aagatcggtgaaggagttccaaataacacctaagacagatgttttcgcatttggtgtggtactagcagagctaatcacagggcaacgtgcactaatccgtaacaatagagagcctaacaagatgaaatctttgattacagtagtaagttatgaaagaaataaaatcattttcaagattggttttttttttttatgtgtttttgatttgcaccatctgatcaggttaagacaatattccaagatgaagatccagagtcagctttagaagctgaaatagatggaaatcttcgtggcagctacccttttgaggaaatcttcaaagttaatcattttgacactaaaaatctcatttttaacatatcaaagttaatcccaactcatttatataaacttgttgtgcagatgggtgaaattgcagagtcttgcttagaagaagaagcagtagacagaccagagatgagggagattgtggtgaagctgtctcaaatcatgatgtcatcaacagagtgggaagcatcacttggagggaatagccaggtctttagtggggtatttactggcagatgaagacatgtatgatacattgtatacatcaaaatactattaatattatgccacctctctctaattgtaagctacttcttctaaatttaatgcttagttttctgagttgatttagaattttacaaagtcaatctcaaatatatctgtaaaaacaaaaataaagaacttgtatataatattttatgtgattaaacatttgaatttctagtaatgagtggaggcatgcatgagtttctaattctgtacaaagatttgttttcaaaacttggaagatttggagcataactatctaatgttttgggtttctaattgacccgaacactagcacctaacactactgcagcgtggcgtttacaattagttaacaatattcttaacaaattattaaattaaattacataaaatttaatatttaatttggcgtaaaaaatattaagcaccaat

SEQ ID NO: 83115 - DNA, 743 bp, Cannabis sativa
ctttaacttcgaccaagacattggtcccctttggagagagagacagagaaatattcattcttaattattattatgaaactccatctccatggatgaagatgatatcatgactgagcagtttttctgcattatgatcaagtacttcttactacatatataatatatttatatatatatttatagtagtgaagacataattcagagacaagtgagctcagcgacttcattgttgttttgggaagaaaatcagggacagatagtgcatggagtggggttagggaatgtgaagtaccaatttgttttttaaaaactataataaaacttgcaattgtgctttttaattccatatgaagacaagggaataggtaaagaaacaataatttcctactcatttgaggtattgttataatgtattttcaattgagtaatagtactagttgtttgcatgtggtagatggtcaacttctcttttgcatggcccacaatactatatatgatttgttttgattagctttgctttcctttgcttttgactcctttattcagctccagccccacccaagagggaccaacaaacactactatagtctccttatattggatttgtggggtgcattatatttttcattggctataaatttgtacatatttttaagtcacgggtggaattaggaacacacacagaagcaaaaattaatatgtgtgtgagagagattaatagtaatatcaagtagctagctaaa

SEQ ID NO: 83116 - DNA, 663 bp, Cannabis sativa
tcagagtttgatccctcatgccaacattaggggagaagtacaaagaggatttttggaagttcacttttttcccagtagccctctcatacacatcaaggacctctttaatggtgttgcaggaatggatagaggccctacagaaaaggaaggtgtcgtcaatgaagagaaggtgggatatagcaggggcacgcctggcgactttgaattcagtaagggctctgcttctttcctgctgctgaagaagagaagagaaaccctcggcacaaagcaggaagaggtaggggagagagggtctccttgacaaataccccaagtagggataacatttccagagatttgtcgtttacattaaattgaaaagtggtcgtggagatacaagcagagacaagatgggtgaaccgagaagagaaatcaaatttacggaggatggctaaaatgaaagaccactccactctatcaaaagctttggccatgtcaagcttaaccgccatccaacccatcctcccacgagacttaagctttatggagtgcgcaacttcctgggcaataataatattgtccgaaataagtctacctggaaggaaagcggtttggttgggagagatcaaattgttaaggacaagtttgagcctattagcgatagttttcgagatgattttataa

SEQ ID NO: 83117 - DNA, 803 bp, Cannabis sativa
aagcaacgtgcgaaacaattttggctcaaggagggggatcaaaatagtcgatactttcatgtggccgctagctcaaggaaacggaataatcaaatcactgaactgagagataatcacggtaattgtgttaattgggataatgggcttagtgatgtggtggtgaattatttttcagaacttttctctacatctggggctcactgtgatgaagttatacaaggtgtaacagccacggttacaaggcaagttaatgaagaattgagacagagtgtttcggttgaagaggttaaagctgcagtgtttcaaatgcatccagacaaaagcccagggccagatggaatgacaccagccttctttcaaaagagttggtctattatttcacaggatgtggttggcgttgtccaacggttttttgaatcgggagtgttcgaagaaggatgtggggatgctaatgttgtcttaattcctaagaaaaagtctccggagttcatgtcggattttcggcctattgctctttgtaacgtcatctacaagataattacaaaggttatggcaaaccgaatgaagggctttatggattcaatagtctcgggatatcaaagtgcttttatcccagggcgtttgattcatgataatgttatggtttcgtttgaaatacttcattatcttaaaaggaagagacaaggaaaggtggggtacatggcactcaagcttgatatgagcaaagcatatgaccgcattgagtggaagttcttggaggctatgttgttgaagttgggatttgaaccgttctgggtgagact

SEQ ID NO: 83118 - DNA, 577 bp, Cannabis sativa
gttgaatgcttccattgataaagttagctatcaatgccatcatcacatgttgtgttgggggccttttttgagcattggcttggtagttcatgctttgattattctccttttgtcttctccgacgacgagaggtggatgttctcttatgatggtggacaccttgttaccatttgagtaaactccattttcatggagatgtggcgaacgtctatgcatggtggttggttaatgctgaaggaaagacataactatgaatttttttcccactgacggcgcaaaattgttgacggttagaactcgtcaacaaaactttagctagaaaatcaaagacttaaagaaaaatgaaagtaaaactcaaaaaattaagaacaagttttagagctttaatggagaaggaaaatattgtattgcttttatgtatccctcttcaatgaaagataaggatatttatagagagctctaatggctccaaaatataagttgattctttggtggtcattaaatgttaggagaaggacatttcaggctacaggttgcaactggaggaagtggtctcgtaacctgtactattgtcggg

SEQ ID NO: 83119 - DNA, 733 bp, Cannabis sativa
aaaaaaaaaaaaaaactcaaagattaataaacaaaaacaaatcaaatgtgtgatgccaataaaacaaatcatattaaaatatttaaaaaacgtgtcaagtaaaaaaaaatgcgccattttgtggaaaagtggcatagtgtatatctagtcccaactcattttttttttttcctaattttgaatgtatagaaaaactcattttaggatatcatataatacaacatttcatatgcttttttataattaagaataaataaaatgcagcctcaccaaaataactttgcaaattattgtacttgtaaattttctgaatctcaaattatttcttatatacattagaaattaaccaataactaaaaacaatattgttattaggtacgtcataaatagttaacaattttctatatcatttattaaattaaaatgtgacgcaaaccatcttaatatttctcaattaaaaagcaaaacaaactctcttatttggatgtataaataaagtaacaaatgaacatgattaataatgtcaaacccacaaatagtagtgacagctgtaactaatataagaagcttcataataactctaaacaaacaccattgagaaagtactcatatcatccctataatatctctaaacagactcaacttcagtaaaaatatgttcaattcaaactaatacaaaagctaaagttagacttagaagatagactaaaagataaacaaagatagactttat

SEQ ID NO: 83120 - DNA, 1074 bp, Cannabis sativa
tgacatactctgttattatgttgacccccggtgtctgttattatctcatagcattagtagatacatcgtaaaaagacagtaggaattacatagattgtgaaatattctgggctttgcagggaagagtagaaatgaaagaaaatagcatggttgttagaatattttgtatacatataatagttacatcgaatgttaacaaaacctacttttcgtaaactacaattagtaaacaaccagacttggatagtatagctaaagcaaaagctaatcatgggattgaaagatattaaaattttgacttgcctggtttgttgtagcagttataatgctgattgggagagtaaaaatgaaggccacagcagcagcaaagaggagtccccaccatggcatctgaacctggtcattcaaaaaaatgcagagtgctagggaaattaatagtgtcacgccaagcaagaagtaaaaccaccaggaaggtatgtctttgtatcttctcattagttttgtatggatgtcctccttgcctttgtatgaagcactgtaccgctgatagatctccctgtgcaaaagttgtgaattaattaggattggagttgtttttcgtccataagtctaaagaaagagtgtttctattccatctaaaaatttggtggccgtacaattattttggtagatctttgcttgtgtgtttcattaggaacattttatagatattagatagtagtacaaaattgaaatgacaagtaaacaaactctcttctgaggatgaaatgcaacacatttcgctctgtttgtatacagttgcagctaacaaaaattagataattaccttccttagatgtatgaaattagaaaatttaatttaatcttttgggataacaaagtattaccttccatagaagaaagccacatgtgtgagggtggcagctatggtggcaaaaccgaaaccataagtgagagcaaaaagcatgcttaagtggattcttccttgctcctcatattttgctatatccaactcgaacttgttgttcacgatagctgatatattgtaagtttgaccttctgcggtaaacaagt

SEQ ID NO: 83121 - DNA, 2148 bp, Cannabis sativa
  modified_base (2059)..(2063): a, c, t, g, unknown or other
ttgatagggaatactgctccagctcttatgtgttcgaggccccaagcacctgtcctagatgactcgcttgtactatagccttcttctcgactcacatgctcaagaggaaaacaactgaactcttctggggcaacagacctaactcaacatccttgcccatatttgatgccacacgatttcaatacctctcgaacataaaatcctatggatctgactttagactcaattagctctacctcgaaggtaactttagggtcttgagaggtttttgatttttgagctttcgaggccatgatctcaaaatctaagccacctagtgaaaaagtaacagtgactggaggtaaaaacaaaggtcttgttaaaggaatatcagttaaattctagagttcaggccagacaacttctcgcaaaaaatggcgtttaccctcagttatttcttacaaaaattgcctagattgaccaaagattttgtcttggttggttttaataagatgatccctaatctttgcatcgtttaattcaagaatagttttaggtatgtgtgttttgactatgaatggaatggcagaggtttgaggataatctgattctagagattctgagattataatttttggattgaattgggtcatacttatagacaatactatcccaattttcagaaaattaaaacataagtttaacctaaaaaacctatgaatcgaataaccttaatctttcaaggcctagaattatgcagacaaacaaaatcaaaattacctaaaatagcaaaacaatgcaaataagaaaaaaccaaccaaggaaaacaaattataaaaaaacagtaaaaagaagaaagtggatcacttactgctttgattgaaatttctggacagaggaagatttaccgattgaaattctaaaggtcgtaaaactgggtttcgaaaacctctagaacaatagatgaaattaactaaaatacgcaggaagtatgtgaaaggcaagatgacatgcaagtttgagaaaggacaatcaaaaaatttctacaggaaggcttgaagatttaaaaaacaaaaatggcaaaataatctctcagctttgattttattcccaacgagtgatcactattagatcaaaaaaaatctgatctaatgggtgggaacattggaaaataggaatagttagggcattaaatgctcaatgatgttcctcaaagtcttaaactgccaaaactcaaaacgtacaatttattaaagggtttaatacgattatacccctatgatcatttaaaaaagttctttttaattacaaaacactttttaggggacaattgttatacctaaattttggctatgtaccagaagctgaaacttgtcctacagaaggaatatgaatcaactcagggaatataataataattttatatcattaaatgcaattcaaataactcattctaattaaatacaagtttgatagaaatattcaaagtcgctgactacttagtcttacgcgagacaaaaataaaatttattagactagaattgacgagatttatgtctatctcaggatagagtaataaaatgtacaagacaagatatctaaagacctcatgaattgttgcctttcatacacgaatagagtaaaagtaacaacattcaatcacctcgcattatacataatgtattgatcgtctcgcatcattaatacaaataaagggatataacaaggtgaagaacctctaacacttcagtgttttttcctattaagatggataaaaaggagatctcaacattaatgatatgtaaccttcctagtcagcataatcgtttattaaaggatgaaactaaggagcagttaggtagtcattagatattatcccatgtgtaaataaatgaaacatagggaatgtccacatttcattagcagttgtgaatgattcaatcccaataaaaataactgccaacctatattcctataaataggggcagaatccatgggaaaagggacgacaaaaaatagagagaaatcatatcattttaaaagttaagatttgtattttgtgttatagtgagatttctcnnnnntagaaactcgagaccagacccctgtttagaggacacgtatactcagatttccaatgaaagctgagatgtccatgagggactcctc

SEQ ID NO: 83122 - DNA, 950 bp, Cannabis sativa
ttaattgaatcggatcggatggtaaaatctaacatccaatatataattggatcggatctggataggactaaaaacattcgatgtgatccaatgaacacccttaagagagagtgtctaatgatcaaaatgtgaacgtaaaaaaatgaactaaatcaatctcacagtatattgagtgagatacgaccaaaacactacaaggtgtgcaactatcttgatactcagcgcccacgtaaatagcattattcttagtatattttgagaggccaaagtgataatggagcatcactaagcctaattctttaatttgttcaagagactttagaaaaaaagaacgcgataggacacccagcggtgcatgttgcaccacatgggtgccccctaattggacaccaggtgatattactactctcgatgtgctcttttaatgctaatctccttatatgttggtgaaataacgtgatggagaaacacttcgttgattctagtgaagaaatttactagctgttggtgctgtaagctttgttgtgcaccaagtgatgaccaaagattaggcacagggtgttgcaccaaatgaagttatgactttgccacaagtcttttagcttattcttagtgctaaagaagcataatttccaaaatataattgttatttgatgaatgaaaccacactttacctggacactaggtgcacttgttgcccatcatgtgggcgtcaggtgtgttggtcagtcactagtttgatattttgagatgacataacacctacgctgcttcagaacaaaatttcatcgagatttactcattcggaattgccatattgcgtgattaagcctaggtataccctagatgtcaacctggacgctgaacacctagggcaaagccaacctaggtgtcccctaagtgtttcaacctacatatggtttcgattgatccctgaaaaccattgtttc

SEQ ID NO: 83123 - DNA, 1082 bp, Cannabis sativa
aatctaaattgtccaattatttgaaaatgaagttgcgaaaagttttttctccccctatcctcaaaaaaaaaacaaaaaagtgaggatcatcataatcaccaaagagactttcagactttaataaaatgaaagggaaattagagtatataacatatcatcatcacagacaactttctaccaaaacggcaaaaccatacaatgaaaaatactaaaaactcatgtttcctgccaagaatcaggactcttgactttctaacaagttctttattcaacctatgcaacaataactaaaacaagtctttccaaacccaagttcattcttggcacacctaacacaattaccttagagatcttcaaaaccactattaaaatgatttaaatttaatgacttatacaaaaatgttgaaaattgtagtttcccaacgtccaaatgcaacattaaaggtagacaccggatagcgaggggaacattttatatttggcttcatttaacaacatacacaaatttgatttgactcattaatgtatgcttctcaatgaaaacatgaagccaaaactttgaaaacaaaagataataaaatcaaacaatatgttacactataaaaataatagagaattctttagtaattgtaaagagtttgtgcataaaaactataaataagtaattgtgtagtcattatttaatatgaaatgagttcttatagtaaaatctctcaccacaatttctgcaaatgaaaaaacacaaatctcccaaatgaaccaaagttctatttttctcatttcatatccattaacaactaggcaattacatccacacagcacttacaattactaatggaagaggagaattgtatgataaactcagtcccttagatgttcaattgatctgcgatcatttccgcaaaatcattacaggtctgttaagactcatcacagttaatcacacaagactcacataacttcttccatcaatatccatatttagctactagcttttcgtagtttttatcatagaacagaaaaaaaacctaaatgaaaaagctagtggcacctattattattgcttcaagggaacgagttcg

SEQ ID NO: 83124 - DNA, 520 bp, Cannabis sativa
tttgttaaatcgaaaaatattttattttaaaattaataaaaaaaaatagaaactcgtgaaaatttcatgaaaagtactacataacattaacaatcaacagcaaaatttcataaaaatttgcagccacataccaatttactttcttagaacatagattgaacatagcttgaaaagagtcctatttggttagtagtgattgagtaactcatatgttgttgtcatgaacaaaggaatgagatatgtcataatctttttccatctttgaatatcaattaatcaatcaacatcttattacttctaaagaagctttaaaaaatattattttaaaaaaaaaaaaaaatacttatgttaagcttaatggtccaatagtaccaattcactcttgttttcatttttaaaagtagactaattaattgaaatattgttttcgtaatgaagaagagggaactaaccagagctcttcatcaagtatattacacaatattgaagataaatttcaaataataataataacaaaaac

SEQ ID NO: 83125 - DNA, 1094 bp, Cannabis sativa
taccgtaaaaaattaaacttaaaagtatttatctacaactgaaagttaaacttaaatatttataccaaaaattattcttttaattaataatacattgttctaaataaatatagtgcatgtcatgaaaaaataaaagactagtatgatgtacgtctaagaaaatagctattgaaatgtatgtgcagcacaaaacaaaacatgtgtacgttgtcccgaagattctccatgtatatatataattgtactatagactatagacaataacaataataatcgtgatataggagaagagggatactgtgtggtctcctggaaattttcattaatcttctttagcttgattatttcactgcatatgtaaaatagtaagtacatctttctttctttttttcttgaaggggtagtggggtagttgagtacgtacatgtaccatagtatggaatttgtaccaaaagaaaaataaattaaaaagtatttatagcctagctagctagctagcttgttttctagtctttgatttgaaaacatgattgatgatggtggtgagttgatgcagggtgttacaggggaagcataatataatatggaggcgcatggagacgatcatggtggtggtgaggtgtggtcagagatatctgtgtctatctctgatgataagagcttctccactagtactgatcagccccctttgcctttggtcaaattggaaaacaccacttcccaaattgccatagttggctccaatctctactccattgaaagtcttgactatgagtatgtcaatgtcaacccacttctatttttataaaataataataataattttcaatcaaacgttgaaatttcactacttcaaaatatatgaaatgattgtaaacgttaaacctttgttcaccattgcaaattaatttgtctacctttgaaactgcttttatataaataaatataacacatcaaaaataaaacttatatttagatatatgatttaattttttccttaatcaaaaaataacttatatcttttcaaaaaaaaaaaataacttatatatttctgagttatacttttttttttttgtatatattacattttgatt

SEQ ID NO: 83126 - DNA, 1070 bp, Cannabis sativa
  modified_base (48)..(54): a, c, t, g, unknown or other
tatgaatgcacaacaatcttaccataaatggaaaaattattttgtcannnnnnntgccaaaaaaggactttacaaacactataaaaacagtactacaaaacatcccaacaatgtcaaataaattggtcaaaccttataatatattctgatatgcttttctcttatgtgactactctttattgacagccctgctctgctcatgtgatgcctttcctggaaattgtgcgaacagagaaaacttcaccacaagtgatagttgaccttttgagtgttgcaaaaaccataaacaaagttgcagttgtggtgagaaactgcccaggctttgcagttaatcgaacgttctttccctacactacagcacaaggttctcatcttttggttcacttagttaggtgtggaccttttcagaatagatagggtcatcaccaagtttggcttccttgtgggcccattccattatgttcttttcttgaaccactaataattcctatgtatggttgcaaatccaagtctcaattgaggattttaatatgaaaaccttaatcatctgcaggcttcaagatttaataggatataaagtatcaatagctagtggaaatgaacttcctaaggcataccctgatcgaacatttgtgtccccattggtggaacttttaatcaaaagtggaagaaatggtacgtactatacatgcacagaagtttatgtgtgtcatgttatagctaatcattacttgtgttcatttattaggtaagaaaaatggaaggtgatattacatttatgagaagggaagacaaccaaaaccagatcttacaatactaccaactgtggaggagtctagacgacttgtgaatattatgccaggcagtaaggtaaaatttgttaattattactcaaaattaaccttgtctcctttgtagtagttttctacgttaaaaatgtgtttggtgtggcagcccataagtgtaacagaccaagagattgtggaaatgttactgtttacgaggcgtgtcgtgtttttcgcattagatcaagggattgttatccgaccatcagatctagatgttgcatc

SEQ ID NO: 83127 - DNA, 1339 bp, Cannabis sativa
aagaagaaaaggaaggtatatgttttcccaaattttgataatagtgacatggcaaaaatgataacacgtggcacgaggaaactgaaactgaattgataaagaatgtgtaaagtaatgactgttactcatgaccggttgtcatgaccgttggaagagaagtttaacagtcatctttttctctagcttaggcaataggtgactaccccgagggggacagtggactagcaccctcataaacgggataaacgatcactacacacctacgggagtcaaacaagtctagggagtatatactactactcctaccttaaatgatgatctacagggagttagtctaggggtacaccccttgacccctaaagggttagtctaaaggtacacctcttaccccctaaagtgttagtctaagggtatactctacaccctcatggtacaagtcatgcattccacctatataagacatgattgatatagtgcatcctcataacaccaaggctacccacaacatcgaagaggtctcggggtcgtcacccccagacgactgccgacaccctcctcatattgggttttgggggtgtcacccctcggtattagcttcttcccccaaagggggttaacggtcataccacaccctgaggggactctcatcgttagtggctagttcaaatattcaaatctcgtaagaagctcaatgaaaattacaaacccacaaaaatagtgggatattatcacaaaaatcagacttcatgactacctccaaaaactaaggagacagttgagatagctccgcattggtcgcgtctcctaaagcgagaagcaccgacgaccttttctcctatataaggggtcacccattgcctaggaaaaaggatccgtttgagcacttagagaaaaaaaaaaaataccatttttcctctttgcattcaagaacctgttcttgacgtttacaattctcattaataaaacacaaggggagtaggctattaccgacatctggggccgaaccactttaaattttggtatctttctttacatttattgcaaattccggtgtcattaattatatttattgttacgattttggtttaaatctcatttattacgactccgcgtcggtttgctaaaaattcagtcagcagtatcaattaggggtattcatcaaatccaatccgcactattttgttcatagtgcatccgatcagcactaactcaaatccaatccaatccaatcagtaaaagtgcgatcagggtcctatttttaccattttagaaaatataggtttattttgtcatttaacaaaacagatggtccaaatggtaatttttacaaaatacaggg

SEQ ID NO: 83128 - DNA, 621 bp, Cannabis sativa
atggcttcgatcctccatgacagagagtattcttgcatctgtggccaattacaattcatctgctggtgtctggcgcgcccttgaacaaaagtttgctagccaaacacgagctcgaaggcttcaactcaaaggccagttctctactctccagaaaggcaatctttccatctctgaatatgtcgacaaggttcagtcgatcgccgatgccttaagtgttgctggttctccagtaaatgaccaagatcttgttcttcaacttctcaacggtcttggtccagaattcgattctgttgtgtctggaatcacatccagaagtgatatccttaccatggaagaagttcaggccttactattgtctcacgaaagtcgacttgagcatcaccaaactgtgactgatcttgcagtcaagatgcaggccaacattgcttttgctaatggaagatcaggaggtgctcgacccttttcctcagtcaagaacacacaaaatgactatccccaatcgtctaatggccgaggcagaggatatccaagatataatcagcaacgtgtcatatgtcaagtgtgccttcgatcgggtcatactgcaccagtgtgccactacaggttcgacaagaactgggt

SEQ ID NO: 83129 - DNA, 1065 bp, Cannabis sativa
  modified_base (26)..(26): a, c, t, g, unknown or other
acgttgtattagatcgtattgtattntattatattatattgaattggattatatattatatttttatataaaactatcttaaattttaagataaaaatcaataccacatataattttacacaatataatattacacaatagaatactatgtaaaacgagtatcaaacaaaccttaatgtgtatttgtttaataataatataagtgcacatatatcaggagagaggaaagattatgatgaaattggcagagttaattgagcaaaacatagaagaactagccattttggacagccttgatgctgggaaattgcttagtgtgggcaagtccacagacatacctggggccgcagaacttctccggtactatgctggcgcagccgataaaatccatggacaggttttaaaaatgtcacaaccacttcaagcttacacattgatggaacctattggagttgtgggacacattattccttggaattttcccacttccttgttcttcactaaggtgagccctgccttagccgcaggctgcaccatggtcgtcaaacccgccgagcaaactcccctctcagctctctattatgctcatcttgctaagctggtatatatctattaattaacaaaaaaaatcttagctatataattaaatatgaccatgattaatgaattatatataggctggtgtccctgatggagtgcttaatgtggttactggatttggacatactgctggtgctgccattagccatcatatggatattgacatggtatatattattattattattattgttaattaaagacataaaaataattaagttattaatcaataatagtttttggtatatatataggtgagttttactgggtcaacagaagtggggcgtgagataatgaaagctgcagcatcaagcaatttgaaacatgtgtccctagaattaggaggcaagtcacctctcattgtttttgatgatgctgatgttgatttggcttctgacattgcactactcggctttacttttaacaaggttcatatcaagtaactttaagttttatattcaaatt

SEQ ID NO: 83130 - DNA, 840 bp, Cannabis sativa
tttagatttgttttatagaatttttcatttttatttttgttgtgggaagaaattcttttgtttgtttatcatttttaacaaagattttttttttctgctggcaaatataaaaattctttcgtaaatgcaagatggatgaattatgaatatgagatgttatctattattttgagctattgctcttgatttatctagatgattttaaataggataaaagtgcttaaattattagtttagtaatgttttaatataaataattttttagcgccgaaaatatacttaaaggtaagtatttaattattttttgacgacaaaaaatctaaattattatattcattttagaaaaaaaaaatctcaaccaccaacataaaaaataatcaaactcaaaaaaaataggggtgaaaacacattattgagtagtatctgctactattaagttttaaatataacttgaataattcggtcaccaaacagtattagaggacgttataagcttaactttgattaaagtgtggttacaacattataatctacaggacaataccaaaaaaaaaacatctttaaaataattaaaagattactaattcattcaaaacaaaacctaaagaggagattaaaaatacattgtttgcaactttttgcacaatattcaaacaatatatctcaaagataatattttcatacccaaagcaataacattggaccatgccatgtcgaagagccaaagtctctactgctttgagatcaagataactttccagacgccacacaatagaagcaataattgtacaagaatgatcacgagccactataccaaagccactacaattatcaaattta

SEQ ID NO: 83131 - DNA, 685 bp, Cannabis sativa
aagaaaatataggatgccaccttaattaatttatgtttccatttatataaatatatcaatatatatatagatataaatttaggtaaattcacacaatgcacttaaaattaaactttttcttttatattcttacggtttcttttcacagatttttcgtttatttttttgaaaaactattatcatgttgttttccgtaatgataatgtgaagacaactgaaaaataataatttgtatttttgtaaaaatagaaagttaaaatacgtgaaaatatatattaaaaaaagatagatccataaaggtataaaatttttgtttttttataagtgtataaaatttttgttagttttagccttttagatatttatgaaataatctcataaatttaagttttcatgatgatgagatcccatgaaggcatctccaatggggtcaacaaaaatagttgtcccattaatctccacctaactcatttagctaattacattttttttttttttgctttttttttctaatttaaaattttaaagagaatcattgcctactttaaaaactttattttatcatctctctcttctcttttatagtcatatgtagcttataatgcatacacatttttatttttggtcaactatatataggcaactaaaaataagaaaatactaaatataagagactaaaagacca

SEQ ID NO: 83132 - DNA, 959 bp, Cannabis sativa
ggctatccgattcaatgacaacatcttgaatacctttcctcttgacccaactgagtgcttccttaatccccattatctcggccaattccggttgagtaccctcagttacatagcttgcaatagcctcaatcaaccgtccaccatcatcacgaaaaacaatacctgaaccataagtattttcagcagcaaacacggccctgtcgacattaatcttaatttgcttccggtttcgaccaacgctcgcttccttcaaaagtaccagcaggcacatgaaggggatcaaatttccttgattgagcgtacttccattgagcaagaataaatctcgcggtacacactacatcagctgcagaacagtttttttggttccaaacgacatcgttgcgggtcttccaaatagaccaacacatcataactccctcctcaatttctgttttttgccgattgactagagcagtaaaccagtccacaaagctaacattctctgttggtgcacttccccacccagactgaatccaacaggaggtactgaagttgcagaaaaataatacatgctcaattgtctctactgcattgttacaaaaggacactccagccccacgaaaacatgtttggattgtaactgagttttagttggtaagcaccgagagagagccttccaaataaggtgaagaaccttaggtggaactttgattttccaaagggtcttccaagctaagtcctcagcttccaatccccacgcacctttaatttcctgtaagtactggtatgcactcttgacagtatagaaaccattggcattcttcttccaataccatgtatcctcctcagcgttgttactaagagggacactcaagataagggcatgatcccttgtatcaaagagatccgagacaacctccaagttccactcacggctagtaatttgcatcaagctttgaaccttaaaattattcaac

SEQ ID NO: 83133 - DNA, 3084 bp, Cannabis sativa
acagctgtcttgaaaagaccaactcctacccccaagatggctgagcgacgcaggctcttgctgggtcttccatatggtctcctatcagctgagttccttttgaacaaggtcaacttgagtccgtcggcctcctcactgagaacgagtataatagtgattctaaatatcccgagtatgcattgtggtagcaagttctggtcccaactgacgaggtaactcaggattacatggctcgagtgcactaccttcagaacgcagttccttaggaagccgaagaaggagcatctcaaggtaatcaatgtagttggtcacccacagtgcttagggtcgagcgtaccacattagtgtctttttgagatagccagtataatttctatacctggaatcccttcctcatagattgcattgcacataggtttggtagttggtacccagaattccacgttcaaattagcactacatattattatgggatagtcgatcagtacgggatcatgctggataggtcaggtcatatagatttgagctgggatttagaactaattaattcctactacatatttaggatcacaggatgtaaagactttagtgaatattatagtcctccctcttcgtcttcttataattatggtaaatcccttaggtgggaaataatctccccaatttcccttttttcttgtttttaaacgaatgttaacacattgttttgtctcgcagaaatggatcacgaagaccttcttcattcctcgagcaagaaggggaagaagaggttaactgccttggagacttcctctaatgtcaacgtggagcccctcaaaaggcctaggaagacaactgccaataagaagcgagcctcccaagccatagaccttgatgcccctgagaaccaggctcaggctcaccctctggccctcgcgcatattgaagagcccattcccaaggcaaatcaagctgtggcctctttgagccaagcacttgagaccctaccatcaaggctgggaatgctggctcagagcattctgtgcagtaccctacggcttgttgccgtcacctctgatccttccttcccaacaattaggatctcataaacaatgatagcctaaacgagatgctcgatagaagtgtcacctttggcctcttggtaaacttctgtactcttctcgttttacttctctttttaacaaccttaaaaaatacttatgcatttttctttattttcagcaaactttcagcttctttgtcgccccacgtcggggtctagacaggaggaacaattagagactgagatctagaaggtgattggtcaatgagaggccatgtccaggaaatggaacgaagcttagacgaagatctactgcttaaacaaggaagtcgaggaggtgaagagggccaacaaggctgaacttgaagctgcttagaaggaggcgaagcacaagtctgagctacgccagaaactctaagaggaacttaatgcagccaatgcagcgctcgaggagaaagaggctaacaccaaggagcgatgcaatgccattgccatgcactccatctatcgagctttgatggcgaatccaaaaatggatttgagtttcctgggaaaggccctggaggaagcccttgaacactgcgagcaagctaaaaggcagaagaggaagctgaggtagcaagagaagctataaaagaagaaccatccaaatcccctactatgtaggcttggtttttaattaataactctatttttttattttaggaaaatggccataaggcccagacattggtttgccctttgtggcttttctgtaaagacaagtttgcaaagttggatggccaactttgcttttattttatcttttatttaatgccttgtacttttacattcaaacttaatacatttgtttacttgtgtttttcattcacaacttaaacaattatgttttgatcaaatttaaatactttaggcctttccattgctcttattttcctttgatattgtttgagtagttattaatctacaatatgcgcaagcaggtgttgtctgctatgcttttgatttgcgagcagtttattaattctacttcgcataaacaattgtaatctgttttaagcaaacttaaatatacttttacataattcattttgcgaattatcttgtacattattaattgcttatatgaatagttaggccttctattcatactttaggtttaggtatttttttcaaggcatcttagtgtctcatttaatactttcctacaaaatgcgagctattgatattcagcttcgcacgtagcttaatgttgttttatgagttgaatctcatttacaactgctacctttgactttcatttcttgcgaaaaaggttctttatcaatcatctaaagaaactttaaaaatttccaaagtagagtgggttcgcaatatatcatgtatttctagatgaatttcggttaatgataaacacatatatatatgtactcctcatgtaattttaaagaatgaaactttgtaattacttgaaaaatgatttgacttttttgataatcgaagttcaaaatattacatcagcaatagagattacaacatcattttactggtagtagggtcgtaaatgttccatgttctagtagttctttattagtgagccattaagacgagctaatttataaaacccgattcttactattgcctcaatcacataaggaccctcctagcttgggttaaatactgctgcagatgcatcccccgttccttagcaccaagtcaccaaaactgaaaagcctcttcttcacttacttgttgaagtatcttgtcactcggtgttggtatgttgcattggtgatttgcgacttagtacgcttttcgttaagtagatccaaagacaatttcaatagttcttggttttcttcttgattatagaaatctcgtttgtggatcgcaatattgacttttactggcagcattgccttcaagaaaaatgccagcgagaatagagtatgccttgttgctattttctctattgttatgtgagcccaaagtacttgtggtagttcatcgacccatctacctttggcagcgtctaacttgtt

SEQ ID NO: 83134 - DNA, 1144 bp, Cannabis sativa
ggtctcctcagggtcttctatctctgtgtgtggctctccaggtggggtctggtcattggtgctagtcttgggagcatttggtggtggccttggatgacgagttgaggagctggtttcaaggcctgctcctggcgcccggggtgcagaagtagtcctagttccaactccttcaactggtgtgcccccagttgttcgaccagttgctaaagtttatctgtgaacacttgtagaacgtgctgcaaccatcttgattagtaactttcttaagctgtgaatatcaatgaaatcaccaaaatgttgactcagaaatctgtactagacttataagccacacccgctcgctaaattggcgagaatgaataaaagttattaagtaattaagatagacacaaccaatttatagtagttcacccttatatcgcaatggtaatggggctacatctacgtcaaatttttatttctaaagagatggtaattacatcaatagactaagtattagaaactccaaactctagagagaaagtctaagaaagaagctttgaccttgtgggtagttttctaaatgtgaaaaatgagttaagggaactttccttttataggtaaaggaggcccacaaaaataggagaaaaagacaaattaattatttttgaccgttgatgatgatctaacggtgaaaattagtttatggtggtgatggccaaattttggtgctcagcaggtctagctgtgggtaatctggagcttatttttgtaactcccttgagggtcaattttgaagatgatagcttcagaaatacgtttggagagtgagacatgacatgatagagcattggattagcttcgaaatacaagttgaattattttaatcagatcaaaattgagtaagttatggttgttttacggaagttagttaggtcccagcgcccaggttgacatctgacatcaacctggatgctcggcaagtgtagaaacgtccaaggtatttcctttaagattcctaactaatagttttacaccacttagtccatttatatgttcaggcaaagttggtcaccggttctcggagatgttgctgttttgcaaaaatgagagactcaaaagtcttcatttctgagtgtactggacatgagaaatgaaaaattgt

SEQ ID NO: 83135 - DNA, 1629 bp, Cannabis sativa
ctttgttggtatgtatgttgattacaggggtcttgctgagaactgagttttggaaagagttacaagctcgaagaccagagtcattggtggaattctttgcaatggctgagccacacaagagaattgaaaactctttggttgagctagagagggggaaggagaagcgcaagtcacctgtaccactaccgcgctctcaaagccctaaaggaaagaattctagaggtcgaagtccaagaagacgcaacccgcagaggcaacaaagtctgaagcttgctaagtccccttccaagatggaaacgtctccaaagagaaagggaggcccacgttttgtcaattacactaaactagtagttcttcgcaatcacatttatgcaatcgaagagtaaaatggagtgttcagaatacctccaccaattagaggaaaccatgataagagagatccaaaaaagttctgcaagtatcataaggatatcggccataccactctggagtgctggttcgtgcaggacgagatcgaagaactgattagacaaggaaaatttagcaagtacaagaacaacggagaaaatcatccccaagcggatgagaatgagaatacaaataatgtgagtggttcacgaactcctcgcaatatcttaaccattattagaggaccacatgttggtggagattctaagaaatcgcaagagccaaggaggcaaggaggcaagagagaaaccgctcaccaatgtaaacaatctaagtgagcaacctgaaaaagttgttcaagaaagagtgcgatgacataacttttatggagagtgacgcttggtgagtacaccacccccatgctgacgcacttgtaatagtcgcaaattttggaggagacatgcccatcgagttttagtggacaatggaagttcagtcaatctcctcaatttccaggctttcaagcgaatggggttgcaggagagggatttgcgactagtaacctcaagcatttatggatatactagacatacaattgcattaaagggaataatcaagttgcctatcactctagcaaccacccctgttattgctaaattaatggccgattttgcagtgatcgatcaatattctacatacaacgcattcataggccgcccaatattaaagatatgaagatagtcacctcaatctatcatcttactatgaaatttcctacccctacgggtgtgggattagtgcgaggagtacaatcggattctagggaatgttataacatagcactgaaactcgcagaaaagaagaaatcagtaaatgttttatatttacttgaagcacctcctcctcgatcgataggaagtttttcagaatcgaagagatcctgcatgttgaaaaacctgacttggatccaagaatcctcgaccatacaaacactgaacaagttgcagaagaaacaattaaggtaccaatcgattcttttgatcataataaagttttaaaaattggttctaaactaacctttcaacagcgacaaaatcttgtcacttttctcaagcagaacctggatgcttttgcgtggaaacattcagacatggtcagaataaagcctgaggtcatgtgtcaccggttaaaacatcaaccccaaagtgcgaggtatccgac

SEQ ID NO: 83136 - DNA, 885 bp, Cannabis sativa
ttttgttattagtaaatgaatattatattggaaactttgtatatggacaaataaaactactataatatagtaaatataattattaaattttacataatttacttacatttttttttttgaaaatcgatgatgttaaataaaagacctaaaggtcttggcataaaggagacctgtaagtaatacaaccaatagtgttcaaagttatggttcttttgccaacattagaacatttttaaagaagtgttataaagatggtatataagaattttttagattatatttgtacaattgaattttaatagtagtgacttatcaaaaaaaaaaaaaggaattttaatagtagtgtatttagtttaaatttagcacatctatcaaatttaacacaaaatataatatggaataaattttacactataataaataatacatttttatttactttttttttcactcattaaggtaactaataattttattatatactgacttttttaccttttgttataaaaagtaaagttaattttacctttaagagtaatttgcggtataaatacttaagtttagctctcagttacaaataaatacataagtttaatttttagcggtaataatacctaagttatatttctagaactctctggtgtttggttggaggtaatgaaatggaatgaaaaaggaaaggaaacaatttcattccattcctttatttggttatatattaaagtgttagaatgttattttaatggaatggcctttccaccatattggtggaatgataattatattttgaaatggaaggaaagactattccaatgcatgatgagaaaaaaattaataatttttttatcagttttttttatgtattttaaattttattcatctcat

SEQ ID NO: 83137 - DNA, 1538 bp, Cannabis sativa
aatggttccctgatccgggttaattgctgaattttgtgttggttctcttattgtgtgtttttattgtttaagttctattgttttcttgaattatgttttgtgttttagtgtttcttgtatttgttcggacagttttctttggttgttgtctggtttggaccgatgttgttgtcctgtttgttttcagatcctttttgtttcaatgaatttggtgcctggcaccatccttttcaccaaaaaaaaaacatgacattgaaagttctcttcaattctcgcacacttgagaattgagtgtaattactaaaaactttctattttaaatattattttcttgagaaaatagcctcagaaaataccactgaagagaagatatctcaaaggagtcgaggactgaaaaattcattgataactgacatcagccaaaatgatattcttaatacatgaaggataaccaggccaccaaattttgctaagactagcttgcaaagtaaatttaggaagagtatcaactactacattaaaaattctagggcaataattgaaaattacaatagaaaaattaaaacataaatatatgatatcttcaataagtaaccccaaaaaagattccaatattattaaagaattgagcttatgatcaaactttgacaatgagattcaacctggagattttggatgccgaaagagatgcaatgggagagtgtgtagcagattgcgagagctacccactttggaggagggttgtcgtgagctttccaagctgctgaagcgaaaatattgccatcatgatctctgacaaccgtactaagaccacacgaggttgagttagaactcaatcgtgcgtttgtattggctttgaacgatcctggaggaggacagttccagcgaggcggctttatagcggcactgtgggcaggaagaggctgaccatgcctcttgtttgcactatgataaaagcccaagaaattagtcgcccaagggcttatgaattctggtgcaaaataaaagaatcttcatgaacttgtttatttcgacgaaacaaaatacactaccaaataacaagaatcaattcaacttctctacaaggaagctgaagaaaataattgtaaatgaaactacaaatatcattaacaattatatttggattacagtttaaaagcacaaagcttccgagtcaaggcaagcttgttacaaccacaaagtacatgatgggtagcctctccaactcacaagagcaaagtggacacaagttatcactaagtattttcttaaaacttattatttttttttatgtaattactaactatcttataaaatattataatttaaatatagttacatctagtataattacacaattacttttctaaatccaccacaaattatataataattatgtaagtgaaaagaatatatcatttcaagaatcaagcgtaaaactcagaagtgaaaaaacacaaaggggattccttgtctctcccaattattcacactcgttgagaaaaaaaaaattttgaattctctccgtacgagtccta

SEQ ID NO: 83138 - DNA, 707 bp, Cannabis sativa
tgattgtaatagaaagttgcaaataaaactcctcttatttttatgtgaaaatgatccatcaacttccagcttacatacatacatgagactctttatatcttaattatgacttcaaaaagctagtagggctactttagtggtgagggagggttaggaaaaaaggagagattatgggttcgaacccaagacctttaagctattacgttattcaaatgattataataccattacgctacactcaaaaaaaaaaaattacttcaaatacatttgtttattttttttcactaaatttagcacaatttttagattttgaattggagctaagtttagagaagttagtgagcaaaacttttgattttgggtattaaaagtttttagtttaataaaaaaatacacacatacctagttgtactagatcaaagttgtcctattggattgggcctctaacttgattcgctatcccattttgttatgcttacttttatgagatatcgatattaatgtaatttgatattaaatctcacaaattttataagtatgttgtattttattcaattataccgatcaaaataaatagtagtatattggatttcattagtgtctcatttgattaacaatgtcattacaaaaaaaagaatattgttaaggggcacttgatataatacaatttaatattagctaggccatacattttaatttaataaata

SEQ ID NO: 83139 - DNA, 2529 bp, Cannabis sativa
ccgctcaaaatgtgtttagtcctacacacatagagtcaacagtgtcgtatcacaaacctcttcctttcaaagagttagggaagaggtacatgaacaaattttaccacaacaattacgatcataatactaacaagtgtaatcaattgcgggacaagatagaatttcagaaacatgctactcttcagtggtatgtacgacttgaagctccaattgggggaaatgcacctctccagcttgcaccaattgtaggcagattagagattgtgattgcaggccctcacctagctggaaattcaaggaaggccttggaaaggtatgcaagatcactttaacatgaaccaagagccgaagtcctaaaggtagcaaaacgtcctccaaagtcacaatgctacggatgtgagtcgatcacctttagagaatcaaactcttatcatgttagctaccctcacaacgatcctctagttgttgaggtctaattaagtaatatgatggtggccagggtaatgattaacgacagagcatcattaaacatcctagtcaagcaagccctactcaggttgggtttaactttagaagacctggaactatgtgaatagctcatgtatggtttcagtggagctgacattgcttcatgtggcaatattaaactacaactcactgtcggcactgatctgaagcagaataacatcatggccacattcatattggtggacgtgaagtctctatacaacgtgatgctcagaaggcccaccctttacgaccttcaagtcatctcctcagtgtaccacttatccgtcaagttcctaatggcagctggttggttgtctcctttgcaatcaagaaactacttgcaagtgttataacacatcatcatcacttgccaagaagacctcttttattgctactgctattgaggggacgaataagacctcccttgttgccacaacaccaaggggacgagcaaagcctctcccacaaaggtcagagatacaacaaaggcctccagagattcaactatggagaagacagagaccacacctaaagacacttgaaggtgcacccaagacagggacgaaattgaccccgatcttgcggaaatcaacttggcagttggtctaactgaggaactcagagaatttcccctcaacacatttgactcgaccaaggttgtcaaacttggaacaaaccttacaaaggtcttgagtaagatgctcatggctttcctcgggagaaatcaagacatcttcacttggtcgcatgaggacatgatcgggatcaaccccccaagtcatttttcatgccgtaaacatagacaaagttaacttcaagcttgtacaatagaaacacaagctccttgataaggagcattccaaagctctcaaggaagaagttgaaagactacgggagaaaaatttcattagggaagttttttacccggtttgggtatccaaccttctagtacctaaacctaatggaaagtggaagacatgcgttgaattcaccgacctcaacaaatcatgccctaaagattgtttcccactgccaagaatcgatcaactagtggacgcgatacccaccatgaactcctcacattcatggatgaatattccgattacaaccagatcaacatgcacacaccgaatgaagagcatacaagtttccaaactaacattgagctttattgctacaaaataatgcttttttactcaagaatgcagttgcaacttatcaaagactagtcaaccatatgttccataaccaaattggaaataatatggaagtttacatcgatgatatgctagttaagtcaaatagatccaaagaccacatcaaagatttagaggagtgtttcaacatcctacaggaatatcgaatgaagctcaaccctctaaaatgtgccttcgtcgtccaatcaggtcactgtcacaaataaaagacatgcaaagcctaacaggacgaattgctgcacttagcaggtttgtttccaagtcaacagacaactctgttccattctttaatccacttaaaggaagaaacaagggatttgaatcgatcgatgaatacgatcaagccttccaagctctcaaacatcatcctgccaagcctcatatcctatccaagtcgatggatagtgaagaactatacatctacttggcaatcactgagcatgcagccagtgttggtgcatgaggaagaaggagtacaaaaccctatctactacattagcaagcatttcattgggcctgagtcatggtatccccccattgagaagctagcctactgcttggtttttccctctaagaaactaaggccatacttctaagctcatatggtgaaggtgttaactgaccaatcacttaggcaagttttaatgaagccagaagcatcagggcatctactcaagtgcagttgaactaggccagtttgagatcacctaccaaccttgagcaacaaccaaaggacatgtattagtagacttcattactgagtgtactggccacatcaaagacgatcccatgatatgtgaag

SEQ ID NO: 83140 - DNA, 894 bp, Cannabis sativa
caagatcatcgcgtcacgacttcggggagtaattcaaaaaattattttgccaaatcaagaagcttttgtcaagggtcattgcattgcagaaaacacaatgatcgcaagagaaattgtccattctatgaagaaaaagagggggaatagaggtttcatgatgatcaaacttgatttggaaaaaacctacgataaaatggactgggattttatcatcgcagttctcactcaacttggcttctcccacttattcactgagtggatttgggcctacatctcagtgaaggagattaaactcttgctcaacggatccattgtggggaaaatcaatccagagcagggcttacgacaaggagaccccttatccccatctttgttcattattgtcgcaaagaccctatcctgtcttctccttgataaggaagaaaaatgcttaattaaaggcttcaagttggagagacatggaactgtggtaaaccacttaatgtttgcagacgatatcatcctcttcggtcaggccactttgaaagaagctaaggcgttccaagattgcctatctacgtacagtcaatggtctgggcaatcaatcaatctccaaaaatattctgtgttcttttcaataggtatgccaaggaagaggataagagatatcactaattatcttgggatgaagaagatgggcgcaaatgcttcatatctaggccaacccctattcaggtcacctaaacgaatagaggactataaccaccttgtggataaagttttgaagtgtgttcaagggtggaaggccaaactcttatctagtgtcgggcgtgtttgtctcattaagtctgtgggctcaacattagcaaactacattacatcttctgatgtcatccccatatcaacggcgaacaa

SEQ ID NO: 83141 - DNA, 1241 bp, Cannabis sativa
  modified_base (26)..(37): a, c, t, g, unknown or other
agggtccaatctgtaacttttgcaannnnnnnnnnnnaaaatggtatttacccataaaaaaatggtaaaattttgatccaaattaattcatcacttactctaaatgcgtacacagctaattcgtaagcaattttagtggctaattgacgtacatgagtcaaggacgctgagaaatatttgacaataaactaaaaaaattagctaaaagagaactgagatcattactaaaagaaaagaggatttttcataaatatggaaacttttggtgctatttactttttatggcaaaaaaaaaaaaaaataaatcaagaagatatgaaaaaaaaaaaaaacaattaattgtaaaaatatataggaaaccaaaaactatataaataggcttaacttaaaaaacccatattttccaaaataaaacataacagaaatcgaactctctctcagattttctctccgacattctctctgatcttctctctcgaaatagcacgataagctatggcgattgaacactacgcaattgaatctgcaaaacgatctcaaacgcaagtatcatgcatagaaaatcgatctcagaaaccaaaaatttcatcgattgaagacggagcttcaacaacaatcactgcctctgatagttttctccagctccagtaagtgctttcaattgcttctgatcctcttcctcatatgtacagcctgaaaatcaatgctcataaaaatcgaaaaccagaaaatgaaacatcaaaccgaaataaacacggcaacaaaacttcaacaacaaatcttagtataaaacattacaggtatataaacattacaagtttacaagaatatatatatatcatctggaaaaaaaatgaaacacgacatttaaaagaacatatatataaaaaataactggttaaaccaatagaaaaaattaaggacaaccgtaggaataaaataatcacaaacataacaggcaaaaaaaatataacagaacaaaaataaccagttaaaaacttaaattaaacaatgaaacataaaaattaaatgaaactggttccaaatacaaaattaaaatcagcttctaataaaacatagagaaatgtaagtaaatggctatatttctaactctatagatagttaatgtccattttttaaaataataaagcaaatgtcattttgtagtttttaatatctaaaataccctttattatataaaaggtattatatgttttattcctttaatagaaattatgaaa

SEQ ID NO: 83142 - DNA, 788 bp, Cannabis sativa
ttgtccgcccacgcctgctcaaaatgaaatcgattcccccatttttttgtgaaagttcctcctgtatcagtatgttgtgcgtgaagaagaagaggcctatggtctgaattccaccagtttagaagagacactttatttttcttgaaatgtttgttccagcccgaattgcatagaattctgtcaagtttttcgaaaattaagtttgctgtccttccattacaccatgtaaagccatcactatccgcatgaatttcttttagaaggcagtgagaaatggctgaacggaagttacgcatcaaataagccggtttagttccccctcctctcttttcattttgattgacaatctcattgaaatctcctccacagacccacgcaccagaaaacatatttttgagacgtttcagcaatttccaactttccattcttcctcccggatccggactaccataaaagccagtaaatctccaagtaaaccccaaattattttcgacgagagcatcgatatgagaagtcgtataagactttatctgaactatgtaatccttagaccaaagaagagccaaacctccactcttgcctttagcatccactgtaaaacaaccttcaaagcctaaatgaattcgcacatattccattcgggcattattagaacgagtttcggataagaatatcatcccgggatgataatccttgacatgggatttcaaagtgtttagagtccaagggttcccaagcccttggacgttccaaaataaggccatcattgctctcggcgacccagcgct

SEQ ID NO: 83143 - DNA, 1648 bp, Cannabis sativa
aataaaaactaaaaggtaaaaaaatccaaagtcgggttggtcgggtcattcggtttaattgggcaggttggacctattttcaacccacccaatgaacagattgagtagtttgtaattttttcaggttattttggtttgtaatttttatcggtttttcagtttggtttgggtgggttattcggtttgggtggtttacgaatttttttgtacaaccctagctcgatgtttacaaatttctgtgtgacacatggaatcataaaaagtttctctgtggtggcacaccctcaaacaaatagtcaggtcgaggcagtcaacaatatgctcaaagacaccactaagaaatgacttgaaaaagctacagggaactggctggaggaactaccagaagtattgttgtcataccgaacaatagagaaaacaacaatggggcaaatgccatttgctatggcctatggttatgaagccatggtgcccgtggattagaacttctatcccacaggcgattaccctacgatcaagaaaccaatcatgccctcttggcagaatcacttgacgagattaaagaaaaatgaaccttagaaaacctaaacctagtggctcatcagcaaaaggtggcccagttcttcaacaagcaagtgagggtgagaaaattctttgtggaagatatggtccttagaagagtattcttgaacacaaaagacagtgcaactggcatgcttagacctaacttggaagggtcatacaaggtggttaaagtcacggactctggagcatacaagctgggacagtatgacaagaatatggagctcgttgtagtagcaagagattagaatgggaaaattttgaggaaatactaccagtaagtgtacaaggtctaatgaccctttcaagtacacaatgctagaacatttactcttaagtagatggccttctgggcggatccactcaaagggttggataaaataactagtactcaggttggatgaccatctttaaagtagtacagttaaaaaaaatatatgcaattgttttactttttaattagctaaagatcagttagatcatataatagctttcataattcaataaatgtaagttactacggtaacaaaattattttgaccaataaatgaataaagatattaattatcattctaattttgtcaattattttttatagacagttataaatttaccattaaaatttgtacaaagggtttgctcgaacccaaaagccaaacagagaaaaaccgaacttgtgaaatgtaagtaaccaagagtcataagtctattcggtcaattgggggaattatactcgtacaaagcatatgtaaataacaatctctgaaaaaacatagcagttttcatgtgtaattattgatataagggaaaattttcatttcaaaaaagatgacaaaagcacgatataaactcaggattaaaggatgcccgatcagctagttatcttaaaataaagtgaagtattaccaagtttaaagactgcttggtcggctatattgtacttaaaagaggcccatgggtcaaactaaaaaaaaagaaaaagaagggttcacacagcaggaggcccaggttctttgtacagatcatctcgctcattagaggtcggggtctcagtgttttggtcggt

SEQ ID NO: 83144 - DNA, 1210 bp, Cannabis sativa
  modified_base (128)..(128): a, c, t, g, unknown or other
ttttattaggttatcttttaatttttttttatttttaaattatatttttattttttaatatgtgtaataatatttacgctctatattaattatgtcctgtttgattcatgagattgaatactatagtncaaatctacatttgaaattttttgaatttggaagaattggataaaattatttttgtacatatggtatttgaagttttccgcattagactctttgaagggaattttagtagaccaactatttgttacggcattcagaattttttaatttatttttttatgatcgtctatgttgcagttatttaagaccatttgtagataaaatttaaataattacatacatataaagaaaaattaataaaatatttatattttatttttagtattataagtacttaaatttttatgaaaatttataaataatcataactaattataactttacgaccataaaaaataatttaaaacattgtatttcaatgaaaaactaaataaatttatatctatttttattattacatgttaaatcaggtgtagattatttttaaaatacatctcaaaattttattgagatatattacatattgatttataataatagctatttcaaaaataaaaaagaaataataaatagcaaattaatggaatatgaataatttgagtgatttagcacaaaagaaataagggaggattatttattatatgacgtatttatgtggatgaatatagtttttaaataaattttttttatggggtaatggagctaatagagtagcaagaaacggaagtagttgtgaattaattaactgagaatataaaaatatgtggtatttatttattggaggaacaggattgtaatagaggaatacaggtgatttttttttttgaaaaaaagaactacactatatgattttcataacaacaagatgactgcttgagatgcattgttaaaagatcaaaacaatgacaaggcaattaagtagatatgaagaaaatggctacactaagttattttcttgataagataacttgtagagatgaattgttaaatatgtgtcattatttaaggtacctattacaagaaatgatattttgagtgtttgattttttttatattgtttatcaaaattaatatatgtgggccgcaatattaaattacaccaataatatgatgatatcgttttttttttttgataacaataata

SEQ ID NO: 83145 - DNA, 1336 bp, Cannabis sativa
  modified_base (1243)..(1243): a, c, t, g, unknown or other
aatgaagctagtaatacaaaattgataataaaaaataattgattaagtgtcatttttttaaaagcaattaagagtaattattaatatgcatcaccgtaggtattttcatgaaaattaaaatgtctcattactataatcaataaaaagtctaaaacatgaaattattttaattgtagtaattatgattttaaaacttaaatatatacatatatcatattggtgcaggtatttattctcccgctctcaccccgtttctgactcgggtataaacatttaaattcatacccgcccagcccccgaaagtcgacccctgcccccgccccattaggggcgagtacccgaacccacaggtataattgccattagctttagctacacctgaatcaaccacttcctcaaacctaaaaccctactaacaataggtaaaagaatgtagttgttattgctaacttgagctttctttcattgagtaagatacaacaacgcatacgatacaatacaattctttgtatctatgttcgaactattgttggtcatatttctctttatcacgaaatcgaagaagctatacaagggttttgtcgggtctgctcatacggtacctaatcatatggtatccaagctaagtagttctctgaattcagtatgaattcgagatcctccggttcaacaaagaacataattcctgaatttctactctaatcaagatcgagaaaaagaagttttacgcgtgtatttaatattatttttggtcatgtaaactatttaaaaattctaaagtgacttttgataccaacatgtacgatcatatataacaataaaaattaaactaaaaaattatgttacttataatatgtcagttgaaaaaaaaattatgtgatccatgtatccttaatatgtcacttgacaaaaattaagaaaaggatatatatatttgatattttaattaattacaacatatattaaaataataaatataaacataatactagttttaataattaaattagttaaaatcccattagtgtaattatgattgtagctagtaattaaaagttaaaatactataataaaaaaaagactaattcttcaaaataaaaaactgaaaatcaaattaaatagagtaatttgtggtataaatgcttaagtttaacttttagttgcaaataaatatctaagtttaatttttggcggtaataaaatctaagctaattaagattcccctgaactttgacatgtaccnaatcatgccccctaaacttttttggccgttaaaaattcctcttgaactattgagattgttagatttaagtacttttatctaatttcattcaat

SEQ ID NO: 83146 - DNA, 957 bp, Cannabis sativa
atatatatatatattgatttgaataattattcaagtactattttaaaaaaattaagatgtaatttgggttgatatatatagatttaaacaattattctagcattttaccattaatttatttatacatgatattttttattatcaagatatgttataattttttttagaaagattttttataatttaattaaataattatcctaaataaatacctaaccatattcatatttaaatttaaattaaatggtatttttttccacaaaataagaaaaagagaatattttttcgttgataaattaaaaaagaatatagttaaaacaatgtgaaatctatttaccaaagataaataaaaaaaaaaatattttttttatatattgaaagagaaaaaaaattaatatttcaaaatctataaaacactcccaacttctgacaatcaagagacctaaagagtaaagagtatgagaagtttataacaaattaatattaagaaatttatatatatatttataaaaaatttatagaaactatacaatattacatcaatttctaagtttgtatgctgcttggtagctactacagtatgtaatggtttggtgaaaaaaattagacaaacaaaaaaaatatctagagaaaaaggagatgctagatctaatctaacaaaaaaaaaaaaaaaagaaaaataaaatgatgaaaatattaaaaattaaaaatttattaaagaactgataataaatctttattcaagaatgccagatataatttttaagcaataaaatggtataaatataaaaaaaatgcttgatataattttctaggcaaaaaaattaagatatataatcaaattgtatagagattagagatggaaagattaaaaattgaaatttttttagaaaactcacaaaaagaaaattttataagaaatttatcacaaaatattagataataataaaaataaga

SEQ ID NO: 83147 - DNA, 860 bp, Cannabis sativa
ctttgaggaattctctcagggatgttttttatcgaagttattgttgaacttccttttttccgactgttgtggttatttttgttgttagacctcttacaattatggtcgaaattgtttctagtttgaggttggaaggtttgacctggttggacagatgtattggttgcagttgtagggagtgtgggacttgggtcggccttactctgaccaactatgtccactcggtggactactttttcgagctttataaacttgtatgctcggtctaaaaattctcccattaagcctacagtgagtcttttaatgtcattccataactcacccttttgctcgattcctcctagcacgattgctaaccttccttcttcggtaagtcccttcacttttattgcttcagtcatatacttattgttgtaatctttcaaaggttctcctagtatctgttttacttcaacaaggtctttaaagtgagcggagagctgtctcgaagaagaaaattgcatgcaaaattctgttgcaaaggcattccatcaattgaatttccccagggttaacttgaagtaccattgcttggcagcgtttgccaaggtagtcgagaatattccacactgtacatcaccttttactgcatgcaagtccatttgtatcttgaaatacttgatatgagataatggatcctccttccctgtgtacatcttccaagtgggtatcttgaaattggtcggaagatcaagggaattaatttgaggtgacaatggtgaacctcttatatgatcgagctccaaatcagtgagttttgggctagtcaggccttgaatgaggctcttaagttgattcaattgggcttgcacccctagatc

SEQ ID NO: 83148 - DNA, 1061 bp, Cannabis sativa
gggcataaaacccaacaactggtacctcaaatttacaaaaagaactgaaattaaggggaaaaagaaaatatcacggggttaagggtcagtttggcacaactgtatgagaaaaaatagttgtagttgtgttgtgaaaaaaaaaataactataaatgagcagtagaaaaaagctgctggaaatatttagtaaattataaattttaaaatgctttgaattgttagcattctaattctaatgataataatgctataatattatttattatatatatcaaaatttatgttatacaaaatttttagttttatatctttatttttttaaagtacacatttatatgcatttaattaaaaaaattatttggtaatactttattttatcatatggtttgttagcatacaataatgaaaatagaaaaatatctaataaatataaattattttttaaaataaaataaaataaaaatattattattttatttcaaatattttcttaagtaatatataataaataaacaaatatattttagacaaataatttttttatagtgttttaatgagattatgaaaattgttttttctagaagttgggttgtaccaattttagcttttagctgtagattttccataaattctctaataagttgatttctaaatatttaccagaatttttttcagaaagcaacttttagttttttcaaaagttgtaccaaactagccttaggtgtataaaaataaaagataaggaaatttcgtcgatccccaaattatacatgttaggttatttttagtattaaatttaaattaattttagtatatttttaatttaacttaaatcgtgtttggagtattttcacggttgttatattttatttttgcaagattagaaaatattaaaggaataagatgaaaaaaaaaaaaaagataaaaatatctcacaaaaagttgatatatagaatagagaaaattgtgcaagaaaataaagctgaaacttcaagcctgaattcgactatcttctgattagattttagaaaaagtcgaaacttaaaagttctagatctctc

SEQ ID NO: 83149 - DNA, 1286 bp, Cannabis sativa
gaatggactacttccatcgctgaaagcagaattgcgaatccatcgaccccgaaacgtggatgaagccatggaaattgtgcaagatattgaggataagaacaagttaacaaggcagcgataccccaactcaagtcgcctcaatagtcctgacattatgacaagggctgaaagaatcataagtcgaacttcccttgccaattccacaacggagattcgtaaactgactgatgctgagattcaattgaaacgacaaaaaggactgtgtttccgctgtgacgataagtggtctccgggacacctctgcaagaagaaagaactctaagtgattatgatacctgaaggcattgaagacgatgaatcaacgcaagactccgagaaggaagaagaagagactgtggggctggattctactgaagtacaaaaaaaagttcaagtatctttccaatccgtggctggtctctctacaaattccaccatgaaactcaaaggaaacctcgggaccaaagaagtggtaattcttatcgattcaagagcgacccataactttatttcaaaggctttagtatcaaagttgaacattcccatttcggaaactaaggcttacggagtgactttggggaatggggacgcaatgaaatgtgaaggaatttgcaaaaatctgaacctacacttccaaggtgtggatgtttgggacaatttcttgcctttgcctttgggaagtgccgatatcatcttagggctacaatggttagctacactcggaatgaataatgtggattggaagttgcaaaccatggaatttcagattggcaaacaaagggttctaatcaaaggggacccctgacttgatcggtctttggtatctctcaaaacaatggccaagactcttcaagctgagcaccaaggcataattttggaattcaacttcactggccatgataccaacggtttgagccaaactgtaccagaatatttggctcaaatacttgctaattttgctgatgtatttgagatgccgagaggactacccccgatccgctcccatgagcatgccattgtcctacagccaggaacaactccgattagcgttagactgtaccgctatacttattctaaaaaagatgagatggaaaatttaatgtctgacatgcttacggtaggaataattcagcccagcaacaaccctttctcaagcccagttctcctcgtacgaaagaaagatggctcatggcggttttgtgtggactatcgtgctctaaatagagtgactataccagataagtttc

SEQ ID NO: 83150 - DNA, 1392 bp, Cannabis sativa
  modified_base (53)..(76): a, c, t, g, unknown or other
cttatttataactggcccaaatcgggacttgatttttttataacaaattagannnnnnnnnnnnnnnnnnnnnnnntaaatagaggttctactgtacaactaaaattagtcccaaaaaattattttaaaatataatcgaattactatgttgtgtaattactaccctagtaattacactacttagtcattacaaaattacttctaaacacacactgagtaaaaattattattttctaatgtaattactaattattttgccacctcatatttaaacacactataacgtcaccgcttcaagcctccattagacatcgtcccacagacttataattcttagacataggtacgtcactttagttgcttgttggaatggcgacttgacctgcaaagcaatatgagtctttttaattactctacgtcaatcacacttaactttagagttttcaagtgatgggctaccgaaaagaagatgcatcttgttagcatgggtagtacccaccattcatttaagctatctttaactgtgtagtctcatacttacatatcttagaatcattacacttgacattctcaggcaatgtggaattgcacaacttactcgatcttttcccttatggatcacaagattcccactatcacaccttgtattttaatataaagtgtaattactgtactatgtaattactaattacattatctaataattacacgcaattactttccattcaaaggtagagtttttaataaaagaacaagtgtgctaaagataatatgcctttcttaatcaatgtaaacatttctttttttgaaaaacagtgtaaacatattagaccatttacaatagttacaccaatttaatctagaatctacacttatttggtataaaatcttttatttttggtgtaacaactagaatgagtcatacctattgacaaaaaaaataataaacttcatgtacaacaaaataattaataaacgaaggaaagaaaatttactcaagaaagatatatttcacttataacttaaaattacactcactatctcaatctcttcacctgaattctaatacaccatttgcttcttcctcactcccaccacacaacatacttttctttttacaactcactctttttttaacacaccacctctctcacacacaaaatacatacttataaagttacaaaacttgggcactaagataacttggggaacaagacattccaaagctttatctataagactcttcaaaatttggccaccaagacttttctttttacacaattaataattacctaaaaaaattacaactttataaaatatagataaataaagaaataaataaataatttgagtcaaactctaacaatctccaccttgactaaattatctaac

SEQ ID NO: 83151 - DNA, 580 bp, Cannabis sativa
tcaactttccaagcagccatgaatcaggcctttaggtcacttttaaggggatgcgttattgtatttttgatgatattcttgtctatagctccaatgaggatgcacgtgtggaacacttgcgacaggtactgcatttactacgaaaacacaaattctttgcaaaggcaagtaagtgcagttttttcagcgcacgattgagtatttgggacatttggcatttgctcatggggttcaagctgatccttcaaagattacagccatggttcaatggccttaaccacaatctgtgaaacaactatatggtttccttagtttaacaaggtattaccgtcgttttatgcaacattacgctaccattgctgcgcctttgacggagctgttgaaaaaggataactttcaatggtcacttgctacagccacgacctcttaaaaactcaaaaaggctatgaccgagacgcctgttctcaaacttcctgactttactaaagaatttgttgtagagactgatgcttccaatgtgggtataggtggtgtgttaatgcaggaaggacaccccatagcttattgcagcaaggaattg

SEQ ID NO: 83152 - DNA, 771 bp, Cannabis sativa
tattcctaagcaaagtctatggccttgaaaaatataacaaccaccaccaacttgtagagggaggtggaggcagcatagaaggaggcctaggataagagcgcgaagttgggtgaggtgaataaacacctttttgccaccaacaagcgagtagaggaactggagaaggagattcaggacatgctatccactgttgagcttgaagcggacgttgaggctctgaccagagatgttaatgccttgaaagatgaaagggaagttctctagactcttctttctaacttaacaaaggataaacaagatctgtaagagagtgtcaaattaggcaggtagagcgggaggcactttagaaggaggtggataacctaaagacagtcgccctgaggtattttatgaattctagaaggccaacccagatgcaaactttgattacctcaatgaaaacaaggaggcatatcttagtttttgtgcggcccaaaaagacaagtaagaatccgaggtacccaaccccaatgctccaaccgaccaaagcacgaacaccccgcccactgaggatatagctgacctgtacaaagagctaaggactctagccgtgtcaagtttttctttcttttctttttttatatttatttcagtttggcccatgggtctttttttattacaatgtggccgaccaagcgacctttaaacttggtaatacttcattttattctaagacaactagctcaccaggcaacctttagtcttggttttatcgtgctttgttatcttttg

SEQ ID NO: 83153 - DNA, 842 bp, Cannabis sativa
aaccagggaccacgcgcatgtatacggagaccatccatctacaacctgcaactgaagaccctccgacactagacaaggatacggggtgccaaactacctccagtatctgcaacatgcggtgggaaagcgacattttgtccccacgggaccactttgtacaccaggccattagagcctataaatgcccccatctcaaatatgaaaagggttggaaaaatatttagtgtaactcaaatcttgaattcaatacaaagagaaagcaatattcaaacattttttttttcacctttatctttgtcttcatctttatcacatttctgggtaactttgtattttccgaccactaacttagttgacgaattctcaccctcaacaccaatttttattttcaatatgcaattataaattatattaattagttttaataaattataaaacataaaattatataatagcaaatcaagatttcttttaggcgacatcacctctttgttccataattaaaaaaaaaaaatgcatttcaccacacccaaaaagagaagtgaattatttttttatgttcaattttattttattttttttcttaaaaaagggatcacatagtgcaaatctcttcatcaccccttctgtcattctgacaatcttgggaaccacatgtcaactataggagccttataccttaacctactttaattaggttatcgatagtcacctcaagggttcccatcacacagataataccacctccagcatattcaattttattggtattaaatattgtacatttaattctcttgctatattgagtttaataatagaaaaataaaaaatatttataactc

SEQ ID NO: 83154 - DNA, 870 bp, Cannabis sativa
tattaattaaaatgaatatttctatatattttatcactatgttattaatttttgttcgctatgtcatttatgtacaccatacgtattaaatttatgtataatgaatctatatatgttattgctaataatataaaaataactgagttaaaaaaaccgatcttacaaactaaatatataccgtaatattttgtttataatatttaaatttatttattaattcaaaaataatattcaaattaatataatggaaggtaataattcaatcctatcccgtagttatattactaaaggaataatatttcaaagctaaactaaaccctcaaaacaaaaaataataattcacattcccattcccttactaacattaacccattctaaacaaccactcatagtacatacaacattagtataatattaaactttaaaatgtatgctcaacaggataaacataattggaattttccttattaattataaaatgggtagttttttttttattattatttacatttttgtctattacatttcaaaactgagtgataaatggacaatttttttttttttttttaattcataggtgttaaaatttaggtaatgtgattgaaaatttatatatttattattcggtttaagaaaaacgtgataagtgattaaaatttggtagataggagtactaataaactagttcctaggaagaatttcataagccacggattgttataaatacagtcacaatctcattcaaactgataaaattaaaaagaaaagaaaaatgaaatactcttacttgtggctgtgcactatcattatagcattgttggtagaaggaaataggtccaaccctccagatgggaagtgtggaaaacaaca

SEQ ID NO: 83155 - DNA, 612 bp, Cannabis sativa
atatatatatatggatatatatagtcctaatatatatatatatatatatatatatgatatatctatagctagattcagttcatgcacttgcggttggttttttggctggtccaaactgcatctttccttttcctttttactaggtgccgcttctcatcataatccaatatatatactatcctttcaactcatcaaaataaatataatatataaatttttatatatatggggtgtccataaattcatccactctaatgttattttttaattaaactaattaacatttttagttagtttaatagaataattaaattttatgttgttatatttaagaaaatatatatatatatatatgaaaattaacattaatttttttttggattggatggagttatatttagttaagctgtaataaaaatgggtacttttcaacttatcccgaaattaattgaatcggatcggatggtataatttaacatctaatatataattgaatcgaatttggataaacttaaaaacattaaatatggtccaataaacacctttagcctatgttttggatccaatttatgtgcatttctagctgtgttgggacggaattacgcttgtttt

SEQ ID NO: 83156 - DNA, 814 bp, Cannabis sativa
  modified_base (228)..(240): a, c, t, g, unknown or other
tattattattattattatttggcttatttgtaccacatgttctaaagtgaactatataagttttggtaagttgatccctaatatactttttttttcttagaaagccaaaaaataagtttggggccaatttgccgaattctatatatactacagagaaagctttaatcttttaatcacaacataattattttgtgaataaatatgacttttagtcacaataaaaaattnnnnnnnnnnnnnacatagtatttagatacaaattgtgactaatttaattttaatcacaacaagtattgtgactaaaaacacatttagtcacaacagattgtgatttttatcactagtacatttagccacactaatccttttactgataacatttataattagtaataaccttttcacttttagtcgactaaagtaagttttttttttgtaatgatagtttagggacctcagtacaaataactaaaaaaaatcttatttttagtcacaaatttttatgctgttactaaaaggtccgtggctaaaggtattagtcacaaaatttaataattattgtgactaaatgtatttttagtcacaatacttgttgtgactaaaaataaattagtgacaacttgtaactaaatgtttagtcacaaaaaaattatgttgtgattaagaagttgtcactaaaagtagttatttttttgtagtgcttctgtaaaataaaaaaatgaactgaagatcgaaagtggtatatttttattttcaggatatttttattgcagcaagtgatacatcttccgcagttgtagagtggacaatgctt

SEQ ID NO: 83157 - DNA, 1050 bp, Cannabis sativa
ttccctctgtaagtgatacgcctatgaaaatgctcagccaaggggagaatgagttctggagccatctgcaaattcaaaagaaagattataaatcgcatatacgtcgcacaaaattgcacaaaaattgcataacaacttaagcacaacacaatatatcgcacaaagttgcacatatatcgcacacacatcaccagcagaaaaaataattcaattgtgcttgctggcaaaatatttgaatcaaaatcgcacaaggcatcgacctaaatcgcataacagctaacaaattaaacacttgcacatacagccatgacaaatcgcataaaatcgcacaaggcattgaccaaaatcgcataacaactaacaaattaaacacttgcataatcagacgtcataaatcacacaaaattgcacataatcgcacaataatcgcacacacaatccccaaaacgaaaccagatctaaacttgcataactaatcgcacaaaaatttcatatacatcgcataatgtcgcacaaaatttaaaaacccacaaaatctatatccctaaactcaatttcttccccaaactctaaaattcataaatccaaacaactacatttcaggtttttcgcagattgtgaatttaaagttaaaaaaaagaacaaacctgggtattggacgaaggtggggaactttttcagttgtggggtagacggagcgtttccggtcgtgggtctcgcgggtctcctcggtcgccgtgggttcgagtggtggtctgggtcgtctgggtggttgtgggttcgacgggtcgtctggcttcaagtggttcgagggtcgtttgggtggccgtgggttcgacgaattgtctgggttcgtgggagggtttgagtggttcgagggttcgtttgggtggtcgtgggttcgacgggtggtctgggtttgtgggttcgtggctctgcttgctgcgtgcgtgggtgggttcgtgggtttgggagagggaaagaagagagagaatgtagttagagggaatgtgggaagtttgaaaagacaagggtatttttggaagaaaa

SEQ ID NO: 83158 - DNA, 1001 bp, Cannabis sativa
atattcatataaacgttgcatatactacatgggtgtttctataatgcactacacatactttttatttttttcatagtagtatatttaaaatattctgtaaaattctaaaaaattcggaacaatttataatataaaaagtcgtgtttaaacaatttattttacatgcttataaaataaaagagtcacgcgtacaacagattgtttgaaccctatttcggcgtgttaaatttatgcaaaggtcctaaaattttaggagatatctgaaatatttacaacgtacacgattatgaaaaaaattagtctaaaagattcttctgagtataattagtgtaaagagataaatgcaaaaagttttttttgtaaactagtaaacatacctgtaagaaacttattatgagaataagcttattagttgaatattgatcaagaaggattgacaagtatgaattttttgatatatggtattatattgaattagagagattgagaactatatatgaatattttgatgagattatatgttcttatatataacttaataagtattctatttggattaggaaacctagagataatattataggattctcctattaattttagaagtttcctattattattaggattaggatttcgtagtaattattaccctagattttattaggtttgaccctattactaatttaacctttttttttttaattaaaagattattttttttacagtcacaaccggttttattattatatgatcaagttatctaaaaaagttacccattttgtgaaaggaaaaaaaaagtttacccttaatgcgtgatggtcgatgccattaccgtacatggacaaaatctttgttccgtggcccaatattaattaggtgaaaattaataatattaatttgggaaacttgtacatatatctttatactagcaaaaaactacttgcgaggtactatactaaattttatgttaggttttttctatgttatttgaaagtgagatt

SEQ ID NO: 83159 - DNA, 1229 bp, Cannabis sativa
tctcgccaccattcccactccgtatcgtccattcgagttgaataaggcaccatccacatttaccttaacacttggaaaggtcgggggactccaattctcggataaaacaaagttagaaccaggaagagtttccttttctagctgctgtgcgttacaccagtccagaaaattcactagctacagattggatttgttcatcacaaataataataataataataaaaacacaaaacaaaaaataatatgtgcacataatcatatcaatgtattttttaattaaatatattgattttgctgtaatttatcatcctttaattaactatgattattgaattatttaatgataagattttattgtattatatatatgtaataaagtaagagatattatacaatttcaatacgtttttcatttcccaactaacttagtactatattatcacttaattaatagttaataacttttacctttttttaaaaaaaaggaattaatagcttttacattgtaaataaatgagttcaaaatacaaatatttataaatatattttatttttttttagattagaacatgtttacaattacaaattttaacaataaataatatgtattaaaatttgtgaaaagtataatttcaaactagtttttaaaagaagaagaaagaaaataaactaatttatgtaaaatgaattattgttgtttattttgggagagaaggtagtagctcctattattacccttgattttgatttgttgtaccaagtttattcaaaaagtaaaaaatattgaaactaagataaaaaataagaagaattttattttgtactaaagaaaatattaagtatacattaatattaaaaaagaaaaattttaattattttaattaatcaatcttaacatttttaaaattttattttttatattattttttgttaattttaataattattttaaaaaaattttaaatcatgtataatttttctataaaatttcacatgattattattttcatttttttttattttaatatttaaaatacatttaattttattgttatattttttaaaaatacaagtaggatgaaaaaaagaaaactaagtatcaagataatatattctcaaaatttaatacaagattgaaaaaaataataaaatataaattacagcgatttggatcttctaactaaaaattaataataatttaattaagttagagtcagtaattaaaaatg

SEQ ID NO: 83160 - DNA, 1074 bp, Cannabis sativa
gtttacgttcctcctcaccaccgacttcgctctgtcataacctgcccaaattatacctcctctgcttcttttggttcttccaaattcaaggaaaatcagaccgccgccattaccactggtgctacttactttcagccgcagcaggaccacttccataagcccaattcgccctacatttcttcttacgacgatggtgtttccgaagaagggtctgatcgtgaattcgattcttattcccaaccggtaattgtgtcagaataattttagttgactttttatcagaatggttaatttgattgaaagaatcggttcttctctttgtgttatttggaaaatggtagaaagattatcttttttttttcttctttttgctctttttgagtgattgttattagctaaattgtagtataattgtgttgggatttttgttgacttttttcttagaatggttagaaattataccaatgtgaatacgctttagtaatttgatcaaattaatcggttcttctctttcatgaagttagcttttgtttctttttattgcttaaatgagtgaatttttgaaatggtttgtgaagggttgtttttaagtgatagaaacactatgaaagactgtctttttgtactaagttttgggcttaagcaatgtcagtatttgtgttttttgaaaatggtagaaagattatctttttctcctttcttttcaattattgagctttggttgagaatatacttggtccctctacaatggggtgttttttgttttttgtacttatgctgctcttgttttagtgattgtgttattagctaaattgtagtataatcgtgttgggatttttgttgacttttctcttagaatggttggaaattatatcaatgtgaatgctttagtaatttgatcgaatttaatcggttcttctctttgattaagttagctgttttgttattttcttaaatgagtgaatttttttatgaagggttgatttgatgtgatagaaacactaagaaagactatctttttgcactaagttttgaagtgttatttggagcatggtagaaagattatctttttct

SEQ ID NO: 83161 - DNA, 557 bp, Cannabis sativa
aacaacataaaaacaaataataataataaaaaaaaaaacaaacgaatttttttttttaaaaaaaaaactaattatcttctgcacaacctaatagagactatatttgcaagcaaattctggaaaatcataataaaaaaaaccacactcttatattttctaattcttcttcttattcttcctccttcatatattttttttttggttacctactacagaaagagagagttagcttttatttgaataatgttgtagaattaagaaaaaaaaaagaagaagatgaacatggaacaatagaaagaaaaaataaaagctaatatactcacaaataactgtttgtaaaaaaagatgaacaagggagagtgataaagagtttaaggatgaaggtgatgatgagaaaattaaatgataaaataataaggaaaaaaaaaataaaaaaccgtgagttaatataaaagaattttttttttaaaaaaaatactcacacaatataaatattattaatatcgatgtatattataaatataacatttagcaaaaatagtataaattccaaagcc

SEQ ID NO: 83162 - DNA, 935 bp, Cannabis sativa
taaaacgtcagtaatagcgcatcaattttttttttaatcttttctctatatttattaaccgtcgcctaatgtatacgagtgttaaaaaccgtcgcctatagtgtactataagcgacggtttttaccactcagataatttttttagcgacgggtcctcaaaaaaagcgtttttgagaccgtcgcgaattttgccttttgtaatagtgtatataaagggataaatataaagattatgtcaaaagtgatgagcaagataaatataaaaaattcaattacgtacgaaaattctctttgaagaaaaattaaattatgaaattacatatcaataataagtcccctttaaaataataaaaaaaaaaaaccttatcaaacatgattatatttccaagaaaaaatatgcacacatatgtactggttattgggtttaatttagccaggtcgggaaaagaagataaagtatggagaagttttgcctattatattgatataattttatgtgtatatatagtagtaggtaaagtaattaaagtcttttccgtttatataaattatattgttccacttccaatcgaataaggtactattgacaacactggtagtgcatatgcctatatagtacaaacaaatactatatacatgatactagtaaaatttatatagtttgatgatcgatggacggtgaaaagcctatgctgctacccagtcactatatagtacatgtgacatattttatgtatggtacttattatttactgaatccactcttataattatctaactgcgacttctttttggattgggattatatataggaaagtatattacttttcatttgcatatgctataaatagtatataacatttttcatttggtgatgaattatgtgaaagataattaaatgaattaacattaattaacttgaactccattaattt

SEQ ID NO: 83163 - DNA, 921 bp, Cannabis sativa
aaccatgaaaagatagataacaaacccaggttataaatggaagttgcatttgtctcaatgtttctaacacaagacattcatggatcttttttttttttttgaataaagagatacatggatctagaaccaaatttactaacagaattgatgtgaagcaacttgaattagagaacgtttttggattaaaaaaaaatgccataatgtcaaggagatttctatgggatagcgttgttgggcagttaaattctgctaaccttttttttttctaagtaaaaagtgcaatctggtcttcttttttatttttttcccatgtatgcatgttttgttcatgcatttgcttgtacattggtaatgagtctaatatttctttcattttaggatccgccctcaaaaaagtcgaagtcactctccaaaaagatgaggaagatgcaggaatttgaaagaaaattacaagagaaggaatttgaaagggcttttttcagggaattttggccagataacgtttgatcattcacggaaggtagagatcatttcttcacattaaatcatgtgcggcccctgcccttattagtttttatcatctaattttgtacagatcttaacacttttttcccctcttttttggtagttgatcatcatgctgtaaaatagtaaatgaaagtgtgttctttgcatcacaaattatagtatactacgcattcttttatacacagtttcgtagaagtgtacatattatgattttgtattcactttggataaagaagtctctctctcagttcaatttaatattatctatcatacccaagtgatgaaaaaaaaaattaagtgtatgatattttgcattaacctttatctcctgccaaaaggaacaaacagttgcaagctaaaatttttatatacatagaacaaatggaagaagat

SEQ ID NO: 83164 - DNA, 755 bp, Cannabis sativa
tttttaggtacatgcagcctctaatttcaaatgttccaataatggtaatagaaggaaaccatgacatagaaccacaagccgaaaatcaaacatttgttgcttacagttctcgatttgcatttccctcggaagagtgtggatcatcgtccacactcttctactctttcaatgcaggaggagtgcatttcataatgctcggtgcctatgctccatacgatcgaacatgtgagctcgaggatcggtcctcttcctctatctccaatactatttcatctttgacattgtttatgtatttttgttccctctttttgtacagctgaccagtacaagtggcttgaggacgacttggctagcgttgaccgagaagtgactccatggttggtagcttcttggcatgctccttggtatagtacctacacagcacactatagagaagcagagtgtatgagggtatcaatggaagacattttgtacaagtatggagttgacttagtctttaatggccatgtaagtacattcttcatagccaaactatagtcaattcagataggatttttgccttttgaactttttcggtattctttgtcctaaaacttaacgaaagagctaacataacgtgttgagatattgacatttaagtttttcgtgttttcgtccatgactcattattgtgcaaaataactcgaaggacaaaataggtaatgtcaatagttcagggaacaaaaatgatgtttgccctatgaattttttcggtt

SEQ ID NO: 83165 - DNA, 1140 bp, Cannabis sativa
atgccagagccacatattagcgaccgtttaataagatgttcaaaaacaaactagggaggaatatggaggtatatgttgatgatatgctcgtaaagtctaaaatgtttggagaacatagtatagatctcaaataggcctttttagtcctctaaaaatgtgagatgaaacttgataccaaaaagtgtacatttggagtctcctccaagaggttcttacactttattgtcagctcctagggaattaaagagaactcagagaagatcaatggattcattgacatgcctttccacaggaagcataaggacgtgcagagtgtcattggaaggatcgcagctctcagtaggttcatttcaaaatccattgataaatgaatcccagttttcaatgtgttgcgaggaaataaaaaattcaaatggaatgaagagtgtgaagaatccgtccaaaaactaaaggagaacttgactaaggcttcaatcttattgaatcccatggaaggagaagagttttacctttacttggttgtgtctgatcatgccgttagtgtcaaataagtgggggagaaaggaagagtccagctatcggtgtactacataagcaaaagactgttgggtggagagtccaggcatctaatgattgagaaattgacatttttcttattaattgcctccagaaagctgagaccttactgttgatgctgaaaagtagccaacatcaactcactagattagtgagatgattaataagtttaagtaaataactactactacaaatatcagaattcgcgacggtcctaaaaatgatttttttttttgggaccgtccttaaaaaaatcaagtaactatttaaaattgtcggaaaatttagtattcatgacggtttaaaatcgtagtaaacaaaatatgcaacgttttttttttataaaatgagaatttttaggagagccttatactcgacgatttaaaacatcaggtatagtataggcgacgtcgcctatactatacccgacggttttaaactgttggctataagggcccgttgcctatactatacccgatgttttaaactgttggctataagggcccattaaaaaatcgtcacctacttctcgctacatttcccacgtgcccacctacttttttt

SEQ ID NO: 83166 - DNA, 711 bp, Cannabis sativa
tgttcttaaagacaagcttaaattctgtaaatcctgtgtattgggaaagtgatgcaaagtgaagtttcttaaaggaatacatactataatacagaagttagggtacattcattctgatctatgggggccttccaacattcaaacacttggaggagaaaattatttcttaagcataatagatgattacactagaaagttttgggtgtttatactcaagaacaagaatcatgcattccaaacctttgtagactggagagcaattcttgagaagcaaattagatgttgcgtcaatatcctaagaacaaacaatgggctttaattttgctttgatgagttcaactgatgttgtgtaaaataagatattataagacataacatagttgtgaataatccacatcagaatggcctagcaaaaaagatgaacataactctacatgagagagtgaggtgtatgctaaaaattttggggtgaggcactcaagacaacttgttatcttattaataggatcccctctacagcttcaaactccacaagaaatgtggactagacatgttccaaatgtatgatcttatagtctttgggtgtacaacttatgcacacatcagacaagacaagttgcagcctagagccttgaagtttttatttttaggctatccaaaaggaatcaacggctaaaatttatattttcttgaaccctgcttcaagaaagg

SEQ ID NO: 83167 - DNA, 1222 bp, Cannabis sativa
tgctttgcttgaataataatacacataaaatagccctatcgtatatatgttgttgttgttgttgtgaagaaatgctgaagagaattattggcgtcaaacaaatctataacaaatcctatatatatatttgaatttaaattgagatcatagatgaaacttgcgatgaaattaattgtatcaatatatcatgttgttgagtgtttggacacactgtaaatactttaattttaactttgagttgtagattaatattaagtttaatttttaacgtaataatttttaagctataatatactttattaaatttaaatatttataaaacaaattactgtttctctctgaatatatattttacgtaagttttagtatatttgctcaaatctaatgccaattaaactgagatgttatgcatgattgaacgaacgttagtatatatattattcatattttcatatggaaaaatactaaggtgtcaaactataagagatgagatgacattaacaaaataattttatataatcgcaaaaataactataaattatattgtacaactatgaatgatcattatgatcgtaaaactattataaatttaactattataatcacataaactaaattaaataaagttattttgtaaattttagtatttcattattaatttagcaaattactcacaattttcatagtgtagatggtcaagtttagcttagagaatgatttattatgtagatggaagaaatggcacatagttgattgtagatagcctatatatatattgaagattacaagttgttttgattttgtagtagttaacttcttattattattattataatattattattggaaaggacttctaattgtttcaaattctttatttgtcaattaagctatttcaaaaagtaataagttattggtcgttatgttaatacatgattttttttaagttataataaaaagaaatacatagaaaatctaataaattataaacttctctcattgtttgattttctttttacttgagttagcttaaatatatgtgtttttttttttttttgaaacaaaatatatgtgttaattatattagacttgtggagttttttttacatctatttcttcatatataatttataatgttctaattttttttcttgtttcttcaagaggatgagatatttgatgcatgaaaagaaactagtagcactaatttactttcaaaatt

SEQ ID NO: 83168 - DNA, 943 bp, Cannabis sativa
  modified_base (356)..(360): a, c, t, g, unknown or other
caacttgacactttgtcaaattaatgtcatcttgactatgactttcaacctagatgagagagttccttccttagtgatttcaacctccctcattgttcttccagatttgaaccttgagtgaatgagtgacgtgaccacacatagcaagtcaagtactcaatcatagaaagtaagacagtggtaaccaaactcgaaggagagaaagagatttaggttcagatcttgataatgctctgcgaaagaaaagaatcaatggctagagatcttgaacggaaggagtgattatattctgctgcaatcaatgtaaggttttctaatcccttatgtgttcatttcattattttagagaattcatnnnnnggatgttaattcaacatacttgttggtaaatctagatcctgataaaatatttcaatacgaagggggataatatgaaggtgccttggttaaagtggaaagaggtgtgtaaactaaaggtgttgggcggccttggctttcgggattttcatttatttaatcaagtcatggtggctaaataggtgtaaagactattgcaaaacatgaattcattgccagcgagagttttgaagcataaatatttcctaaggacatcccttcttaatgctaaagataaagataggtcttctcatttatggtcaagccttgtttggggggttgaacggttgaataaggatgttaggctttcaattagggatggtaaataggttcgggaattcttggatctgtgggtccctagggcttattctttcaagaccattatgcaacgacatgatgattgcagtcgggttattgaatttattactcctgatggatcttgggatgtcttcaagttagagaggttctttatttccacgtatgtggagggcattttaagtataacattggcaagggggcctgataatgattcatggtgttggcatta

SEQ ID NO: 83169 - DNA, 1353 bp, Cannabis sativa
  modified_base (1325)..(1326): a, c, t, g, unknown or other
actgtagcgtgccttagcattagggtgttacactacctatccacattatatatatatatatatgttatataaactaacaaaagtaaaaaacgtgtgagagtggcaggttttttttttaattaaaattatattgtattttaaatgatataaaagtgtaatgtgactagtgttgttatattttaactgaatactatcattccggtttctcgccttagctgttgctgtgttaaagcaattcaagaactctttcaatgattttctaggttgttatttcacattagacaacgaagaagcttcaagtcttcaacttcttaagatagtcatgaggttattgaatgttaagtaaatttgtcaaacaatctctttgctgctcttgttaaggaagttgggaacaacacacatcgtaaatttaatctaatatttcatgctcgcataacattattagatttactaaagtgcaccactgggtcagtggtcccgtcatagggagcaacatgggaatttttaaacccttttgggaaatatgtgttgagaatgtccgggtggaaggattctggctcctcatcagagtcatacctgggcaatttcccatagtcaccatcttgatatcttttgaacttttcctccaattctatgacctaaatctggattggatcatctagagctctcatatttgttggcccacgtcactcgcgtgagtttctatttaattgctcacggaggtctggagtgttacaattcagatgccctcagtggtctggttgtctttgattcgaccattcttgaaggttagaaccgttatgaaggcgagctactcttaaactggtagctacaaaaatcactttcactaatttgaggatccctgtcgtcatgggttccactcttattgtcatcgagaacatcgagagtttgggaccgcgaggagcaacattgagtatggcttctccttgattcgctttcagcagcattcgaaatagcccttccaggatgagccttgtgtcttgggcgttgtctttcaaataaataagacatgtgactggtacaaaccctttgggggcctcgcaatggcctagtttgacactggggtagttccgtacattgttccagttgtggctcatttatttagaatcattttcagtattatttaattgttaaatataatttattagttaatgaaaatttgaattaacaaatataattttatttaaaataaaataaatattgatacataaaaatattgattgtgtacattatattcaaaattttaagttatttttcatcttgttaaaaacgtgcgtgtagtataggttttttttttttttttnnaaaaaaaaaagaaaaattatttatttt

SEQ ID NO: 83170 - DNA, 625 bp, Cannabis sativa
tgagtagatctaagatcttggtaacataatttcaacagttgctcctttagccccatggatcataattggagacattaacgattatttaggtcttaatgacaagtctacttgtactaaacgttctccatatgccatgtccaattttcaatcattcattaataaatttaatctctctccactacctttcattggtaatcgttctacttggaagcatggtaatgttttcgaaaggcttgattggagtattgtcaataaagcttggttggccttttttcctaaggctacccttagacatctttcttattttggttctgaccatagagctttgaaaataatccttaacgatcctaaaaataaaagttcccacaccaataggttttgttttgaaaatcattggctttccgagcctgacttctttagcattctccaaaataattggtcttttgagaaccgtgatgatcatagtaatcctctatcttattttctaaattgtcaacacaagtgtgttaataaaataaagagtgggatggtcaaaaattcaatttcaggcataccattaagagccttcaaactattggaattattttaccacgatcttagatttactaacaagtatgttatttaa

SEQ ID NO: 83171 - DNA, 1077 bp, Cannabis sativa
aaaaaaaattgacaaatccaagattttatgaaatttttcgaaaaaaaaaaaaaaaaactcaacttatacataagtgacattaaaaaaagaaaaatggtataaatcttattgagaagaagaaaaaaagtacacaatcaaagatttgatgaatttctccaaaaacttaacttatacatatatgtgacatttataaaaaagatgcttctaaaatggtataaatctaaatgaaaacaaaaagtagtgaaagtaaagagtgttggttattaatcattattaccttcagaaaactttttcattcaaaaaaaaaacttaatatatatatgtggtatttatgaaaaaggatggttataaaatggtataaatgtaaatgacaagaaaaaggaatagtgaaaagtaaagagtgtttggttactagtatctataatatcattataagtatggatatttgatgagtagttcttgtctttttgtgggtttttttttttttctattttttaattttattttttatttcaattttcatttttaattctatctttataatttttttaatcctattttttaggaaataattttttgtactagttattgatatttttaatgtgtttaatgtcatttcgataatgtggtattatttttttgtacatttttaaatttgttttaattttttttataaatagttttttgtactttactattagtactatgtacttaatgtcatatcggtatgatactcaataattagtttgtaatttttgtcttttgtatttttttgtatggataatatttgtattatttactatactattattttttgtaaataattactaattagttagtaatttttttaataatctttgtaatatttactatttttttgtcttttatattttttttttgtttttttttaaattttattttttacaataattttttgtacttgctattagtacttttaatgtacttaatactatatcggtgtggtactcaataattagttagtaatttttttttaattttattttttatgaataatctttgtactattttttcagtaaataattttttgtactatta

SEQ ID NO: 83172 - DNA, 906 bp, Cannabis sativa
atatattattcatgtttttgaccatcagcttaattattactcaggttgcttggctgtggttcaaactggtttatcatcctacccaaacagattattgacatttcattgatttttatttttttattttacaaaaggacatttgatttctcatctaatgttttaattaattttgaatttcagacatataattgcatttttgacaacttattagaaagggaactaggccaaagaaacttcaatgataatataaaaattaagaaagtaaccatcaaacaatagtagcaataatggctctcaaattatatttggggtgttcacaaaaaatattagattttggtaaaattttataattttattagcacacgattttttttacaaaaatactatctttttataaaacaaccgtaaaataataaaatataacatttaaaaacaacagtgaatcaactaaaaaataatagtaaaaacttaacacagtatatattagtataaaaaagacacaatatttttttgaaaaaaattctgctccacagtaaaaaaagaaacaaaatatagtagaagaatactaggcgtgcttagggtccatccagtctagagtccaataaaaaatattacctttacaaaatatatatatatttttctagtaatttttaaaaatattacatattttttaaataaagaatggaagaaaagcccgtccgatatcaggaccgacctttgtcaatatgatgcttacttttactaataaatattagggatatttacataaatataataataagaaacctattttacataaatatgataagtaaacttaataggaaaaaatatagtatttaaaataataataaaaaaaaacttaatatatatggaatatgtcatttaaattaccataaaaagtattaa

SEQ ID NO: 83173 - DNA, 2319 bp, Cannabis sativa
cccacaacgaagaatagggacagagacaaccacgtcctctgtagtgatgatcgcgagatttgtgaaagggagatgaggtctttgagatggtgaaggacgcatggtactaagtcgcaacaaatttaatcttgtaaatgtatgcaagtcagaatttctaactcacgagaccaggtcctcgcacgagaggggttcgttcagttgatcatcgtcaactgaatctgtctcactacctttagccccatctccctcctcctcctcgcgatgtggcacctcgtagtcttccgtttcttcaacttcgatgttaggggcatgtctcaaatgagaaagatattcacgagcacacaccgtagatttgctatcgcgaatctcaatcgttactggttcagcaaactcctaaaccatcctatctatctcgtccatagacagtgaaccatgacgagtcgctctggcagtaggaacctcttccttagagatcgaggtgggtatgaagctgtctctcttctccacctcatcggcaaaagccccacctccagagtcaaggattttgttatccgtcaagtcgctcatctgaaagatataagatcttttcagtgtggtgcaactgcaagaataatacaagtggcctcacccgcatgaaagaaatttagaaaaatataaaggattaaccagacatctcaagaaatggctgggtgtttcgcaatagcctaataatcatgttgctacatgaatattaagatgctgcgacacacccaccattttgagaatctggctaaccctcttaaggtgaaagtcgcacatgtgcaactaatagtatgcctcaaaaaatggctgagagtttcccagtgacccaaggggcatgcgtttctgagcatgaccatagagttactgggaaacacccaccatttcgagaaatctggtcagttacaacatatgactaagaatgcaagaaaaggaaaattggtcgtatgtcacaaatggctaggtgtgtcacactgacccaaggaacatgcaagtgcacacatgaacattaagttatggtgacacacccaacatttgaacgacctaaccaatattcccaacaaaaacatatatgaatcagagagctaaataaaccctaagttctaaataggggttaggaaagccaaatcctaaatttattaaaatatatatgcgagtattcaagatgatcatctcaatactcacgagtattcaaggcatccaacgaaaaagatgcgaatactcaaggtgttcttcctaaaacccatggttactcaagttttaggactatattctcgagaaaactacccagtttttaacaaaaaaataaggccctatatacacttcctatcaaatcatgcatattatgtcccctaaaaaaaacggaatgcagattaattttcaaaaaatagggaaaaatagttgcgaataagatttttgtactaaccttagaaacgtcaatcaccctttggtcaattccgtgaatctcagaaagttacgaggattgttttttgaaagaaagggtaagaaatctggaagagattttaaagtttaaaaaatttagagtaaagcaaagagagaagtgaaaatgagagggaaaaatgtgagaatcatttcgtatcaggaggcttaaatggcattatccctcattaattgggattgagacacgtgacagaagaatgcctaaggtctcccaatctaacggttatctataaccacgcctacacggattctgaagagtctcgtgacgtggcaccccaaatggattaaacatcataattacaactgtcattttgaaaccctcgatttgacaaccaaaggtcaccatctcgtgacatcccttcgcctgcctctcgcttatagtttccctcatgacctggtctgtcagtcgcgaaactaggggcatgtgcaatagtgagattttctcacctagaaactcgagaccggactccaatgaaaatgatgcgtgtacccactctccttgaggaaagctgagatgtcagtgagagacctcttaagtatgaacctcgcctgaaccagactcagcaagatgatgtgaccatgacagagtctagtcgcattcatatggctcgcatagaataggaccaaggaacggtttaagactcgcgtatactgagatatatgcgaggactcttgagatcctcctacgagttgtaaagatcgattctttactctgcgagctggttcagatgacccaataatctcggtaacccaataaaggcttgcatgccttaggttgccaacttattactagatgtccgtgtaagcgacttaaataggacacaaacatcctaaactcaa

SEQ ID NO: 83174 - DNA, 858 bp, Cannabis sativa
ggttcgaatttattgctggtttttggactgcattttcgatttctggtttatgttaatctgttctttgttgtgtgttcttgaatgaggtgaattgtggattcaccacaaatataaaagcatatataattataaaatgtcaataattaatactaattgtctttactaatccataatctaacatgcagtcattacacacgtattgacttatatatttttaccacgaggaacacatgttggagaagaacacatatcaagatcacgatgccaacgagtcatgagaagcacgtgttgaggtgaggaccttccccttaaggccaagatgacattttgaggcccctagggccgaggtgatgcatgttgaggcccctcgggccatggtgattcatgttgaacctccttgggccgagatgaggtgctagagcccccttgggtcgagatgaggtgattattttcctgcttcaacctctcttagtaaaatattcataacactcacatctaaattccaaatgagctgattcaagatgtgttttagaagttgagaaagagctctaaaacttttatgctttgtctttttccataatatgaacataacatggttgaatttaggtttaaagtttcaaaccgaggtgatgaggagttacatgaccgagatgatcactttgggtcgaggtgagtgtcttgagggcctccttgggccgagatgatgcacaaggtgaagaacctcttaaggctaaagtgataaggtgcgttgagatttggtacgaggtgatcatctttggtatgaggtgatgagatttggtacgaggtgatcatatttggtatgaggtgatgagacatgaagtcccacctaggtgattt

SEQ ID NO: 83175 - DNA, 987 bp, Cannabis sativa
  modified_base (924)..(935): a, c, t, g, unknown or other
atcaatgataattaaccaaagatcttctaataaaatcggatagaaatactctaattatattattcaaactagaataaaagagtaacaaaaccaatcacgctaaagataaacctaataaaagatcgatctatagaacaaaaggttaataacaatctaagaatccctaaatctaatagtagagaaatctcacttaaaataaaaacaaccactcccattaatacaatgaaagagtgacaaactattattattaaaagcataatacaataaacacatcagaatttgggatgaaattactaccacaatgtataataatgtatgaataaggataaacctaataaaattaatatggatttataaaataaggagttaataaaaatttaggggatctctcaaatttaacagaagggaaatctcacttaaaataaagagtgacaaagcactattattaaaagcacaaaacagtaaaaaataatacagaaaaataaaccaaagaagattaatactaacaaattagaatttgggatgaagctactaccatgctgtataataacatatgaaatatattatagtatattttacgatgtgtatatataaattattattgtagagttattattgctttggctttttagttaagcttaaaaaaagattgaaaacaaatcaatgttatttcagaaaatgaaaaatgacacattttgtctagttttcagtcaaagtgttcttaaatgacaaaaaatggcatcacttattaagattatttattaatttatatatacttgaatgaatattatataactataaaaacaaatggaagctatatataaataaacatttttttagttgtagaatttatttagtaattttaagttttgttaacttattttatgaatgaataattatataaggcaccattttttgtaaaannnnnnnnnnnntacgttcaaagaatgttttttttatatttttacggttttttaaaaaataaca

SEQ ID NO: 83176 - DNA, 2273 bp, Cannabis sativa
caactgtgaaaaacacaatcctttttctgtattttgatccaactcatctcacttgatacccagttacatgaattctctctcttcattgaaagtttaattttttccagaacaatcatctactacatctctgataaacttggcatttctaatcaacccagttatgtcattctgcactaatctaacacttaattttcttctacctaaaaatcatcgaacagacatgttgcttccttgataatcaaaactttgtaacataataaggaataaaagtagatacccttctcttctgtcaacaattttgatcaataagcataaaataactaagaataatttaaaatgatccctcaaaatagaaaagatatattttttcaaataaaaataaattcccatgatccaaaactactgcaccaaaaaccaagattccaaccaaataaagaaaacaataagagtggaatttcccccaaacaaaagaaaaaagcttatatgaagctcacctggaatggaatcacttgaatagaactctctccagtctggccatggaccatgggctcttgattctccccaaccgatttaagaattctcgaactgggtagccgtacagtaggaacatcctgcaaacccgatcaacacaaaatcaaatcaaacccaaatctaaatttaaataaaataactcaaatatatacatatatagaaagagagaaagaaacctgatagagaagattagagacaaagaaaccaagaagaaagaagagaaaacagagaaggaagagaatggaagggccaaacttggttttgtgagtcttagctttgcctttcatctattataatatatatatatatatatatttatatatgtttcagtgaagtttgaaggagcttattcttgtttcttctttaatggaggtgtattgtattgggtttttgttagcttagtgtgttgggtttttgttagttaatattaatattaatatgataattttaaggtgtgagtgagtgagtgagtgaatgtgtgttttgtgtattgagtttttgcatttggagaattgatttgatgagaaggaggactgggctgggacgcgatgatggcgggagtctcccgtgggttttgggtcccacatgcacgctcaaaccccaaaacactccattttttccttttcatttatgtttttgtaataataatttaaagtgataataacaccacttccattccattaaatatttaattaaggagtttcaattcccattttcatagctcctatacaaattttgtgtaactactttaaatattgatttttattatttttttattaattacaattttgtaatagtatattttgattagtattataatttcttagttctccgtacttaaagaaaaatatgttagaatatattttattttttttttatagtggtgttcgttatgtttattatacagtctttgtaaatttttgaaaaatttcgaatagtttacgccacggtgctgaaaatacgtttgaagatttttgaacacgcgtggtaaactaaaatattagaaactttatttttagtattgtaaactatttgaaattttttaaaaatttacaaggattatattataaccataacgaatatcgctatgaaaaataaatatttcggtatgtgaattcgaacataaaaattgattaaaagattttgatagaaagttgtaattagcactcattaacttatatataattcttactacatcaagtccaaataaatattataatttaaagagaatataatatgagagaaatactaaaaggtgttattgatgcctaagatttttcgagatgtcatattgttattagtgtaattaagtatcagatcccgtataatttaatgtaatacttttaaaaaaaaatatcaccaactaattataaggcatcacctctaaaaaatgcttgacacttctaatgtccaacaaaaatgctcgtaatataattaccactccaataatcactacatatctttgatctttcaaacactatttgaacgagaataatactagaaagtagaatatatagtagaatagatcgtaaatatgggccgaattttttgatacggcataaaattagtacaagtccaagaggcacgagtacgatccaacgcgaaaaatatatgcttaagcatgatacaacatgacaaaatggactatgtgttttgcaaaagttatagatgggaccatgtgttttgcaaaagttatagattggaccttgtgttttgttaaatgacaaaatggaccctgcatt

SEQ ID NO: 83177 - DNA, 1601 bp, Cannabis sativa
tcttattcacaatatatatacacaaacacaatatatttctcattcacaatatatatacatacgatacatattcaatacaacacaatacatatttaataatagaggaatgctaattaaggacacactatattgcactctcttttacactctttttataaatgagtgacatgtgtaatttatcaaagtatgtttaagtatagttacaattacactctttttacttttaatttataattaaaagtatcacctcatttacttatctatttaattttggattattttattaattttttattttttttactgtaatatgcagcagctttcttttaaattattctctttttttttttaataataaatatgtattattttatgttataaaaaatgaagaatacaaactcttcttttttttttttttaacaaattttgcatcagatttttttttttgaaatactatttgattttttttcatattgtagtattctttaaattattttttatttcatgtttgttataatatatatgtaaagaaacaaaaactaaactacatgttattatgcttagttaataatatgtgttagatcaatttacttttatttttttaagtaaaaaaaattcttttcatgaataggcaaaaaactaattgatttaacatacatatacatatttgattagagagaaatttgagaacaatttaagagaatgtaaaaaaaataataaaaaaaaacacacgaattttattttttaaaagaatgatacgaagcaaaaaaaataaaaaataaaaaaaaaattggtgcaaatttatgaaaagaaatatgttccatttcttataaagtaaatagtcaatatttattataaaaaaaattaaaacaatgattcattatggtacatattatctattaaaaagcgaaattttaataaataaaaaaaatataatttaattaaatttttctattgtctgaaaaacaaataagcaactaaatagaatcacacattttaattattagtaaaaataaataaattaattattagttttaaaagaaaaaaaactaataaatgagatgacccattttaattatgattaataacaactaaataagggcataattgtaactatttttaaacataatttataaggttacacacgtcactcaattaagaagagagtgtaaaagagagtgcaaaagagagtttccttagcactcctcatcaaataaatgagccctttctctgataccaattgttagcccattatatgttttcaagagggggtgaattggaaatttaagctaatttcaaaaatttaacaaccccaaagataattcatgcaaatattcaagtttaatgcaataacaaagataatcaaaagtataaacaaatgacaagctagaaatataaagagtttaaggataaaaattgtaaactctcaatttttacaaggtttggtagaactaagccacctacacccttggtcttcaaagctatgacctagctttgagttcaactatcgagccaagttaacgaacttggctaacccttacaaccaggtaatttttgcctaggttttctccaaacctctcacaatagttttcttccaagga

SEQ ID NO: 83178 - DNA, 562 bp, Cannabis sativa
atgccacgtggcattcaatttgactttttcattaaatagttcaaaatgaatataaaaaatttcccttaagtcagtttttcatggtttacataaaactgacttattatgcgttgccttctcattttctttggcacctttccaagcatttcttttataacatacaagttgggggtacatgttttgagtcatgtgtattacgagttgctcctttgtatttttcatgattgatgcatggcagagtagttactacaacttaatgaattgagagtatgtactacgattagatgcataggaatatttactatgattagatgcatgagattacatactaagaacacaagcatgagtgtacaagcataggagtgaactacggccaaaagcatgaaaatgtactacgaccagaagtatgggagtatgttgagccttctctcaaagtttcttttctcttgaccgataagtgtttatgggatcaggagaaactctcctcttggtttcgaccttaggatgaggagagtaaaaatatccctccccgatgtacggatatgttttggaaaggatctgt

SEQ ID NO: 83179 - DNA, 1104 bp, Cannabis sativa
ctaacaatttattaaaaatataaaataataatacaaacatgttgcatgaagggatagtagggtttatataggctagagttcgggtccgaatataccgtgatccatttagattttattgtaaaagcaagcccaataatggggtaaaatacacaaatacacgagtatgatgcccactaaggatttccagcttatgaggagacgattccgtatttctgaggggaccttttgttgcaggatgcacggaggtcacgcttggcaaacaaaggtatcaagggagtcgtcagacaaaaggggtgtatgaaaatatggtggtggttcgcgcactaccatgatctgacacaaggaacaatatcttatcctgtgtcagagaggtggacacgtcattttatgggagacatccgcctcctgtctttaggtagaaatctggtactcaccctgcggtagacattcggctcctagtctgtggtagacttctaagcatcatcctatggtaggcttccaaaagtatttcgcgttgcatgcctccaggtgtacatttatcttcattaagagatatccattctttttgtgtcccagaaggcttgggaggcttctggccttggaataaaattatgtccccgttgtaaagttttgggtcttcattggtgttgggcatgttccatgttttgactgtccttcccagagcaggaaggcttaggcccaactttaagttatagttacctttagattatacctggtgtctatcttgcgaaaacacaaataacagtagtcttttctctttttgacatttagataaattatattcaaaattctttataagatggtgtacatcataattttttatccacatttcgtatcatgacacatgaattttaattaggaaaagttgagaagtcattagctaaccaacttccttaattgattctccgggaagatagaggcaccaacttcgcgggaagagtcctcgtgaaggagagtcccctgactgctagctacatggagggtatccgtgagccaaggtctccctctcttctaagaactaaagttatctactcatgagaagaatatggattttacaaaaagggccaaggcattccgagacac

SEQ ID NO: 83180 - DNA, 1376 bp, Cannabis sativa
cgagctgcacagtacgtttaaaagtcacgtaatacgcctaaattagttagggtgttacaccgcctttgtcggagcaccttcgggtagttgatttgaaattgggagatggtacttaggatgaaccatttattagtgcggtgtttaataaagatgatgctgagatgattctttcacttccgaactcggggtgggatattgatgataaaatcctttggcactatagtaaaaatggtgagtactcggtcaagagtggttatcgtatggcatgtgaattgaaggcagaaagacaacaatcggatgaccatcttgctgtccaatggtggcggaaattgtggcgcttaaaaatcccgcaaaaaatcaaggtgtttgtgtggaaattggctcatggttggcttcctacctctactgtgttggctaaacgtcatgtatctactactggcgggtgttcgaggtgctctccccataattcagaaataatctttcatgctttttgggagtgcaagaaaagtaaagtatgttggaaactttgtgactttcaacaagaaattaagcgacatgggcaagaggatgaacttgctttcttgatgcggctgtcaactatgatgagtaaggaccagtttgaaatgtttctggttattacttagagcttgtggaatacccgaaatgcttgtatacatggtggctttgtaccacagccggcagagatggtggaatggtgttataagctgctgggggattttcagggagggggatgtcgtcctcaagaggccatgcgcagggaggaaggagtttggaaggtgccgcgacatggggaggtgaagattaatgtcgatactggtgtgaagaaaggggctgggtactcgggactggggtgtgtcatccgtggtgagcaaggggatgtgctctttgcttcctcgactgctataccacgggaatactcgccgttacaattggagctgatggccattttgaaagggatacaagctgggctacagagacatataatgcattttagcatagaatcggactgtttggaagccattcaattaatccaaaaaaaggaagatggctgccgtgatgttgattgtttgctagaacagattagattgttgttgtctcatgatagtgtgattggtatctcttttgtatttcgtgagaccaataaagttgctcatgttttagccaattatgctttggttcacaaagttagtgccatgtggattgtggttattctcccttgtgctaatcaagctattttgcttgatttgcctaatcctgtttagtggtgttgtttaatgaattccctttccaaaaaaaaaaaaaatatatccatactatattaacaacactactataaaagtattatattaattaaa

SEQ ID NO: 83181 - DNA, 831 bp, Cannabis sativa
atgcattataataagaaaaggaaacaaagcttctatgtgaataatcttaatgctagagaaagggatataatcctcaagatcaaccgtgaatgatgttggatgggttttgccgtgtttaaactacataaaaaaaaaaaaaattacttttggtagttcgaacataaattttttgtgatttttagacacattaaaaaattatttgtgattaaaatataatatttagatataatttatcattaatataattttaattacaataattattgtagataaaaatatatttaatcgcaataaattgttatttttgtgactaatacttttagtcatggattttttaatcataatataaataattatttataattagttataatttttttaattttacttacaagttttgttgtaactaaaaataatttttttcataattatgagtaatttagtggttgtttgaataaaatttctaattctttgttcaaataaaaagaaaacaaagcttctatgtctatgggtattggatagatatatagaaagatttaaccttgaaaagatagagatgggatgggactatgcaaaaaaatgtgcaaacatgcaaacaattgttttatttatttttttttatgaacgagtctatttcaatcaaatatttaaaatttttgttactctgaaaaattggttcttgagtgctttaccattttttttttaattaaagtgtcgagtgttttacattattatgagcaactttgttaacattaagcattatgctaaatccaagtcatgatgatgaaattatgattttggggcgtctgtattacacaagggttggaatga

SEQ ID NO: 83182 - DNA, 1746 bp, Cannabis sativa
gtccatgcttaggctttccaattcgaaatcacctaggcagcttgtcaatacattgatatttcggtaataagtagaattccaagttattggtgcatagtgagaaatgcctttgctatccttgcaacaaaaaatacacagtggggcactggtgcaaaaataatgaaagggttaattcttttcaatgagtaaaaataaaataggttaaatattttaaaagtgacaagagtcaaatatgaattgtgtttatttgactaacccacatacaatgaagttgaagttattgccttaatcaaatttttatcctggcacctttttagctcagatgccatatttagaatgtagtggttggaatccttaatgtatgttggaaaatgtataaaatcactcatggtgaggtggtgacaaccctgtaaggcattcttagttgtgcaagtctcaagacaacctttaagcatgaggaacacaacgtgctctagaaattaagcaacctcacattaaataaaccaactacattagtggatactataggcaactacaacgatttataatggttcaagtcacttttcacatgccgctgcacttgaagagggagctccaccacgagatgttatgtctattgcaaccccaagaggaagagaagagaatttgtagtttttcttttttgaaaaagagtcaagaatttgtagttgagatgttagtagtaggcataacatgcttgagtgctagtcctaataccgttcgtattttttttccaagaatgaggattgaagttggaggttttgtgttgaatactaatttcttaatcgagaaatagttcttgacaaaatatcttattacgaatatttctgacaactttgggcaagaagaggtattcacctatctatatattttacgaataatcagattggagatctattagtgggcttgacagtagctgcattatgtataagggcatttcccatggggtttggttggtttctgtttggcggtgtgtgtgggtgaaggaatatgtattgagagagatttctaaggagggtatattgggtgttttgtttgtcaattctatggtgaggccaagctgagcatcttggttagctttgtgttggctcttttccagaagggcttttagcatgatagctctctgaactattcgctggttcgctaattggtccctaaacttaaaaatacagcaatagtcctgaatattgtaaacagtagtattttagtttctttgtttttcttttttgctttttagagaaagaaagagggtaagaagagatagtttcagaagttatttaattggagcaatggattttacatttatgtaattccatattgtcatattggcgatgctacatcagcttttccatcaacaattagaagtaaaatcacatataggggtttaattgctagagtttaacgagattagggatgctaaatgccctttccagaattataactctcaattgcacctttataagtggttcttatctgtacactaatcacccctcgatttgtttagcatgtttatcaggtacactagcattaatgttcacaaatagcatcattcttaattttttagtcctctatggcatctcttatgttttctagagggtagctagaccaccacaccttttgttcttcctccaccaaagctagctttagctaacagtagatcctagatgagaatcatcacagcgatgagctttcaaagcattaaaagcagaaagtaatcagactctaaac

SEQ ID NO: 83183 - DNA, 609 bp, Cannabis sativa
ttttaatacaatataaattgtattatttaatacataacaaattttcaatattaacttgtagtataatatttatgattcaatatttatgtgaagaaatataaggttcaatttcaaaactaattagttatgagtaaagtagcttatctttgtatatatgactcaatatttttatatctaattcatggtgggacaatgttctctaataatgcatcagctacctgcaaggtaagataccctcccagccagagccccaccaacactcaaacgtgtgttggctcgtggcacacttacgttggggctatgcatgcttagtttggtgttcgatcattagtcaatcaagtcttgcactaaatatctcattaacattaagtaagggttgtgcgagcaagtgtatatctacttggagtatccaattaaacagctggcctttgacaagacacaaggtgatcacgttacacgtagcctcttggccaagaggagcaaaggagcgagaagcatatatatattgatagctgggaagaggacgacaacatcctttgacagaaaactatagtgaaagaaaatttagaataaatataattttagttacaattaaaattttataggaac

SEQ ID NO: 83184 - DNA, 1058 bp, Cannabis sativa
aaaaattactaattaactaaaattataaaaaggagaagaacaatttattggtgcataaattttttcaacgattcatgcatatgggcattggaaaaccaatatatctcatataattcaaaattataagtataaaaaataggagattttttattataggaaaaattaaccacctctccttttctttttcttttttcttaataaaatggacatattgaattttttaaaaaacattgatgagtggattcaaatttaggacctgctatatcccatataatgtataaaagaatatatgacatcaaaatcaccttgtgaaattaatgattaaatataaaaaagaagctgaaagaaaaataaactcacaacaattagtagtatcttcacctcagtatcagtgatagaacgaccactcgaacaaaatccatcatttttagttcttcaaatattaattctaaatttttatcagtatccatcaaccacaattagaatatttatttgatccagtctattcatcttctgacaagtagtgagctatccttaaaataaataaatgaaaaaaaaaatgcttgagagaaagagtgttctaactgttaaacacaatcacagtttatgagcattaaaaacaatatcattttacttaccaaccaacattactcatagtcataaatccaaaattaaatatttatttagagtatcaagtgaaataaatgcacatacctcccaatccatcgatatgagccattttgcttcaatgtttccaacaagaatcaccaccaaagatttcaaaattagagccaagccttagaaccactatgtggagctatcccttctttttttttttattaccatacaccttaaaaccactcaatcaccaataacacacacatatatatacatctcatgcccttataaccctaaggggttattcactaatagggcttattaactaatgttttactgtttttaactgtcttttgttttctgttgacagttagttaaattcagttagtttctttaactaacttctgttttgccttgtaatctttgagtataaataaagt

SEQ ID NO: 83185 - DNA, 897 bp, Cannabis sativa
tcgatgattttgaaacttttattggactaatgatatatttttttaatgtattttaacaagtttttaaaataataaacgtccactttacaaccgttctaatgccaaaaattttataaaaattaataggattttaattagtttgatgtgttctacagtttggtaatttcaaaataattactaaagaggatgatgctaaataatttataaactgaactaaataatatttaatttcataactaaaaacttctaaaaaaacctttagtctcgattataaactgacactaaagaaaaaaaaaatatatgcacactttaagtgtcgattgtaaaacgaatcaaaattcattaatttcagtttataaccgacacctaaactatgattttttgttttggtagaataggtgacggttcattgttttcagtttaaaagtaactccaaaagtatagtttgtagtactaaagttgagtacttaacaccttaaaataccattaatattttcttttcaatataactacttgattcaaagtttttagtttattccataaaaaatgctggaacattgaaaactgtcaaccaactaactcctacagttaattagttgtttccgtttttactgtttgtacctaactgtaactaattctgttacattcttgctctgtcttttctttaggttgtttctcaatttctctgtatccttctctctataaataatggaatggttcttctctttggcttaacctttacaagccttagagactttgtcttcaattgtttttgtttaatgctttctattgatagggtcatacatggtatcaggaagccattgacgcaagtctcatatggatcgtcaaattctcgaaaatccacctcgctttgctgtttgaaattattttaccagg

SEQ ID NO: 83186 - DNA, 796 bp, Cannabis sativa
ttaattagtaaatctagtaaatctaattatttttattatttttaaattttaaatgagttaatgagttttatttagggtacaaaacccaacatgaagtgggtacataatgtgtatgaagaaggaaaattagtagaattataaacctatacctttcggcagctagtattggcgcaaactggttgcaatcaaagaaagagcaagtactttatttgatacagatcaattcacaaatgagaggttcaaaattgcctatggttatcaagctcttcgacctctaatcaacaaagttacataaagttttacagtgtggagtcatcttaattctcctaaatatagtttcatcctttggctttctatgcttaaaagaatcaacactaaggatcggctccaacaatacaagattattgagaatgttgactgccttctttgcaataatgaaggtgaatcggttgagcacctcttctttgaatgtgccttttctttggaatgtttgatgaaactaaaagaatggctgaactggaacatgggtgcttgttaaaatgttgataatattgttgttaaagtcaaagatgtaataaaaaaaagaattatatgtatatggccaaaaaaggctactaatagtgaaaaagagtggtttaatactatgtaaaggttttatagatgtttagattctccatcaattggagaatgctattaccctattaggttgtacaaatcgtttttagtgtaatgatatacttcttattcataaaacaatgttgaatcgtgcaatacgtgtggagagagagagagagag

SEQ ID NO: 83187 - DNA, 2693 bp, Cannabis sativa
actaaaataattcaaaggaaaacattcaagattataccttgatatcaaaacaacttctaccccttgcaactacaatccaattgttgagaatttaagcaaaaaaaagaaaaaaatccttggttgaagcttcttagggcttcgggtagaaagaagaaagaaggagggtgatgtttgagaatttcctttgtttttcttttacacctcataatctcataatctaataattatattaaaacttattaatatattttctattccagccaagtcaaactaaaaaaaagccttcattatccattcaaaagacatttataccctcccaaaaatcttaaacttaaaacaaaagcctagggcattttggtaattttactaatccaccaaaccgacattctaaaattttaaactagtccaaaatatcctcaaaataattcccccaataatgttgtgacatttctgaccacatcgctaaatttcaacaatcgtcgggcccgaaaaaaatatttttattttaaaaatagtatccccgatactcacatatcccaatataatctccgtaattaataaattacgctttataatcattcaataaatccttactagttaccctaagtaaaatcataatcttacttcattaccaaaataattacatattaattaaaatatgtctttttaaatatcattttattttttgggatattacattgcattacttggcctttgaggtaaaatccttgatgatgtgtgctttgaaaaattatttaggcaaatttttttggaaatatttgtacctttcaagccacccttttagtttttatcctagtttacccttctttgagctttgacttattttattctttatttttatacatatcttgtgctaaaaaatgaatccattattatctatctttgtccctaactataacataagtagatcttaagtttgaaggtattgtgatggggaaagtttatgcatgttatgtgggaaataaaaataatattgagagaatttcaagaaaaaaaaagttatttgtaacaacttgaaaagaaaaaaaaacaaaattttgacaatatagtggcatattgaaagaaaaaaaataaaaataaaaaatgagttgttgcaaggttatcaaaaaaaaggttctctcatgtacttagagaaaaaagggatattgtggttatatgtgaaaattgtagggtgatttgattgaagaagcttatggtatacgtgagcctaaatgacgttgttcatctacccttacctaaatttaacggtaaaactcattaaagttcttttgatttcaaaacatatgttgttgacattagtggataaggctgaataatggaagtttattgataatcaatttttcaataagttggattaactttgagcatgtatattaatttctaatggtttttgacacttgtgagttatatttttattccaagtttgagagataaggttagtattggagaaattggattgaaaatctcgtattacaacagttgagtcatgcaagtgatggcagtgtggtgtgaataaaagttaaggcttaatttgtttgtctttgttcatttgtatttagaatagtgtcaatatttactcgagggcgagtaaagattaagtttgggggagtttcataggcttgttttaagagcattttatgaagtgttttaaaaggtgtgttttagttgattataattattttgtgtagaattacggtttttttctacttgtttcaggtgtaaatggtaaaatttataatatgaactaaaaataagaagaaacatgttaaatgaaatgaatatgatagatttatcatgaaatttggagttctaagatataatgggtgaaattttcttagttttggatgctcaacacgctctgtttgtgatcgaaaattaagtatgaagttccaagctaatttttgactattatttgttcacttttaggaaacatattgtgaataaaagttttagatctctctttcaggtttccaaaatatcttgaatcgtccaattctaaacaatagtaagagagttattgccaaaacattatcagttgtcgcactagaaatcatgctgcccaaaaatagccttcaggggtcgtgacatggagggtcaatgtcgtggcctgctatggtcagaatgaaaaaattaggcttttaaaccctaatttcgagatttaaaagagacctttgatactttttgagaacaacactttaagggataaaaattgaaagtagaaatcggctatggagacttttaacaatattttttcgacgagttctttcttctactttattttcttatgttcttaattaattttcatcaattatttataatgaatatgagtagctagaatttcgattagggtattgatggaggttgtttgacactttattttagtttaatgtgattcatttctttcctaattttctttatgtatctatttcaaatttcttttaattttctggccatcaactaactatttatgatatcaatatgaaatatgagaagtgagtattgattgttttatagtaaaataaacacatattttgatataggatgagagtacttataaggtttgtgtagcatttaggatttttgagcttaatgcctcctatgtctttaaatttatcacgagagtagaaaattttcatataaattgagatttatatgccctaatctaaatataa

SEQ ID NO: 83188 - DNA, 893 bp, Cannabis sativa
ttgccttgtgtgtgggatctggtttgtgctaatgttttgttattttgggttttctttggtttggatggtgtttgaaagctgttttggcatttgtttgggtattgtgctctaatattggccttgtttgaagtggcatgggttgtatgggcacgttggggtgtaaatgggcctcacttaaattggtatggacctcatctgctgggccttcatcgacagtttcacctccataaatttctccaatttcatccagtgtcccaataatttggacactagaatcagtatcttcatcacttcctccatcaacatcttccatgtcaaattctggcatgtacataacaaactcatcatacccatcatcaaaatcaccactccaatcctctaatttatctgctaattccacctcaacctccctcattactgctttgctcataacatagtcttctggtctggcacttacctgagcatcaacagtgacatttgcatcatctggtagctcctctattatgcatcttctcaacttaattccaagtggtgtattgttcactgttgtcttaggaacttaaccacaaacaactgctaatctagcactgtttcctccaaaagctccagataaatcagcataaacattaaccttcctatatctctttcttctcatgtcctcgaacatagccaacaaatccttgtcagtcttaagcttaaatccatcatttagttgtttgtctttaagcataaactagaaatgaagaggagatccatgaccactgaacttgtgaaagcattccttcaagttccatcatgttgaacaaattcgtatgacacttgtcaaactcggtcatagtgccacccacatagtgtttcaaactacttttattgcaccaagaactcccatggtg

SEQ ID NO: 83189 - DNA, 937 bp, Cannabis sativa
tcccaattaactgacaaagaattacaggatttaaaataaaaactaattaaatatgctaataatttgggtatatattcttaacaccctatacttaaaacatgatatatcgttgttataatacttaatattttatgtttatttagatctgattcaattatataaaaaatgaacgttagtgaatttactatcattatactaactgatgattatctatgaagatctaggaaatcctgaaattaaataaagtgaagtagttaaacaagaataaatgaaatttttcttttttcaatggtcttataatcgattaataattgattgagaaatttacagttcatgattttaagccaaatcacattggaacatacataaggcaaagccatatgcatctcaatattattaatttgaactagtttattgttcctgcaaaagagaaacaaaataaatattcttataaattaattatttgaactagtttatatatactatttattaatttcaactatttattaattatgatccatttttcaaaatattcgcttccaaattattattattattaataactaccagccattaacaaaataaataaataaaatatgtaaattaactaaaatatatcatataatctatttttcctttagagggaatcatatatctctattaggatattactatttagatacaataggtcaaattcaattaatctaagtccatttgcacgatctaatctagtgaatatctgcatttttacggagattgaattggaaaatccgtatttgtgcggattaaatgttaattgatatgtaaaagtaaccaattcaatctaatttacacatttataaaaataaataaaaaaattatatatacaaataatattttaatgtaaaaatttaaaaatttaatacatataattatataattatatttcaaaacttaa

SEQ ID NO: 83190 - DNA, 843 bp, Cannabis sativa
tgagatcacttggttacaatatctactttcagatttacaagttccccaacactcaccagccttcatatattgtgataaccaatcagctatacacatcgccaacaatcctactttccacgaacggactaaacatattgagcttgactgccattttattcgtgacaagattaacaactccacagttcgactcattcaagtctcaatcactcttcaattggcagacgcattcaccgaacctctgtctgctccttccctcaattctcatatcagcaagatggttgtgcatgacatatacagtccaccttgagggggggtaacacgaatcactcaatcgtctgctatgctgctttagttcctttcatattattctgtatcagcattgattagttagttagttggtttaactgttttgtcagttaactgttttagttcgttggttgttacaatatctttgatttcttgagctagttagttcactaactaattaagtctcacaacctgtttctggtgtatatatacccttgtacatacctctctgcaatacattcaattcattcttttctcttttagaaataaaatgcttcttctctcttttcgcattaaggtgtttggaataggttaatgttagcaagggaatggtaatattaaacattactttgtttgtttggaaggtttaatcttaaaatgccactccctagtaatataaatacccttaaagagggtaatgttgatatattaatttgaataacaattttaaattaataaataaatttaaataccattaatattataatttattgtaaataaaatattacgatatatatatatatatttagtctgtaa

SEQ ID NO: 83191 - DNA, 894 bp, Cannabis sativa
tttatcgggcatatatgggttttaggtcgggctcgatgcccgtccaatggggtacctgatgggtaaggtctggagattgaagatggggtgcttgatgttggcctaatataggccgatataggccctatttaccctttttttggcgttgtgctgactaggcatgatattgtccgatacctagtccaatgggcccgataccccatccgatgtaggcccgatagtgatgatttttcttttttattttttgtctgatatatgtccgattgtggcacaattgttggcacgatagttcatgcattttttgtgttttgtccgatatattggtccgataaggcccgacagtgtgaagtagaatctcttacttgaattttcttgtgtttttttttccaaaattcaagaccgccatgccttataattctagtgtcagagtattacactgaccgtgtcacttggcgtggtggaagttattactatctaaagatcaaggcaaaatttgacgaattctaattgtgggataaggtgaaggaatccccttttaaacaattcattgagaggaggccgctaaattggggcattgatccatcaattattcacgcacaagatcaaatttgagaagccagatgaggtacacttttatttgcaaagaagagatgtagatttagccgggtcgagtttgcaatggtgacgggattgaacttgttacccgagcctacggaacaagagattgaagagaaaggaaatttggatcggttgattatcgagtactttaatagtgattcatccatcagctttggccaactgcgtaaagtctacaagttgaggatggccttgtttgttatgggcgtcctcactgataaggaggagaagactgtcgttcctccatttgtgataaga

SEQ ID NO: 83192 - DNA, 593 bp, Cannabis sativa
tatatgaatattaaaatatagtaatttttaagtaactaaagtagatctgtcagatatggaaacttaagtgaatgaggcccatgagaagactcaacgactaagtactactactacactaccaaccatatctttattgaaaacaaagaaggtggaccctaatattgggcttatctttaatccacacaaatgggcccagtgaactctgaaaccgacttccgtcggcccaatcagacaaatctcaactgtccctttcagtgaagaaggaaagaagatggaagcatctaatctaatctaatcatatctaactcactatggtgcaatgtacatgtaatcttaaatgtcccttcctaatgtaccttttttaaaaaataaatatagtacattatgttttggtagatcttttatttgtttggtatttaagagaattttttagtttaattttttttcatgattgcgtatgttataactatttaagtcttaagaccacttgtaaattttcaaaaaattctgagtaatttacaatgttgaaaacaaattttacatattttgatgtatgctcgactatttttttttttatacgcaggtaagtaact

SEQ ID NO: 83193 - DNA, 613 bp, Cannabis sativa
gttcaaaaaatgtgattttgtaaatatattaaagttcggaaaacacaatttaacatatgaaaaattagtaaattaccataataatagaattgaattaaattaaattaaaatcctcaaatccaataatatcaatagttcaaaaaaaaaaaattaataacataaaaaattcagaagcataatttagtacatgtcaaaatttaagaaataaaattctaaattaacttatataaaatggtagaaaactctaataactacttaaactaaggattcaataaaactccaaaaagaatatgtgaaatatactaagtgttaaaatcatataaatatcaaaataaagtgcaccaacaagtaataactatcagatcttctaatacaatatgagaaataacaatctaattaattaaatcataaatgagaaataagaattttgaattttttttaataagaatttaatggtatcctttatatacacgacttgaaaaagaaaagagaatctgttatagctaggttgcttcaccactggcactgaactgagtgccttcatttcactatctcaaacctcaaatccatttggttactaatttacacaaagatttgatcttccaagattaag

SEQ ID NO: 83194 - DNA, 1912 bp, Cannabis sativa
  modified_base (52)..(61): a, c, t, g, unknown or other
  modified_base (212)..(214): a, c, t, g, unknown or other
  modified_base (282)..(295): a, c, t, g, unknown or other
aaaatattcccaacatactccataaattcgatattggtaaactttgccaatnnnnnnnnnnggacataacacttatccaaggtatgagtataccttatcgccgatgatcatgtcagtttgaatccagttaactgacaaatcatgggaattaaacttttaaacatataatcatgattatattccactatcctgacgacactataatcatgaannnatatatatatttatatatattctggacttaataaaatttatatattaaaaataatcatgaaataaatnnnnnnnnnnnnnnaacataaaatgatttatgatctttcattaattagtaaattttattatattgaaatgggttttatttagggcaaaaaacccaacagaactccgctggttcacttgaaagggagcgccacctggaaagaactctgcacgaataacgagtaggcactgaattagatcccccaattccttttgcatgcaaaagacggcaagaaaagagaaaaataaagttgtagagaaaaaatgaagctttgagtagaacgaataaaaattaataatatcgccacagacgattttatttcaaaaaggagaaagggctccacaaatcaacaactggaagaagttatagtagatccaatggctagggaaacaaggggtcccacacgttgcttctaggacacacaaaaatgtcaaggtcctttttctcacgtcatttggctgccagaaacgctccttatttcttgctaagcacgctctgacatacataaagaggagtagaaaacactccttgacagaccgcatggttaccacgcgaagggaaataagtatcataagtatcctttgaagaatacagctcatttgaggaggtttccatgactgcaagattgcagcacgtgtttgcaatcaacatcctagacaatagcaagcttccatgacccaaagaatctcaaaagcttgggggtaaatgttatccaattttctttcgattagacatgtggcaataccaaaatgggaacatggtttccacacgaggcatctaggagaattaaaagatataactcctacacttggaaggagataagaggtaacgaatctcaggagcaacatcctcaactaaggaacctgaaaagtggtgtaggttccaggtcacattggacacgtcagttcctcacaaatttaatctggattgaatgagtcgccctacattttagggataagttgaggaatatctcttttttgtattcattaatcaaacatactcttatattatatttcattaaaatctacctttgtgagtggattgcccaatatacatcgctaaatgcgaataaggaggcaccagagtaagcgatacgtatcaaccgtaaaagtccttagcttgcaataagcaaactaagtgaaaaagacagatcggctcaaagaacaagtaagagaggtgaccatcttgctatgggaagacttcctatagcttcatccatctaataggagcgaggcttataaccccggcgagtcaaaagaattctttgtaaataaccgcgatcgacacaagacatacatcgtcgacctcggaaggaagaatggtctcagcttgatattgggatcactataatcaagcaactgacgagacatctctagattcaacaattaaagacgtgtttaatacacgatatttttgacccagtaaaagcgagaaaatcacagctatgcgattttcaaatcgtaaaccgcatttacactataaaataattaatcaaatcccacgatttgagggatggttactgtaaatatattctggtcaactttgtaattaactttctactatgtaattgtaaatagtggcatataagctcaaaaaagggacgaaaaaacttatatgaaagaggccttgaaaaaatactcagaaatctgaata

SEQ ID NO: 83195 - DNA, 766 bp, Cannabis sativa
gagctgggcattgaaggtgtgtagattggtgagctaggcactgcaagcgtgcaggctggggagttgcgcgcgcactgcaagtgtgcaggctggtgagctaggcgctgtaggctaaggagctgagtgctacaagaaagcaggatgtggagctgggcactacaggcgtgtaggctggggagctgggcattacaggcatgcaggctagggagttgggagctaaaggtgtgtagactggggagctgggcgctgcaggcgtacaagctagggagctgggtgataggcgcgcgggcgtgggcacggggagtttgactcgtgcttttgctcctcctcataccaatatgtctccttgggtgcattttggaatttaaatttaacaaactttcaagtataatgactttgaaaattacacttagtaattttttagtgtcaacaaaaactttatcaaagacacgcaaaactgttatatatattaatattttttaaaaactaatgaatatatatacttatagaaagataaatagtttaagagtttgtaatatataataatttgaagtaataacttaaaaactctgacaaacaagtttttgttgttttcaattttttttttcttgtgtaaatgggctaaaaaataacttttaatatttcaaaataagaaatatatttttttttaattaaggtgccaaatactattttactctaggatttgagttaatttggccatgaagagtctccatcccaccttaaagaatctcttttatgtcacata

SEQ ID NO: 83196 - DNA, 1106 bp, Cannabis sativa
ttcatgggtaatacctattaagaaatgatccatatatatagagatttaaaataaataattaaattatttattattatttgttgtagattttctttttctttttttttttttttttttgagaaatttctaaaaatgtggtatttaggtttttttattaattatttgattaattaatatttaatgtgattaaaaattatgaaaaaaaaaagaaaaatagaattatttattattatttgtcgtagatattttttatttgaaaattttattagtatatagatatttttagttgagggctatttttattaaaatggtgatagctatatattctaaatttaaatatgaaggcaatatgtataaatatgaattattattttaaatcactatcaatatcaatatctatttatttataaattattctttaaaagtaattgtagatacttcccaatgaataattatgagttctcaccactaaatattaactacttataaaaatcatattaatcacatattatataagtgaaaagaaaaaaatatattttcaaagcctaaacaaaatactaaaatcatattaaacgtaactaaatgattagattttagtgaaattcatttaaactacagtttaagagatgaataagtacaatttttgcacttgagaattcgagatgacaacagcgatcaagactgataaaagaattattgcatatacgaaaaaaaaaaaaaatagaactttaataaaatactttttttttcttcccatgcaatttaccaaattaaaaatctctatctatatcattgtaaaaaaaaaaaaaaaaatctatcttcatatttttcaacaaagaatactaactaatataataatatatgacattacattatatttcataaagaaaaaaaaaaaacccatttattaaattataatagttatcgtgggaatttgaatgtgtttagaaaacaaaaaaggaaagaaaaatgatttgaaagtatattaatataaaaaaaaaaaacatatataatatacatacatactcttatattcttatattaaaggtgtttgactccattgaaaatattcaaaggccatagtaacttcaaatcatcaaaaaata

SEQ ID NO: 83197 - DNA, 1980 bp, Cannabis sativa
aaatttaaagaggtttggcctcgatgttggtcatagcctactccccttgtgttttattaatctgagttgcaaaggccaagaacaggctcttgattgcaaataatgagaagtgtttatttttctaagtgttcaaaattgcggatccccctcttaggtcatagatgaccccttatacaggggagagggtcggtgcttctcgcttcaggagaagcgaccaatgcggagctacctcaatcatctccttgatttttagaggtagttgaagtctgattgttttgataatatctcgctattttcgagggttgagaactgtatttgagccttccataggatttgaacatttgaaagagttattgatgatgagggtctcttatgggtgtgacatggttgtcgtccactttcggggatgaagcccatacttgggggaaacacccctgaaaccccaacttaaggagggcgacaatcgtcatcgtggggtgaccccccgagacccaacttgaagggtgtgacaatcatcaccttgggatgaccccccctgagaccccttgtctgttgtcagtattgatagtgtattgtggatgtccccatatacctttgaggatttcattgtgtctatggtaaaatacatgacttgtaccatgagggtgtagggggtaggggtatacccctagactaaccctttagagggagtgaggggtgtacccctagactaaaccctatatagttcattgcagttgaggtaggggtagtagtatatacccctagactggtttgactctcgtaggtgtgtggtgatcgttcattctgcttacgagggtattaatccatcatttatccttcttggagacgcccaccttactcaagctaggggtaagggtgaccgtctgacttccactctaacggtcatgacacccttcatggttgacggtcatgactttacatattcttcattaatttagtctcggtatttttgttccatgtgttgctactcttaacatgtcatcatcgttaaaatttgggtaaacatttgccctccaagtttctaatagtatgaccatacggtaggaattttcttgtatagttcgggtctcgcttttattgttgacggcttagcacagcaacatcaaaaatactatgcctatactaaaattacattccaaagatccaaaaaatatttccccacccattactcttttcacattttacaatatatatcccaatcataattttcctagaaaaataaattacaaagaagtaaataaaatcatttacaaagaaaataaccaacaaaaataagtaaattgttatttagtccccaatgatagtggagggctataatagcaattttggggtaaaatgccctctttttgcaaaaataaaaactttatatatcatttcttcttagtgtcataatattcaaaaaatcaccaatttttttcttcttagtgtcatttcgggttggagcttcccatcactattggaggagatcttgaagcttttgattaattcttgaaagctttgtggaacatttcttcattatgggtaagttttcaacacctctatagccattttttgcatagaaatcatatttttggtagtatttttgaaactttttcttggctttcttgctatggccgaatttaatatggttgattgggattcttggattttcttatgtaatgtgagtgtttgatgcttggattttgtagtatagatggtgggtaatgtgtttttggctttgatttggtataatttggtgaaaaatgaggaaatttgaaacttttaggttggttgtgttcttgaatattgaagaacactatgaacatgaaaaagtttcaattgacctccaattttccaattttgattctcgtaaaatgggtaagaatgtgtttgtggggatgtgatacacttggatttttttttgcttgaaaacactttgtatttcgaggagggtatggagcttccccccccccccccccc

SEQ ID NO: 83198 - DNA, 690 bp, Cannabis sativa
ttgtgactaaaagtaaaaaatttttataatgtatgagggaccacaaacatttccaatgacttgtttaataaatagttagtaattacacacacaaaaaaatagtagttaatatttaaaatgataagtttcaatttttatgggtcatgtgaattaaggagtataaattttttaattacattcaattacacacttatagtgtaattaccttaaattacacttaaatctattttttttatggctctccaaacacactctaattatattcggccggcatgagttgttgggacttcatttgatctcctagtttttttttttttaatttttacttcaaactcctaaatcttttttctatcatgtgcactactgtatataattatcatatatccatattgttaaaagttttttgcggctaaaccctcctaactatcgttttacttgcacttaaccatttaagattaaattttgacagtaaaaccttttaaactactgaaatattaacaaatttaagatgtcatccagttaactacaaccgtgggttgtttatgtgtacactcttgtacacatgacacgtttatattgatacacataatattttaatgtaaaaaatatttcaaaattaaataaaattataaaaataaaaattaaaaaataaaaaatattatgaattttgaaatatttttttataatttt

SEQ ID NO: 83199 - DNA, 524 bp, Cannabis sativa
tggcgtcatctgaagggtccgtagaggtaggattacgtaagggagggtgtatgataaggaataagaaagaggaagagagacctaataacaagtactcaacagaagaagaatcggcctctgcatgggccccagatccattaactggctattataggcctggtaatcgtgcggttgagatcgatcctgttgagcttcgtcaaatgcttttaaacaataaagtcaggcccctttaattacattataatttaactcttacatatatatttcctaatactatattattactacaatacagctctaaaggattcaagatttatgatctttgtgctgttaattttcaaaaatctaataatatatataaaggtcaaattatcattatattatcttgtttctgatgattgacttgataacaaatttactgtaatttactaatcggtctaaataacttaatattacaacaacctataaaggtaattttaacttaattttacatgtagacaaaaagaacttttaaagttttacaa

SEQ ID NO: 83200 - DNA, 772 bp, Cannabis sativa
aagaagataagaaggtacgtaatacatataaacttttgtgtttttcctttcttgctatctaattaatcgataaaaaaaatttggaatgtttttttttctttcttatatgacagatccaacttaaattgcgtcaagtcctccttaaacacaaagtagtagacaaaacgatgaggctagcctttctagctaggtataatatattgtattagaattattatattttttaattttaattgatttttatacaaagtcaatatttagattaattcacaaaaatattttaattaataaattctcacctatattatgttccaaactcactactcaaattatatttatctttccagggatccagattttattcgaggtacacaattttatttctatttaattatattatatataactatcaattttatttggcatgcatatatgattattatgcctttaaattcttttcatctaacatatttactaaaaattagtgccggtaaatcctcactatgaacaaatattaatggaccgcgaaaaaataaaggaagagaagagaaatgagtggaatgaaagaaaaatgttcttcactacaaaatacaaagagtctgctctagttgctgccacattaattgcaacagtaacatttacagccggtttcactttgcccggcggttatttaagtaatgagattggaaatcaacaacaacaagttattggcactgctgttctcaggaataacaaagcctttcaagcgttcatgataacagacacaatagcc

SEQ ID NO: 83201 - DNA, 733 bp, Cannabis sativa
tcaacctccattaaaaatacctcaaataatcacatacgcatgatataccttttaaaatcttcatagagtgatgtctccttctttgtgctttcccaacttacccaacactttgcttgcaagtgaccatgattatgttctctaaaatacttggataagtctctgagaattgtcaatgccaattcatagagttaacatcgggttaaccgttgactaatcttgaaaattatctttgctaatttttaggattaacacttccacctccaatctataataactctttttaagtgcttctgtagactaagtttggtaagcatcgtacctccacaaccacatgtccatctactagaggcaaagctagactggagggtatgggtttcccgcacctagagctagtacagctactatagccggagctggcagagcagggagtactagaagttgtgattcaggagcttgagggtgacatactccttctggaggatttatggtaccctgctcccctggaacaattagatattcgtgagtcacctcctatctgagatatataatgcgaatccaggcccattgccccaagtgtcttctcttgcaaacattttgatctcatgatctttcaaatagccacattcattggtggagtatcctacttttgtgattgtaatgattgctttgttttattttgtgaactagcagataattatggcttattttgaaaagtaggcttttaattattact

SEQ ID NO: 83202 - DNA, 613 bp, Cannabis sativa
taatattttatattttatcatagcaaattctataatttttattaaaattttgaagtccactgagtattaaaatgagcatgattattagagtatctccaattggagtattaaataggaggtgtattgttattttgtagtaattttcaataaaatgtatgtattatgttaaatttggccgacaataaatattactttttaattacacttttatcattaatcattaataatatattttatttataatattgctattagtaattttttaaatatttaatttattgtttgttattaatgatattttattttttttagaccaatatatctcttaaaatgttattgtgtcataacatttgtctattttttatgctaaatttagcataatatttacattttatattggagatgatcttagtcatcatagtgactagtgtcacaatgaggtgtggtcttttgttagcaattttttataattattaggacttaatattaaattgtattaataacaatataatactatgaatgcattattattaggcactaataatgcccaacactttctataagttaacaaaatttcttaaaaactattcacacctaaaatttatttataatt

SEQ ID NO: 83203 - DNA, 1148 bp, Cannabis sativa
aaaaaaaaaaaaaaaaacttgggcatcttttgagatacaatctctttaaagaattgaaaagttcataggttcccaaacccacagcaattctaacttaaaacatttataacccttagcgggcctgcgaaccagaacccgccccaattaagtttttgtaaaaaatcattagtgtgttccatatctaagttatctactaaagtcaaatcttggttatcaaggcccatatccatattcccggctaagactttgttgaagtttcaaattacacatttttttttctgaaatgataaaagagtattttaaagtggtaagtgttataaaaggtagtattattatatgtgggtgtattttaatatggttaaggtattaagcgtggtatattgttattagttgtacgataagaagtaactcaaaatgccaagcataaaagatagtatattattattaatgtattttaatattaaaaaaaactaactaattataaaatatcacatcataaactaccaataacaatgctattttctttttctttaactaccattttttttattcgttttacatatatgaattgaaagccattaaggtacaattaacatttaagaaattcaaccactaacggtgtttggtgggctttaattgttataattgaactttttagatttgtatgtcaggctgttttttagtataccaaatatttattgtttaatatatatatatatatatatataatatttctcattatttaatgataaaatagtttgtgctaattttcatacgagtgggaaaacataaatactaaatagaagagtgggtgggcaactaaattgaggaataatataagaccaattccttaaatttaacagtcaacttgtaagtgtggctctacaaataatataatattttttacgaatatgatccaatgctaattagttcagttccaaagcattctttttttgcaaataaggtatatagagagattagagaatggcgtatcatagagtaactattccactaatagcaaattaggcaagtaagttgattcttaagctaagtgtcaatttcgtcttatggttttactttgttgttaatcaaagatcctcctacatgataataatttgcagcaaaaagaaaaatgataataataataa

SEQ ID NO: 83204 - DNA, 667 bp, Cannabis sativa
tgtaatatataagtctcaatatgatatgactatgaatatgaatatgtgtggtcacctctaatagggtagtatttaaattggaagttgtaacctacctaagaataaaaaacgtgtgattatatattaaggataagaagggatgagtggatagatataagtgatggtgtgaaaattagaagggtacggtttgtctaagacctgtgtctgtccatggttgtttggaaatgtatttattaaacaagagggaatagggtaggccatgaagggctattgctttaaatttgtaacaactaacaactacaatacatgctttcaactcacgttaggcccgcctaagggtggtggatccacaccttggcccaaaaaaaaaaacagtttaaattaaaattaaataaatatatatatatataaaaaagattttttattattatatactaaaaaatgtaatcattttttttatatattatatcattttaacttttcttgaattttttctacaaatattttttaaaaaaaatgaaaaagcccaacaaaaataaaaattgtcctatattttacattttatttaggaaataaatccaattaatttttaaaaaatataatattttaaacttctatcattgtatatttttaaaaaatgacccaactgatattataattttttatg

SEQ ID NO: 83205 - DNA, 921 bp, Cannabis sativa
ttggttatgccaggatgaaaatgcataagtataattttagtaaactagtacttgattgagattcttgtgtatggttctattaataaatatttttcttgcagtttttgtttgtgttatgttatgcaacacgctaattctcctgagggctatgttcaagctaaggtttcttctgtggctgctcaacttttgaaaaggggctggtaagaatttttcagtaaagaatataattcttgtcgagacaagccaatttcttggcatagtgataatacgtcatgctctaagcattatttgctccactatttcatgtgtggtgtgatggggatcatgcattttggctaattatcatttttcatacaagcgcaagcaagtggattgtttatataattattgacctttgctagagtattatcatcagttgaagagaaatgaaaccattcatgtttgcatgtaggcttgattttgcagttgctgagaaggagtcatttttctatcaggtatttacatctcatttatctttatgttttattggagtaatttgtggcataaatacttaagtttaactcttggttgcagataaatatctaagtttaatttttgacagtaataatactatagttatatttctagaacttccgttagtatctggctgttaagtgtcaagtcattatccacatatcattttcttattggtatatttaaattactttttaaataaaaaataaaaaatttaatgacctagacgagtcagggactgccatgtgatgattgacttgacatttaacttacttaaaagttccagaaatataatttaagtattattaccgtcaaaaattaaacttaggtatttgggccacaaattactcttttatattagtgtgtacatcattaacaaactgctcaagaactatttcctttagtctc

SEQ ID NO: 83206 - DNA, 1126 bp, Cannabis sativa
  modified_base (59)..(73): a, c, t, g, unknown or other
aaattcattgaaatctgaaatttattttaaaaaattaatattaaaataacttaattaannnnnnnnnnnnnnnaaaaaaaaaaaaaaccctaaaatctcgtacaccaaaagatatatatattcccacttcccatacggctctcataatttgcttacttttttcaaaatactaactttcttctataattcataatgcaattaaaacccatctttactcataagcatctcatcccatctaaacatatatgcacatgatgtctacaatttttataaagtgtaatattattgttggtacaatttaatattagtttttatttattttaatttaataaaaattataataaacatctaattaattataagatgtcatatcataaaaatgttaaataccttgatgtctcataggaatgctctagatataattatgataaattgaaaaaatacctcatgatgatataataatatatggtaaatctgagttagactagcataatttttattttagtcacaataaaatttatgattgactaattattaaataactaaaatatattattaaattatgttattgctaaaacaatggtctctaaaactattactaaatgtatatttataactaaatttgtattcatataatacgagttaaattttgttttgttactaaaaataaatataacacaaaaattttggtttcttactaaaaataaatatattgtgttatcactaaggtaatatcttttgttaaaaagtaaaaggataacttcattaagaagatatatattggtcttaactctttatatatacttttgaaaaataatattaataaaaaatatatatatataatctcaaaagtaggaatagtcacatttctggtcaattatatacatgtcatatgaatacttttactttcataaatattctcatcacaatcaaaagataaaataatattttcatttatcttttatcacttctcatatattattatctcttcatcatgatcatttgatttcctttcaaatgtaaacaaattaccttattgctacattgctttaatttctatttttttgaatttgtttttcagttgtatatatcatatcttggtgtgcaaatatttggtaagttttca

SEQ ID NO: 83207 - DNA, 891 bp, Cannabis sativa
tccaattttaattttcagctcagtaatgtaatagtcagaaagttttgaatgtcagattttgaaatgctcagaaagaaagttgtagtgatcattgattgttcttaactagcttttgtgataacacactcatagttgttgaattggaatttaagagagaaaaaaataaaggtatggtaacttatataattggatatatattaagttgttcaggagtatgaattggtgtatgttgaagttgatccagcaggagctgatagttggaaactggaaccagttgttgatcttttaaaagggggagctgttggggtcattcctactgacactgtgtatgttatacctgttactgttactttcttgcttactttcactctgttttttacttaagggaatatataatgggggattggaaattggatgccatttattcatgtgtgacagacccaaattatgatttttattcaagcattgccggtgcctagcaactacaggtggcgccttgttagcaactagatgagcattgttattagcaattattggtgcctagcacctctagacatgtcgatttgcagtactccctaaaagttattatattaaactatataggacccgatacttagttggatatatagtgatattgatacataggaaggtgctagacactattgatgccttttagtatttttcttaaattatataggattcgatatttaattatacaaattgcgatatgacacgttagagggtgctagacaccactaatgtctttaagcatttctcttttcattcggataaatactattttgtaccttttggtttgcaaaaattgctgatctgaacatctgtcttgttaaataataatttggattgagcccaattttagtcaattttctt

SEQ ID NO: 83208 - DNA, 1147 bp, Cannabis sativa
atatgtacaattaatattttaataatacatatgatacaaatatatttcaaaatttaatagatcaaatgtatattttatttttatttataatgaaagtataatctaaactaaaattaatttttttttttttataaatataatttattttcttctttgaatttgttattttttgttttatttattttaattttttgtagagaaataaaataacaatatgtgaaagaaatactttttttatattaaatattaaattgagtatccatttccgattgagatggaaaatcttgtatttaaatattaagtataattatatatgaaagataatatatttttataacatgttaaaatcttaatacaataacaaatatatcaataaataacaggtaaaaatattaaattgaggtacccattttatgacaactatcagcaattaacccattatttttgttcatttagtggcccaacataatgaaggtagttaatcaatatagattgatctaaaatctgattcatttataagaaatttctagttaaccttcttgaaaaatttcttttttaacatcaagtatgttagtactacataaataccaattaaaagtaaccaatttaatctggactcttgcggattgaatttgagttattatgcgaattggattgaattcaaattataaaatccacactaagtggggatcgaatgcactatttgagtaaaataataccgattagattggatgaacactcctagaccaaaattaatacgaaaatacagttagtcgcttatccaacaaatttaactagcgcatataacctccttgaatgttgtataactgcaactttcaggtggttagcttcctctttgtctgatacaagtagcaactatgtggatagaagttggcaactcaacttgaaagtttgaaagagagaaggggaaagaatgtgtacaaatgtgaaattcattatatggaagataagggtaataatacactagccgaccttgagatttggtaggccttagaaaaaaaattggtcattattaatagaggaatttttattgggataattttacaaatacacaaaaacaataaaaaaattataaaaatacggtttcacagaattttaaatattttacgatatttttaattttatt

SEQ ID NO: 83209 - DNA, 1758 bp, Cannabis sativa
ttgtcatgatgattatgcaatgctgcaaatacattaaattaattaataaagaataatttgcataataaatacttaagtttaatttttagcgataataatacataaatatttatactacaaattattcattaataaataaagtgttattaagcttttattgtttattattatattatatatatatatatatatgaaaaaagcttctattgattattataatttaacaactttttttcttctaatatctatatatgtatatatttctcttgaaggaacttctaatattattgattatcatataagatcatgtaaaaaattatgttatatttaacacaaaaagtagttttgtggtaaatttacacaaaattttcattttatactccaatacacaattataaaatattgatgtaaaatttaatatctaattaatattttattaaaaaaaaatttaataattttataatcaattttattataattttaatatgtaagacaataaaaaatagagaaatgttaaagggcaccagtggtgcctaacactctcatatgtgtcagtatcgctattggtccaactaagtatcgcgtctcatataatttaatataatagtttttaaggagtatcgctaaccaatcgcaacgtaacatgtcgagaaggtgctaggcacactggtgtcttatagcaatgctctaaaaaataatattaatgtttcataatttaatgtgatagttaaatatattaataaaatactagaaatgacataaatgtaaataaaaaagtagtgtatttattgtggtgtaaattttaatcatagcaaatattgtgccaaatttagcacaaaatttgttatgtgccaaatttacatcattttttggcacatgattaaaacatattttttgttaaatgagctatattttaatttttcactacttatttatacttccattggagattctatgagtattggctaaacatatagacactaactctatcccctaccgcataaattctctcttatatattatgtccaaatgtcttcgtttattttatgtgcatgctcttttctcttcattataaaatggtaatctattatttttcaagccaattagaatgtcgagttaaaagttgatttggaagtaatggacatttcattgtctatatacaactaccattaattaatagtatactaagaaaatgacccaaaagtttgtcttttgcctagagagccctgcctccgttggttcatcttttattattctattattttaaaaatcaaataattgatgatgaaagacaatggcaaattggcaatgccattttaatttgagctttcctccaaaagaaaaaaaaaagaccaacaaacaagttgaaaagagggagggtaagttcttcaatgatagatgtgaatatatttacgttaccattggtcaataattttttttttttttgctatgaaacaaagaatgattaagccaaaacacaaagtttggtgagcacatggagactcacctcccaataacgcaacaagctattacaagagtgagacaaatcccacctcgcaagagcatgagtagccttattaaaaacacgcaaaatccaactaacaacacagtcaccattcaccaaagaaacacagagtttagaaaatgagaaatgtaaattctagaacagagagtgcccaaccaccaatgcattgacgagccgaacatcatctgaaaagaaatcaatccctccaaactacattttcaaggacaagtcga

SEQ ID NO: 83210 - DNA, 784 bp, Cannabis sativa
ccaacttatacgtaaaaaactctgagtgtcttcttcaagtcttatatttaatgattaattttctgaaaaattcaataaacataatggcctaaattttttaattaaatttatttaataactaatgaataataatatatacatataacacttcttaatatattattactaatacttagtgtacaatatgttcatattcttcctttgaaaaaaaacatgttcataatcaggcaaagttctaaattcaatttttatgtatatatatataatttaaaaaataagtgaataaattttctttagaaactaaaaaacccaatgatgattttatattgtttctattggctaagcctctaaaatgctaggacggcccccgtccactactacatataattttcatttttttttttttttatgtatattaatgttgtttgtttggtcaaatggctttgaagtaatgtccttatttcacagcaaagcaaagctgggactcactatttatttccattccaattccatatttccatcgaagcatatatcattttcattcaattaaattattttgccaatttgccatatgttctccttaaaaatactctttcttattttcttcatcattatgccttagtaaaggcagtccttttctacccaaaaataaaatatataatattataaatttataataatatcatgagagtcaaaccctattatgtatgaatgagatgatatcattcggatctcgtatatataagtgatacaaatctacatatatggcatcatcatcatcatc

SEQ ID NO: 83211 - DNA, 989 bp, Cannabis sativa
tttgtcctgagcagttcctcaagatagcgccaaaaccagacttgtttttcattgtgtccattgccacatcaatgttcattttcaaacgacctgaagggggattcagccaatcaatctcccttggcacgactgtgttttgttctgctgctggtgcaaaagaggtagcaggttgcttaccgtgtgcatcatgatactcagtaatgtaagagagagcaaaatacaacaggacgtcatgtggtttggatttggaaccatgcctttctttattcctttcagtccaaatgctctagagaattgtagcaaattgttctaatcttaaagacgaccattcagaggagacttggagaaacaattccttcaattctctctcttcttctactctttaaaattctttcaacccaactcttgtagtgtgggcttaagagtgttaccattgtgacttaccttttaaattagtcatgagaagaattttttttttattgttgaagaagatcagaattaaagataatgctgtagtttttttttttttttttctttttctatttggttaactaaaaataaccaaaatttagtttaaaaataaatatcatataccaaccaacttcatgagttactgaaaggtattttatcattttatacttaaaagttgttagattgtatcacaaataaatttattttataaataactagttaacatagtcgttcttcgcgcgactattttaattttcttagtattatattaaaaaaataactatttattaatataataatataatatataaaacttccaaaaaataattctaatatataataacagtaaaattatattatttaattacatattattactaataaatttatttattaaaacataaagctcaaaaaaaaaatatatagtttaaatctatttattatattattaattattagaataattatcttttttacccctgtacttatgacactatactattatgccccttaatcta

SEQ ID NO: 83212 - DNA, 1215 bp, Cannabis sativa
ctccataaatcgttggccattttggatgcatttgaagggatagaagatgaccagtacgatttaaggttgcaatatttggcatctaaaactttgatccacaaggagctcttcttcgaagcgaaggcccaagccagtttagcaaggagacagaaattgatatcctgaaaccttctaatccctagcctcccacaacatgtgggcttgtaaatagcgtcccatgactttaaagccaggaatttcttatcctccattcctctcgtccaccaaaagcgtttggtgactttgtccaactcatcacaaatcccaactagaagcttgaaggtggccattgtatacaaaggaattgactggacaacttgctttataaggacagttctccctgcctgggataaaatctttgccttccacccctctagtcttttcaccactttatctaccacaaactggaaatctttctttttggtaccccttaacatcaaagggttccctaggaaaagttcatctcctctagctaaagggtacttgagaatcctttgaatgttcacaacctcttcatgttggaagttatccgagaaatcaactttgattttccttcatttagtttttgagcaaaccaggcacaatatttctccaaacactcctgcactttctgaacacaattcacctctgccttcacaaaaatcatagtatcatcagcatacataagatgtgagatttcatggccattacgcgaagcaacataaagcagaatagagccctcccgttccaagcacaatatcaagcgggacaaaatatctgagcaaagaataaagaggtaaggcaagaggggatctccctgtcttaatcctctgctcggagagaagttctccagaggtccaccattaagaagaatggaatatcagaaagttgccacacaccacttgattaactctttgaatttctcattgaatccgtgagccatcaacacctgatcaagaaaactccattctaatcggtcataagcctttgccatatcacattttataccaacgtacccctgtttacctcgcttcttcctgaaatcaaacataatctcttgcgccaagattgaattctccgcaatccacctcctaggaacaaaagctgactggtaggggggaaattaatcttgtaagaatattactcaatctcctagcgatgatttttgagataattttataggccacattgcataga

SEQ ID NO: 83213 - DNA, 1776 bp, Cannabis sativa
  modified_base (249)..(270): a, c, t, g, unknown or other
agtcaagttttgtgggcaaaagaggactttctttgtcacatctatatatgggagtaactctatggagacccaaaaatatctttgggataaacttcctggttttgggaagattaatgagccttagatcatctttggtgacttcaatgctatgtttagttttcaagacagatatggggggagacctatttagagtaaagacattttagatgctcaatcttggctttcattgggtcaagttgaggaattcannnnnnnnnnnnnnnnnnnnnnttggactaacaagcatgaggtaggtgacatgattttttctaaacttgatagagttttcactaacaacatttggttggacgaattccccaacacagaagcttgctttaagtgggaggttgtctcagatcactgcttgtgtttaattcgtaattaagagcttaacaatgttggggtaaaaccatttcgttatgggaaccactggtcttcatactcaagttttgatcaaactgtcatggacagttggaacaagcctgttgctggtattgggcttgaagggctagcgcagaaaatgttcagattaaagcatgagttgaagatctttagcaggaacaatgttggggatgttgctatggagtacaaggtagctaaagatagtactgcctcatccaagaggaagctactactaattcgaccgatgtgttgcaacaacttgctgttttaaatttgcagtaggaagttatgatagctaaagacagatatactcagttgcttaggcagcaaagcaagataaagtggattaaattcaatgataaaaattctagatattttcatatggctatgaggaaaacaagaatggagaatagaattaccacttttatgaaaggagatacaattgttgataactttaaggaagtggtaaaaccctttgtgaatcactttgagaccttcttgggcatcaagagtaatgcttctggcagtattgatgtcaattgtataaagcaggggaaatgtctcaacttggaacaacaagtcaatttgattagaccttttaacaaggggcgtcaagaaagctttgtttagtattcaccctgctaaaagcccagggttagatggttttggcttgggtttcttcagagacacgtggagcgagattggaaatgaagtttcaaatgtaattttggggttcttcactagtggtagatttcctaaacacttaaatgaaacttttatctccttaatcctaaaaattgccaacccgacttctgctaaagactacaggtcgattgcttgttgcaacacaatttataaatgcatttcgaaattgatttgctccagacttttagaagtgctccccaacattgtttagaataatcaaagtgcatttattaaaaatagattacttgctcataatatcatgatattttaagaccttcttaaagggtatacaaggaaaaatatttcagcaaggtgcatcatgaagattgacctaagtaaggcttacgacactgtcgattggcaattgttgaggatcttttaaggtctctttgtttctcctcacggtttattatgtggataatgacttgcctggaaggaactcactatcatttattattaaatggtagaattcaaggtaacttcaaagggaaaaaagtctccgtcaaggtgaccctttgtccccattgctctttgttgtgattatggagtatcttactagactatgtgatcagtttattgagaagaatgggtttggttaccacccgttgtgtaagcacttgcgcttgacta

SEQ ID NO: 83214 - DNA, 1584 bp, Cannabis sativa
tggcatttataggattaaaattagaaaatatgacatttgtaaaataatagataaatggttagaaaaataacaaaaatataactagtggggcccatctatttgtcggccacttagtcctatttttggctattattttatcattttttattccatataatttaaatttaaccctaagtgaaatagtataaaaagaaggatggtctcattatccaacaacttaacctaatgcttttaacctagtttacaatttgttagaaaactagagtttttgagacctccttcttcttcttgttcttctaatttttgaatctccctgattttttttcataaattttgagccattagtgagtgagtgcattcacacccatagcaagtctagtacttaattatagtgtgtaagactgtgaagaatccaaacatctgaaggagtatcgggctcaaatcttgataatactctgcaacagaaacgaacaagggttagagatctatgtgggaggattcataatattcagctacaatcaatgtaaggttactcaaactttatatgtgtttaaattcgattgttttagaaattcatatttagtatattaataaacatacttgttagtatatctagatcctgataaaatatattccaacagagtagtaggatcataatcccacttattacctgattagctcataatatatataaactctaattattcaccattagatttattgggatattacacatcagagccaacagcgcgtggttctctagtttggctgacttgacagacgatttctcttagtctggataactcgagatctccttccaagtctagatagggctcgccaatggctggctcgcaaattcttagccctgtctctccagcataatactggggaccagatctagttgtcgtgcctaaaggttgctcctcgtgggttcctccatcattaggaggtgccaatggagggtcctccctaggcgacataggtcaattattgagacccactagaatagttgggtcgatctggctagttgtcactactacaaaaatggccttttgcttcagtttttaagtgacatataaagaatttgtgtcggtttgtgtaaccgatgctataaccgtagactcaaatagtcttattttttgcttcacttagtaacatatgctaaaagtcttttgcttccgtttataatcgaagcaaatagtacagcaatgatgcaaattagcttttttgcttcagttatgagctgaagcaaaagaataaaaaaactaaaaaaacataaactttcagaccaccacaacctttcagaccaccacaacaacccaacaacaataacaacaataataaatatcgccactaaggaacccattgcaccaccaaaagtacatcgaaccaccaccatccacgggaccaccaccatcccaccggaccaccaccacttcctacgtaagaaaatcaaagagagagagagaaattgaacgagaaagagagaaaccagagttggagctaggtgcgcgagacggggaacgagaaaaaattatcaatctcacctttgaaaactccattttcgagagagagagagagaga

SEQ ID NO: 83215 - DNA, 708 bp, Cannabis sativa
ttacataaaaatattgtataaaatacaatttaatataatacaatacaatacgacctaatacggcgttgttccaaacgagtccttaatggtttcaactttgtatataaggaaaaaagaaagaaaaaaaagagtggaaaagctcattcataaataataataataataataataataataataatatatgtgaatgtgactatatttgaataatgggctccaacattaatcattgattgggtcgcatcatatcatatcgatcaccacaaaacagagtgaagtagtttattctttctttctttctttcttttctaactttgacgccttataaatttgacaaattcatcattccaaaactttctttctttcttttatgattacatttacaaacgtatcaatatttttgttagggatttattaatttttacactttaaaataattttttttttatagaaatttacatagaaaaacttaaattgcaattgaaattcacatataaactactgaaacaactaccacagaaactcaaacggtaaatttttttaaaaaaaaattgatatatagagtaatttctttattttttattggttattataatttcaaagagttagttgccgttaaatttctaatattttgcaaaacaaatgttatgcccattagcattttttcactgtaaagtagctagatgccgtaatgcatttcgaaaagga

SEQ ID NO: 83216 - DNA, 1334 bp, Cannabis sativa
aaggattaattaaaagattttattacggtaataagagagaaaataagaattgatttttcacttcctcattctctctattctcacaccactcactctctctctcctcatctcacacgcccaacactgtatatgtggtgtgagattgtgatcaaccctatcttaattaaagtatctatcttatgagttgagaatacactgtaatacataaattagtgttgaggttgacttgaaagaatgcatgcagtgtgaattcttcaacaatagtttttggattggatgattgtaattatactaaaagataatgaggtccctgatagactagaggtattatcttcttattattagtcttgatttaatctatatatattatattgagattcttgcatttatggttcttattgaataaaactagtttttttttatcaaattcgcttccgcttctaacttatatagaccatataaaaactaagaattcaaagatgcaaagccatgaggccgttcgaaaagaaatttacattcttatttttaatactcgtgtatacttagtttggagaactctcaattaacgtctttgatatcaagaagttcctactattagtaaatttgtcaattttgtaaaaaattgattgtaaatacattttatagtcttgagattggaaaatagggaataaacataaatattggtttaatcggataagtaaaagagtgttgtaaaagggtgttggggattgatttgtgagtgttgtaacagttttgattcaaagtaatacactaacttaaccaaaaaaaatagtatatttaaaagctgagtatttattacttaataaaaattaaaatgagagaacccttaatattcagggtgccactctatagacttattacttggactttgattttatttatttatttatttgatataaaagaccttgaaaaactgtgtataatattttattttagtgaataatatctttattttgttttatctaattgaggaagagtaggtggtagttggaacgccactccatgtgcctctctctcaccgtttcttctaagatttgattttgaatgtttttgaaaacaacacaacaattatatattattattagggtcatagtcgtagatagacggtatgtttcaacttgatcaatataaaatagtgtgacattagcattacattacatgcaaagatggatatttatggggcgactgggggcatattcttgatgcttccacttcattttttaatttttcctttgcacattctttattactattattattattaatttatattaagttgaatatttataaacggtgtcactacgtattttatt

SEQ ID NO: 83217 - DNA, 859 bp, Cannabis sativa
  modified_base (705)..(707): a, c, t, g, unknown or other
ccagcaaagaatagcttgctgacatttttaccaaggctttaatgcctgctcagttgagctatctaaaggacaagatgagtttgataaatatctacactccatcttgagggggagtatcaagattggctagctttgattctgttatggtaattgtgttgctcatgtgtacataaacactttttacttcttgcttttcaatcaataatattcaatctctttctttcattctctttacttgatttttctgttttctcttttgtaaactggtaattcaaaatttgttaaatcctactatatctgattaaactaacactattaattatccactatcaataaatattttattagataatttcaaaactaaaaaaaaactaaataataattatttaattataaaatctaattaaataaaaacacaatttttttgttattctttttcttggggtttcaacttttattgtatttatttaagattatttaatgattttttgaacataaaaatgagttggaccactaatatattgatatgtggcattttatttaattaaatcaacacttagcgtgcaatttgtaataatgactacaacaaaaaaacgtaacattaacatataatatttaatccattaaaaaaatatataatatataagtattaaactaaaaacataaagaatttatacagctaatattttttattattattattannnttattattattattatttggaaatacattcataatcaaacagagtcatatgagcagtgacggacctaaaatttttactttgtgggggcttatttatcattaaaaaatatttatacctatattattatcactcttactaaatttatttaattt

SEQ ID NO: 83218 - DNA, 1106 bp, Cannabis sativa
tagtgttgttatccataacgagagggtgggcagcagcattagcgtagcatgttcttattatatcctttgttttgttttggcttttcacttgggacaagcatatagaatccccaaagtatcttcaacaagataaagaaacaatataaacgaacccatcaatgaaaaactgccaaacaaattactgagttttagttgcacagcttcattccttctcattacctatagtttattattttcttcgtacattaaaaaaaaatcaaaaagaaaagaaaaagtatatcctactttcttatcaaaaaatattaaccataaaaaaataaataaaattaattgtattttacgtttttacgatttgagttgttccaataattactacagggattgttattaatttagatttgggttgtaatataagttactctattagttggttcgtttatatttgtataatgcaaaaaaaaaatattaaaatataaaaaaaaaaaaaacatatatttaataaacattagttgtttattggttttttttttttaatgatttgttttcatgcattggagcacaagtacaaaaattaggctaaatgtaactttggtgcatattttgagctatatttagcataaataatacatattgggttgaagatggtcttattagccattatggtgcaagcaccactatgagataatatcatataaataattttatattggtaacttttttataattattattaaagtaaaacatatagaatcaattacactaatagcgatattacaataatgtgttgtcagaggaaaatatacaacctctctctatgtctcaattgtttcctcttttactatgtgaggcatagtgtgcgactagaccttgtctcggtcgcacgttattttctatcatgcaaggatacccagtcgcgattactttcttgacacgttatcttttttctattagggaatgggctccacttattgatcaaatacgagattgtactcgttattttacgtgaaaaattcatcctataacacatgctcttagttttcatgatgataattttgtcatatgaagaaactatcccgagatacaatcaatttgtcacactgcgagtg

SEQ ID NO: 83219 - DNA, 1078 bp, Cannabis sativa
tggtctgtggggtccctcacatactgtgtccttcaatgtatccatagtagggctttacagatctgaccatcacaagaccaaaaattgctttcagtgtaaataaagtgtgcaaattcatgcataattccctttaaagtcactagctggcagtcaaaggcatcttgagatatgttagtggtacacagaatcatggcttgcaactaaaacaatctgcatcacttggtcttaaagctttctgtgatgcaagttgggctgcaaacattgatgtcaggagaagtacatctagttttgtagtctttttaggctccaatttgatcacctggcaaagtaagaagcaacatacaatatcaagatctagtactaaagcagagtataggagtctagcaagtgttgttactaaaatctcatggctgcaatccctgctctttgaattgcatctccgtttgcccaggacacttgtggtatggtgtgacaatttgagcactattatgctcactcaaaaccctattttacgtgcccgaaccaagcacactgaattagatttctactatgttagagaaaaagttcagcagggtctcattgatgtaaagcacgttccttcctttgatcaactaccagatggacttactaaggcaatctcaagtgatcgatttgtagtttcagaaccaatctcacaattgaagatgcttcaattataagattgagggagaatatattaagacagttaaagttagttaagagttttatgttagtttactagttgttagttgctcaaattattacaactgagtgtaacagatcaatgtaatgaatgactgttctttgattcaatcttttactacctttcattctcttctttctctctttgatctttcatctttcatctttcaatatgtcaataaactcaacacactttttttttttgagaagttttgcctttcgatcaatagcaaagccaaccaacacatgtaaaataaaattatttactcttaattttaaatcaatattttttacatgtaattttaaaaaataataaaaatttggagagccatatatgcatggcaccctccgtcaatgc

SEQ ID NO: 83220 - DNA, 686 bp, Cannabis sativa
taattttcaaaatacaatataaatttggttaatgtttcttaaaagctgcttttagattattattttttttgttaaacaaaacttcaacattccacacctcaatctagatttggaccctaaccctagactttggactcgaatcctaaacttaggtctggattacggacctcagactcagactcgagtcccgaccctagaagttaaatctgaacttggacctgaatctgaactcgaacctttgaaacccaaaccccatacttgagtatgtcagaataaatgtaaaagaatatgacaaaaataaaataaaaaacaacattaacatttttttttgttttttttttaattttttattttaaaattgattttataaaatttggtcaaacacacatattgggtttttaaaataattttctgttttaagaaagtgaaaataatttttatagtaatgaagccaaacacatctaaatttttaccaacttctaagttatttaaacaaaaataaatttttatttttgttgttcttatattcaattattacattaatatatgtgagatttaatattttttgtttagataaattatgtaattttattaatagtaattaattaaaataataacttacaatttaattggaatatttctctcttagagacacgatcaggattaaaattagaaaaaaaaaaaaa

SEQ ID NO: 83221 - DNA, 698 bp, Cannabis sativa
cacgggtcctgggttccaggttctcggtcgcaggtcctggcactagtttcggtcgaggttcgggtctgggtctgaatatcgatcccagtctgtgtttgtgtccgtgttcggttccgcgtctagatgcgattctgggtccaggttcaatacctattcctaggtcctaattccgtttcttgttccgattttgggtcctaggtctgagtttgggtatgattcgaagatccaaacaccgactatgagttgggtccaagcccctgaaggtaggtcaagatttggatcccaatcttgggtccctgtctcattccgattcggatcctgtttcctggtccatgtctgtgtccatgtctggcaccgggtctggaccgagattagggtcgggtcctgggtccttattttggttctaatttcgactttgggtcccaaatctaggtcaaggacttgagtccagctctgagtctttgatcccggtccggatcctacgtccgagtctgggtccaagtctgtgtcttcgtttgggttcgtgtcccgagtcccgatctgagttttgatttgggtgcacgtcccggtccgggtctggctcttggaccctggtcttgttcccgggccccggtccgtttcaagtttcgcttgcagttttgggtcacggggtacgggtcctggtcttggtccgggtttgggtctgagttcgggtttcg

SEQ ID NO: 83222 - DNA, 628 bp, Cannabis sativa
attttgtactaaatcaacttaaaaagtaatgataaatatcaagagcaaaaaagtaaaggtaaaggtaaatataatttcggttcttgtattatacaaaaattattgattaaacattttattttgctgaatgagaatttaaatttgtattttttataattgtacaaaataaatcttgacctgaacttgatttttgcaaatttttaaatgcctaatctgaagctagtttttagccaaaaaaaaaatatacatataactaaacttgtcatacacaaattattataaaattttaatttgacgaaaattaaacttaagctccatttttaattttgtatagggtctgaattatcatttaacaaaacagaagatccaatcaataacttttgcaaaacaaaaatttaaaatgatattacccaaaaaaaaagtatgatattaaaattattattttataaagaaatatatatctgtattcctgaaaaagcaagcaacttcttcagccatcacaaaaaggaatgtctctggagtgtattacatccaatctaaatctcaaatcaatttggctctcttactggtggtagcagtgttccggatccctttgcctgtgactgaaaatggagctgaggctgatcgg

SEQ ID NO: 83223 - DNA, 795 bp, Cannabis sativa
cgggtttaatgtggtcgggttcgggtttttagaccaaatccgaatgattcatttttgggtacaaataaaactacttgatttttaaaaataccatctttttttctatttttaacatttttgagctttattgaattaatttataatttttttaaatagtttaaacttcaaataaaataaataactccacccatctctaaaaaataaactgtacagagagacaaaaaatataatataaatttatatatttttggctgacgacttccccaaccacgaaggcatctttcaagtatcacatggtaagtaatcatatagcttccaagaccactagaagttattagaattactctttatttgttttggcccagtaccggcccaatagacttctattttactgtgtatatatacacttatccatgtacaaaccctacacatatattcatttcaacttagcagccatttcaactaaacccaactcagtttacccactctcgagcgtaaatccgagttgaaaaatacttttctactattctgagtcttcttcttctaatttcttttcctagtctctctatgagctctgagagagacttatattcatgtacataatgtatataaaaaaatatattttttaaatttaattgtgtactgttcgggtatcgggttaaaacccgactaaataaatacattattttaaaacccgaacctgatacccgtgttgagtattttcgggttagacccgacccgaccacacggatttttaatttttcggctttgttcggtagcgggtcggggcgggtg

SEQ ID NO: 83224 - DNA, 1214 bp, Cannabis sativa
agcattaagatcaatgtggacgcagctatcttcgaaggacataatcgttttggttgtgcttttgttgtccgagaccataataacctactactggaaaatcacacaaaattgcatttgggcaatgttgctccgactattgctaaagctttgagctttcaggaagcgttgagttggattaaaaattaacctcattgctctatttgagtggagaccgattgtttgttggttgtccaagcattaagaagctcgactattttagcttctcattttggtggtgtcattcaagaatgtaaagccatgttggctaatttatgtaatgtttcgttttgttttgttaagcggtcatgagtttgcaagagcgtctttattttaccctgattgtactttcagtttgaaaaatattccaactgaattgttacttactttggtggctgaatttgaaagttaataaagtttgattttccttttaaaaaaaaaataattattataaaatattgttaattatgccacacctaaaagtgttattcactataattgcaattggtagttaataaaagtactcttatttatacacaagaagaaatacaagaaaatagaacaatgaagaacaataaaagaagaagtaaaatacactcaaaagaataaccaaccaacaattaagtcacaacttaaccctagtaaaaactaattaactaactaattaattggattctgagagtgagatgtattctctaattaactaaatcgacatttgcatcttttgttttaacttcacttattttattcagaggacataaaagtaattaagctcttaacaattaattggtagaatgccaaatagcttaataaatgtggtatttatcttatttatgaggctgtccatcaaacccatttaatttcttctacctgatgccacttcacataataataataataataataataataataatactttgtaagttaataattggataaatattatgtgttatgtgattttatttaaaaaaaaatgtatgtgtatttgttctatattattgacgtgtgagtaatttataacgtgtttgtcttatattgctcgttctttttaataaagtgtctcatattgcttatgtattagtaattgggaaatttacacccattactgatttttctcaatttctttcttttatactgttacacgctggaatcaacttttatactgtttttttttt

SEQ ID NO: 83225 - DNA, 822 bp, Cannabis sativa
tcatccgatccgatctgatccaatggatgtattggattggatcggttccatccattgaatgctttaactgatttttttattggaatagattggatcggatgactttctgcacacccctaaattattttttttttatctatagtgttttattattttaaattacattacattgcaactagtcttagttttagtattcttcatagttttattaggtagttagttactaatagttataattcttaaattacttgtaaatcaatactcctttgtctatagatttgttgatggtaagggatcatctattgctattaacaatcaaatgcaactgtaacaagttcagggcttggctttgggctttggattaattttacataaataaaaaagggatttttacatctagacacatctttttctatctaatatcaattttaacgtatatgttcaaattgttaatattaccgtgagtttttgctgttttgaattttaaagtatttagttgcttattgttcgctgacatcatgatcaattttcacattatatctatcaatctatgggatttgtagtcactctcaacacatgcatggtaggtgttgatgtcaactgataatgtcacataccattacctctaataacttacaaaagatacatacggtacaatattagatattagttttttttttttttacatatatatatactagtagaatgctccgtgcgaggcacgtatataagttttatgctaggtgtgtcttgttttatttaaaaataatacaataaataattaaaaaaatattattaattattgtaattgagatcattaat

SEQ ID NO: 83226 - DNA, 1517 bp, Cannabis sativa
tgattataccaaatcggatagcttgaagaacatataaaggatcatccataaaagtaacttgtggaaaatgagtcacaattcttccacttcagatcatcggtgcctgaatggaatcaataatttccaatgcgaaaaacattgcaagcccaaatatgttatcattctactcaggccaaagaacttattgatggttagatcttttcagtaggcatcatgatggttagatcaaacgattgaaaattagcagattaacaggctaagaaaaaaaaatcaaaaagccattcttaaacctataaaaaatgatacacattataataaaaagaattgtaaaagattaattaatttagctaggagccaatggaatggatcctatatacaaaaaataactaaaaactgaaaaggtcattattttgtttagtcaaaattgcaatgaaagatcctcataattaatatttatgaaataaaatatcaatacgagtatgctagttttatttatagattctgaaaaaaaagaagaaaacattatatgatgtgaaatggcatcaactcttttcaaggtactattcaaatttcaaagttagcaatagagaataaatagaaaataaataaatgaaaaataataacaactctaataataagaagaaaaagaaaaggaggtggaagctttgaatccttacactgagatcatgaagaagcttttcagtatcatcaaagaagagagacaccacttcaacaacaaaatcagggttgcagaagctgtctagatacctcttctctcaccaaaacaacaacaaaaagaaagaaattataagagaagaataaacaaacccaatatacaataaatctataaaaaaaattatataaaaaaaagggagtacgaagaggcaaccctttcgttgctgtgataatacatcatatacaaaaataacttgatattttatgagaaatctgatgagtaagaatctgtgacaggccaagccaagaacacaacgacatatgtgaaacatcataggcataatctcgtcgtctctataatccaaaaatacaaaaatacattgagagataagaaagttcaaaccttaaatatacttttctgtacctcgacagatacgaaagaggcaaccctttggttgttgtgataaaacaattgagatttcccaatttcaattgcccatgtgaccaaataaataaacaattgcataaaaaataatttcatggttcatagatttcatctgagatcgagaataaatcacagcataggagatgagaattgtactttaaaagttttaatttcgctcacttcaacagcccaaatactccatcgaatactccttattttaagcactacaacaagcaataaagtgtgtaaatgatgaactgaaataaaaattcacatcaaagactaacaattctaattcttcctaatgaatagaagctagatcaatggctaaaagatcaccattcaaaaaaaataattgagatacgaaccacatcattctgaaaaagactataaatgg

SEQ ID NO: 83227 - DNA, 1327 bp, Cannabis sativa
gtgcatttctactggttcttttcaaatgaggcccttaagaaattaccactagaatatccttgccatcaataggtggtggttggatatattctgatttttgtttaggttgtttgctaattttggtttagctctcctcttgcagtaatcccagcctgcaaagtggttaattggatactatcatctaaattcctcacttttgttgtagccgtgtcaaaacgacttagaaatgcctttagcatctcactaggttgttgctttatgtgagtcagcgaggaagcttcgagcctcttacttcttgctgctgagaattgttttttgaagtctcgtgataatttttcgtaagaagttatagaatgcttggtaaatttatcaaaccaactacttattgcccccatgagtgaggtcgagaacatgatacatcacaaattactccctatattgctcgctcacattatagtattaaaattatttaaatgcaccactaggtcggttgtcccttcataatgagtcacatggggaattttcaaaccacttggaaaataggagttcagtatatatggatggaaaggctcaggttcctcgtctgagttatacccaggtagtttttcgtactctccatcttgatactttctaaacttatcttcaagttgaatgacccccttttctgtattgaatcatcaactaattgattgagttattcttgcattcaggtgcttttcaatttagtctttctcagagatttggggcgttccagttcaatttctcactcaaatctgggtgccttagatttatttgatcttgaaggtatggtctatctcacgtatcatgatgcctttcttgtatttcaccataattactcaccgatttggttggcaaaatactttcagattgataactctacaagttactaacgctttcttgttcatcgtgatattcatgatgaggagttcttttccttctcagtgggttttcccatgtgcatgatatggatgatcgattttgtccttggctcctccttaacccactcattgcagtgttagattcagaacctcgagattcatctcgagttggcctttttctttcaaaagcatttgctacatggtccctgcttagataagtgtacatactatccctctcattcttctagggacctcgcggtggataaggaggatgagttgatctattagtaggttgaacgtttggaatctcattattcttatgagatggtcgttgacctcctggacgcatttgtctagaagtagtgacaccttaatctcgaggaccgtctctatcaacatgaacctcccttgtctcccctggttgttgc

SEQ ID NO: 83228 - DNA, 670 bp, Cannabis sativa
aatatatgtgcactcaaaacattcacctaaccatttatgcatacagtatgccatgattttgtctcaaatttaaattaatttaattaattaaaaagtatataactgtgtataatacatatttagaagaacaacaaggtgagagttatatattctgatttacagccaaataacatttcgtggttcattttttattaaaaagaaaatattttcgtggttcattttaaatctcacaaatctactttatgctaacatagccgtcacgattaattgagagttaaatgttaaggaattaagaatatattcgcactaaataacaaaaatatatacaggcaaaattttaatatatcacccgtcctcaatatgtataaaaaaatgacaaaaatattgatgaaaacatttctctattttttatttaaaaaattgttacattataaacaaacagggaaaaaaatgcaacaaaaacaaataagagatactgcatacagtgtgaaacatgtcacgtgcgaaacagtccatgaacaagacataaaattcgtgattttaattatttaatacacaatgtttagtaataagaagcttatattggtaaaacatttaatatatttagtaggaagtacaaaagcagttttataaatatgagaccaatattaaccatttcaaaacaaatgaa

SEQ ID NO: 83229 - DNA, 1297 bp, Cannabis sativa
attcgtaaaaaatataaaaaaaaaatcgctttgaaatgtaaaagtaaaaaaatttcatttttttacaattactaatattaatatatttcaaaaatttagttatatttatataatttttataatattttacagataatcatataaaaaaattattaagatcattagaatttaaatatttatttataaatacttaaatttttatatcacaccctataaataaattgacataatttttttttcatattttaatagttttaattataaaattataatattcaatattatttttaagttgtattattattttaatttagttttaattgataaaattcatattttattattattaataataaattatatggttttttaatatgtcgtcttgtgttttttagctttgtcacgtgtcgtgcttttcggtctagtttatttgtactttttctgcttctcgtgtcgtatcgtatttaatgatatatttttcgtattgtattgtgctaattattaatatcgtgttgtatcgtgctcaaatttatattatttttcgtatctaattatactcgcactttctgaactcgtaccgtataaaaaagtttaatctgtatttacaacactaatcatagcttatataaaatattcctcaccaatcaagccttgtgctaggcattagtcaaacattggataacaaaaataaattttcttcctaaatccaaggactaaaatacggttgacttacttgttaaacccaatataatttgccattcaattatatatcataatttggtactaagtaatgctaaatactttttataggtaacatttaatatttcttaaaaactataggagaaatactaaaagacattcttacgtgtcaatatcgttattagtctaactaagtatcggtatggtcgaccttaaacgtaagcgagctaggcatgcgtctcaggcccccgtgcctgaaattataaaaaaaaattatcaatatagatgaaatattaaataagaaaaaaatataacaaaaattatttagtatagtaataaagattttactataaactacaaagatcaaagaatcaattcttaatttctactttcctattttcattttgataatagttagttatatataagttaattagaatttttgtcctctaaattttgacatgtacaaaactatgtcccctgaattattctagtcgttaaaaattctccctaaactattggaattatcaaattcaaggatttttatctaatttatttcaattttagtaatttaatgattatttatgtattaaatcat

SEQ ID NO: 83230 - DNA, 719 bp, Cannabis sativa
aaaaaaatataggtcatgtcgtgtcgtgctaacatatttaaagagtacacccagtacaactcataagcccaatgtttttgcgttgtagagtgctttactcgtgcaaataatctaattttcttaaataagtcaacctatttttatatctagggtcgacttcatgctttactttcttatatttatttttacaattaatgtattaattactaaaatatatattattcaaaaatttaattatagatataatttttcaataatagtttacacatattcatattaaaaattattaaaattttaatatttacttataaatattcaaactcaaattttatgtcatactttacaaataaatatatctttttaatttctaattttaattataaaactatactatatgcatttaagttttattattagtttaatttatttataattaataaatatatattatttattgttattattattaaattatagtattttttaatatgctttgtgctttttggacttgttttgtctttcgggctagtctattcgtggttacgtgtcgtgtcatttgtacttgtcgtatcgtgtcgtgcttaaacatatattttttatgtcgtatcatactaatgtatagcatcatattgtattgtgtttaaatttatattttttcgtgtctactcgtgctcatactaccgaaactagtgtcaatttgttattattttctattgttt

SEQ ID NO: 83231 - DNA, 822 bp, Cannabis sativa
ttttgggctgtacaaatgttcattgggccggcccacagtattgttgtaatatttttccctttttagaatattcctgttttttcccctttttttacacattatttttggcgcatcaaattattatggattttcaaaaaattagaaaatattttagatggttacaatatacactctcgtaaaaaaaaaattagaattatttagatgtcaaaaacatgaaaaagatgcatcaaggtacattatattttctttgattaggtcatcaacgtacttaagtccgaccctggacataagcggtataggcttgtgtttatagcccacctagttcatgggcctaaaaaatataattctaaaataattttaattgataaataccatcttttatgatcaaagtaccaaatataacctcacaaaacttatcaaaattagacttcttcttaatgcacgtaataggaatataacttataaaagtgggtataaattaaagagtagtaaaatgaaggtaaaaattaaaatatgaaacaaaaaatgggtataaagtataatttcctctttaatatattttttattgagtttggaaaatatcacattttcttctaagagttcaaaattttatttttcctataagtctataactattgtaaccctaagaattatcattggttaagaatgaacttctatatagttagtgtgggatattcaaaaacaatgtttgagctagcttatattatcccctcacacaatagaaactaccaataccacaagacatgtggtctagttgtcatgaactcaatctatttatttcgttcaaatttcaaattatgt

SEQ ID NO: 83232 - DNA, 803 bp, Cannabis sativa
  modified_base (55)..(55): a, c, t, g, unknown or other
tttcaaaaataatttttttaaaaacaaaagttttacttttattttgtgattaaanaattaaaaaacaaaaatattaccaaacggcaccttagtgtttgtgttgaaaaaactcaggagagacacaaagttgaggtgactttcataatttttacacaagttggtgtggctcggatttagtttgcgcattgttgagacttcaagtcaaaattcgatcatgttctaatcagattctagaaatactttgtgaatagggtatttttgatcatgttctgtggtctagacttggcacaaacaattcatagttatgggatttgttggaaatgatcctcaaaataggagtcaagcctgaaatattgttatatagattgtgtctagcttccattataaaaacaaatagaatttgataattatgagtgagatccatcagtttgtacacttaatattctatacaaaattatatgaaaaattagtaaaattaaatttaaatttatctcacatctgccgcgaagtgcaagttatttactaatttagttttaaaaactaaaagcgggtacaaatttgcgaaccaataaatcaattccttaggtaattatcaaaaaaaaaaaaaaacaaaagcaattaactcccacatgtattatattttgtagcacattagcattttctcttagtttcccttaagtttttgtagtacaaaagatgcagttcaataacttgagatgttctactttatccctggaaaattggagaataaaacaggggtttacacagcacaaaacaatacacacagatctgttacaaaagag

SEQ ID NO: 83233 - DNA, 886 bp, Cannabis sativa
aaaataatttccaacaaaaactagtgtgaagcaaaaaattataaaggttaccatggcagtccaaaggcacctgaaaatgtcgaacataatcaagcgcattacaacccccataatgcatgaaacaaagtttcctccccatcgttacacatctaacaagtagtatcaagctccaagtcatgcttcttgatattcaatagagttagagaaccaaagaagccttccaaattagggctgaacatttagacccgcaaacccgaaaacccggcaacccgcccgacccgctgcccagaaaaaccaaaaaattgaaaacccgtgtggtcgggtcgagtccaacccgaaaatactccacacgggtgtcgggttcgaattttaaaataagccaaatattatttcgggtgttaatctgaaacccgaaaaattaggcacagcacaaattttcgtgccacgaaagtcaaaacaaaagtacagattttttatttattataaaataagaaaagaaagtgtgagagagaagttgtctttacctctgccacctacaaagtaggtcatgcttctcatgccacgtggttgatatgcatattcaaattgttttacttaacaaacaagcttcattggtttgttttattttttatttttttattttagtttcataaaaacaaaatgttattacttgtactttctatttttattttactctgtccagaaatttaaactgtacactatgattttttttatgtaaatattgattcgggtgttcgaccgcagtaaacccgtcatactcgacccgaaacccgtgggacccgatcgcccgaaaatcgggttcggttacacattttaaacaccctaagttcgaaaacccgaccccgaccatccgaaaacccgaaaa

SEQ ID NO: 83234 - DNA, 1047 bp, Cannabis sativa
tgaaatggggatttcaggttatgagagtttggagaagacaaagaagctgaaaagtaaaaggaaataaaaatgtcctcggtagaacttataacgaggacatgtccacgatacagaaacttgacacaaaaaaaaaaagcgcgaattttttccgctggtgcgaaaaaagcaataaagatgacatgtcctcggtataggcatcctcgttagaaacccaattttttttgtagtgttactattagatattagtctttttgttgaccttttatatttcatattttacatttttttatgtcaattttaataattttctagaaatatagtgtacattaaggtatatattttttttttctgaagtatatatatatttaattaatttaattaaaaaattaaaatatattttatttatatatatatttttaaatatgcaaaaaaaatgagcatatacatatgttaaaaataaatcttaaaatacaatttattaagataatatcgtcatagaaaaaaaaaattagatatatgtatttttttctccctttttaatttttttatttggcatatcataaaaaaaaaaaatacacacaaataaaattaattttaatatttatataaaatttgttaagtaaataaagaattaaattaaaaaattattaaaaatatttgaaattaatacaaaacaaaaccaacattatttagtagttcaagaaattaaaaattcagagaccagtttgctaaaataataagttcaatgacttatttacaatttatttattgttagaccaatttgtaaataataataataataatgaaatgattaacttgctaaaatttatatagtggtttaaataaatttatttttataagaccacaaagatgactatcctgattcattaaaaaaaaaaaagaagaagatgaactatccgcacattcgccaaccttgcccaattttctctattcactaactatgttatttcttttttgcttaattacattaggtctttattttattattattcgaaatcagagtcagaactcattattgttgtgagc

SEQ ID NO: 83235 - DNA, 1061 bp, Cannabis sativa
cttcgtcatgcttcaaagtgtgaatattgcttccaaaacgggatgtcgtcggctgcctgttcttactatcgtttctgctgcctgcagaagggctttgaggagaggctgagtgaggcctctgttcttggttgccattgttctgtactggacctacaataggaaaattgaagtcataagttttatgttaaactctttaaaacaaacagaaaatggccccgcacgacaagaaaattatgtgtgaatctgaaagtttgctaacatgatgtgtaactttcagggattgccaatatgattaataaattatttgattttctacgtaaatacatgaaaattttaacatctcgtcaattttcccatcatgacatttgttcagaagttctgcagtttaacagcagagaagaatttttcaaaaaaaaaacagcagagaaaagaaaactcactgtattcccacacgccaggttgagattggtgtccagaatttgaagagctagaaccaccaccaatataggagagagggttgatgaaagaaaacaatcttttcgcgtatgcaaaataaccctcagtactctcattcgaggactcaacaatatttcttgaaattggttgatcagtcactctttgatgagtaaccacaatcaatgcctgtctatcaaacaagcccaaatctgacaaggttttgcttaaatctgcataaaattgagacagaaaagaataaagtccacgagggtatttacatagcaattgttatagtgtcctttcctagtccttaatattgtagggttaggcaggatcccaattaaaaaaaaaaaaagagagactacattcgtgaaagtgtgcaggaatgctagggggaaaaaagaaacaatttaccctgagctttaacaacctgggagttacctgtgaacttctaatgcttaaaaaatactaaaatgtattcctaggccctaccaagccaaagcaaaagcatatctatgtatgtaatttcaaagccgatataaagaatagctatgacgtgtagtttattttcctcaaactgatcaaacttgttattactcagaatg

SEQ ID NO: 83236 - DNA, 771 bp, Cannabis sativa
tcaggtagtagccctaggagatatatatgatcggattagtggggcttacactgaaatgaaaataatcttagatattccccgcagcatattattaatcattatagcctataggcatcaagacattagatttaagagaaaattacctacagatacgaactttttaaaatatttacatgaatacgctccaatattttaatatagtaacattaacgatatgttttcatttatttgatatgcgtataccgagaaagtctttgactcattttttttctaacatattttactgagtctcttcttcatttatttgctttttttttttttctctttttaaacaatgacatttatatttctgtaagtttatgtatttatttatcctattgttttttataaatttttatgtgattaaatttatctaaaacaaattataaaataatttttttctaatttcattagtaattattatttttttgaaagtatcattagtaattatttaagctcttatactattataatctacattttaaatatggatcatttttatatacagaatatatatattcgccatcaccatcaccatcaccaagaagattaatataaaaagaaatgactttttagttttttttttttctatttaattaactaaattgtaaaataaacaaaattaaatatgtcaattgattctaataagctactaaaggtattttttttactcatatttaaaaattagcatatagtattttaaataaattaattttattgaatcattttgat

SEQ ID NO: 83237 - DNA, 1327 bp, Cannabis sativa
aaaaaatgataaaaaaaaatctcacctgcatcggattatttatcccaccctgctggatgggataaatactcccagacagatgaggtcaactggagtagttatccaaacatctaacatgcccaaacactggattggacaaattagcctgtctaatccaatccagtcctgcgtaccaaacaggcccttagtgtttattttttctcccatatatatggaaatgaaagactttatatgtacttagtactttcatgtaaatattttatcaaattataaattaacttagttatttttcttgtagaacattgagatttagtacaatctagttgattaaggttttgaattatttcaaattattaacttgccctcacattattatctctaaactgtttgcacagaatagtttcaatgtaataaaacatgggtctttttgctgtggcagaaccccacagaaaagtaaaaaaatgcataatctatcgtgaggtaactaattattttattttccttttttcttaagagattttggtattggcagaagaataatatgacatttgttttcttctcatacacagactaatatttcacaactagaagaattttggaaagaatagttgtctaacatcttttcccacaaatggcatggaatcttttaaaaaggtatgtatacacacataaaaataatttataaaattaatattgtgagaaactaatggatgtactgtaattaataacaagtgttctgaaattagccacactctgctgggaaatgtcttattttgttttatttgtcaaagttggtaaaacaactttaagtagctaacattaaattttactattaattttacgcttcttgtgttaattaagcattattatgtcttagattttgttttctaattggtacttaatgtgttgttaagctagacatgttgtaagagttgcagctttagggagtgtttaagtttggattgtgttttgcaaattcatgagttgtttgctgaatatgaaagaagaggagagtaatgaagttaaaggtgttgggaaacaaattaaagttctaaaaaaagaaactttgctgtactacaatcaaatgttgagcatcactagattttgtttcaattggatcataaattaatttagtattattttgcccatcgcctagtcattggatatgtaagtaactacctttgtttattgaggtagttatgtctgttttctcctctattttttctagttttagctaaaatagatcatgaacaatcaatttttttagccaaaaaagtagtaatgaaagaccttgccaaggcatatttattgaattatgcttatatat

SEQ ID NO: 83238 - DNA, 1015 bp, Cannabis sativa
  modified_base (27)..(32): a, c, t, g, unknown or other
tccatatgcttgcaatacttactattnnnnnntaatataaattaatgcacaaccaataaccagaaggtctttctaggcttgtaatgttaggcttagataagggctgttgaaatggtcatttaggttttcctataccataaacttctccaatcatatcacctaaaagaaatttttcacagacaataccaattctccttttctaattacgtgagagatttctttttttccaattttttcaacaagattacaacaactttatatttatttatttattgtattttttttttttttgaatttgacagtggttgtcagattttttttttcttttcaagttgttgccaatcaattttttttttcatctttctctcaatttttacagtttttcccatacacatacatacaaacttcccatccaaattctccaaaactaaagatttacttgtggtataattagggttaaatttacatattcatgggtttatctttttctaagctcaatatgtgtagaaacaaagaataggttaagtctcaaaaaggataagtaggataaaattgcagggttggcacaattcacaattagcatacatcaaccaaatcaattactagaaaattacctaatatgatttcatgttcttctaaaatacaaattaaaattcgtcaagaatgtaatatcaccaagcacacgggttctacgaaaaataaatgaactttttaaatcatgctatctacctactttcaaattgactcacattaagaaaattgactaaaaaccaaaaattgaaaattaaaagacataaaaaaaaaaacatgtcaaaacttgcagaataaaaattaagttcactctcccaaactaaagtgacacattgtccccaatgtgatattaaagaaagaaaaaagggaacgtacctgagcgccacacgtggctttagcgacgcgcagaaaacgtggggaaacacgtttgctgacacgcgttgcgcgtcaccgtacccctttatttataaaaaaaaaataaaaa

SEQ ID NO: 83239 - DNA, 2438 bp, Cannabis sativa
  modified_base (1257)..(1259): a, c, t, g, unknown or other
  modified_base (2168)..(2169): a, c, t, g, unknown or other
  modified_base (2379)..(2384): a, c, t, g, unknown or other
agatttagctcgggaataggtgtaagccaacttcagaccagcctacacaaagaaaaaacattagagtttgagccaagtaaagaaggattaaacgaaactgtcaagaaagactcatccttataaattccgtcaagactcctcccatcagcagttccaaagaagattcattgtcaacgccgaccactcctcactcacctcaggaaccaaccggatcatgtaataagcgagcatctccttgcctctcttggcctatggatgcactggtaaaggtggagtagaagcccgcatttgctcagatccgctcttagccagctcggatcaaccctttgattgttcaggcctgttcgaacttcctcctcgggaatctttaaacttagcggcttttggagtagaagggtccgtgacagttagctccttagaaagatcaataacctccccagccagtgccttttccttggatagggtcgcctcgatacccctagatttcttggccggaggagatgagcttcaacttcctcaaactcttttcttcagagcatcaagcatcttctgagacatgtctgggcaaaataaagcaacatggttaaaaaaaaggcatcaaaagcatagaagtatgataatcaagaagtttaaatacaagaaagagtatcctgctaagcgattgtccgagcaagactcgagagtccatcatcacctaataagccttttatctcagccatgacaacttttccttttcccagtacaggagagggtgaccgagcaggtaaactgggctccctaatgcgaatggcatcctcaacgggcctgggcttggccgaaagtttcttcctcctcttgagttgagtcaccttctcttcctcagcctcatcttcaggattcaaaggcttctgagcatactgtttggctgttgcacctcctatcaacttagcttcacgcttaagttgaatgagttcattctccttttgagctctctcagcacggccagcaccagatttcctcttcctctccttcgcaggattaggaataaaatccttcggatagagcccgtacttcacaaagttttcctcggaggtcaacaagatgatattccgagcatccctcaacagctgagcaagcctttgagctctatccctaagagcaagtgtgaagggagggcggtgatatgtggggatctgctggaaccgagtataggtggtgcccatgccttccacaaagatgtactcgtcaacaaaatgcccaattttgctaacggccttnnncccggtgcccgtcaaccacttaaagactggttgagagaaatcgaagtaccccgacctaccttgcttaggggtggacttcaaatcaaaaaatcagctaacctaatggggagaaggcatatccaactgctgggaggcatagagaacgaagagggcggacagatacttaatgcccttgggagtgaactgggtcaagcagagtcgcaagaagtctgccacattcctaaagtatgggtgcaaaggcaacaatgccccttgcttggcatgatcacccgaccagacacacattcccctttcagggtttgtggctcgatgttgttgtgagcgtctaattcgcccaggtagccatcctggtcgagatttcgtaagcgtgtctcagtaacctttgatggaggactcacccacctagcacccaaagcaccttgccttctatgaggaaccgcagcagtaagttcctccctggcgtagtataagccctcaatcaggacgtcgccatctgtatcgactggctccccaacctcattatatcccccatagtttaggggtggaacctcctcccctccctccgcctcagaagggctactaggacaaaaattgtcctactcttcaatctcctagacctcggcatccccgtcatgatcctcctccttctcctagacgaacggatcttgttcaggactaagtaaggtggcatgtcgggccacttgaggatcagatgcgtcgattctgtgcattgtcttctttgtgcgagccatcatcctatggctagacctaagacttaagctaggatgtccgtcactcaaagaagttggactagaacaaagacgagggtgatccttgtgcaagggttgaagcagatcctggtcgatttggtgttcgcttccccaaaactcacctgggttcatctacaanngacaacacacaagatgagtgttttgtcgggacatcgaacattaaaacaggcaaatatgccgactaggagtactgaacaggttaaagaataagaatattcaacaaaacgtcacaactcaggaagtttgaaatttttgcgagttagggcaaaaaatttcatgaagcttagaataagcaagatgagggacatgttgttaggttttatgccctnnnnnnaactccatttcaatgtaatctattttattcaatatcaataaagaaacaaaagta

SEQ ID NO: 83240 - DNA, 2552 bp, Cannabis sativa
attttgcgtgtggacatgagaaaaaagcatgcccaattgattcccatgtgtttgtacataaagagcaagttagtgaatgaatgatctttctcttttgaagagcagcaacagttggaagggtgttgtgcagagctttctaagcaaaaaattttattttcattggaagattcaggttccaaaatgttttccaccagtttttttttgcgaatatgaagatgaagaacattgttgttcatctatacttgctgccaaatgaaaacttaatttcaccgtatatatgcctttagatgtctggtaccaaattaatctatcaccagatgggaaaaaacttaatgggatagtagttattctgttaatatccaactgcccaaatttttttttgaagcggctccaaattccactagctttcaatagtgatcaaatgagcaatcgggagtgaggcggcccattgaatgttagcggtttattttctgtgtgacctggtatccatttatccttaccacactgaatactaaaaccatgacctattttatatcgaagtccttgagcaagcaactctctactccaatgtatactttgtcgtgttaaggaacgcgagtgtcccaattttgcttccagaaaagagttgtttaaaaaatacctacacttcaaaagacgactaaagaatttggcatttcaatgatccttcaagaaagcttgattgtaatacacaaaagatcagaatccgatacctccctccactaaaaatttacatagtagattctatcttttccaaggaaatttggttccatgtttattagaaccccactaaaagtttttcatcatgctttcaagttgttgataaaatgttttagtgaaacgaaaacaactcatagcatatgttggaatggactaacaactacttttagtaaaacttcttttcctcccaccgagaacagtttatcattccaagcatgcattaatttctaaacttgcttctttatattactgaatagctcctttttgtcacgtctaaagtaagaaggcaaaccaagatattgttcatggtattcattaatcgacatgtacaaagcttgattgaaaaacatttgcgctgcaatcgaagtgttgggtaaataaagacataactgatttttgattgttgagtatttatcttgaagcacggtgatatatattcaacattcttttaattgccaaagtaaaagttttattggtctcacaaaacaacaagctatcatcggcaaagagaatgtgagaaactgaggtgctcttcttgtgaaccgaagtccttggaggttcccaatagcttcttcatattgtaatagtcttgaaagcccttcagaacatatcaaaaagagatatggagataaaggatccccctgtcttatatctctagtgggtttcacatgacccactacttcaccattgagcgagaaagagaaacttgcagaagacatacagttttgaatcaaggcaatccacttacagttgaaacttgaaacccattatttgcattactgcccataaatacgcccattccacacgatcaaaagctttactcatatccaacttgattgcaaaaaatttttttgctcctcttatcttatgttggatgtgatgaattagttcaaaagcaaccaggatgttgtctgtgataagcgtattggaggggaaagcactttgtgtttcagaaattacaaaaggaagtgcttctttaaatctcataacgaccatctttgatatgagtttgtatatgacattgcacaaacttattggacaaaaatcacccatgctttgatgagattttatcttcagaattagagtgattattgacgtgttgatcaacttcatattgtgaccttcattcaacactcctaaaaccactttattgacaagacccacaatattctaataattttgataaaacattgataacatacaatcactccctgggattctatttggactcgtggatttcaaggcatcaagaacctccttttttgtaaagggaagaagaagtgactcatttaattcagtagaaatcgtcgtagaaatagttgttgtgatagattccaaagcctcattgtccactgaagatgttgtgaataattcaacaaaatactctgaaataatggtagtcataccttcttttgatgtgatcactgtaccattgcagtccttgataaatctaatcttgttgttggctcttctagaggatgcatgagcatgaaagaacttagtattttgatcaccactttgtaaccaatctactctagatctttgtttccaatacatttcttcttgagccaaaagttcgtcaagaatattctcagagttttttaattctaccatagcagaatcggttctgttttttttttcgttattgagagtagaaactcgcttttgtaccttagtgatttctttcctaaaatttttgaacttagaattgtgccactattgcaaggatatagaacatgctttcaaattgtccggaaaacaatccatagcagcccctgtttgtggagaaatccattgttgttgaataatggagg

SEQ ID NO: 83241 - DNA, 584 bp, Cannabis sativa
aaagatttgtagttttggagggaaataaaataagtaaatgggaagagagaggaattcattttaattattataaaaaataacataatgaaataaagaattgtatgtgtatggtgtcggcgagggagcaatggcgggtcccagcaggcgtcggtggctccggtagaaggcgtttgggtttggtttggctggggctcttgtacggcttagattttcctacacatgcaaaattcaaaccttattataataagagtccaccgacaacttatgaaataatgtgttactttccattggaaatctcaatatgattcacttcttcccttcctacctctattattattaaaaatacatttattcattttaaaatatttttaatggaaccagcattaaatgcttacatctttattttattatggattttcttttgagggattctaatagctaggattcttatatatatagtgttgcgtgttacgtacccaaaaattaattaatttttattatttttttttagcaaattatatttaatctagttttttaaaattttattataaaatataatacttttttttttttagaaatttcac

SEQ ID NO: 83242 - DNA, 1287 bp, Cannabis sativa
gttttatttagggcataaaaactaacaatttttagcgatgtcattactatgattttattttagtgaaatttttattattatcacaaatttaattaaataattattctactattactaaactatgttccaaaaaccaaacacgtagtgtccctaaatattagggtgttacactttctttattgcaccaacaaaatatctacaaattacataaatagatataaattagtaataaactttaaaaaaataatggaattttttcacatcacatactatttctctttttttgtgggctatatctttggatttccaccttccaatgaaaaactattaaccatacgcaaaacatcacctcgacatagtgctataaatcactaacaatacttgaaaacaaagcatgtaaatcatcaaacaacaataattggtaattttctactataaattagagctgacaaaacaggtcatacatgataacatgatacttgaaacctgtataagaaaacgagtttaggttttccttaaacaattttggattatttttaggttaacatgacttaagttggttaaaatgccataaacttattgaattggacataaacatgttagaaaaagttgtaaacatattaaacttatcataaatatattaattagttaattaaaataaaacactattctttatttaaacgggttacaagtatcatgttagagcaacttctcgtaaataaattgaattttaattcttaacacgattaataaatgagtgacatgaaaacgattcgtgaccacgaattatcaacctagtaaaaatatgaacattgctattggacatcaatggtgctcaacacttatacgtgacactttatggttagttagcgatattttctaataattattatcttaaattataaggaacttgctacccatatttcagatggaggacacatataattctaatatgtttcagctcaattgctcgaggcccaatcgtaggctcaaccaagataatggattggatctattagcgaagtcaagccttttggatgctggacagatgacccgtccagataagatacacctctgtcatagcgtatctttggatgacatcggatagatcttccgaatgagtaattaatgaccgtccggatatccagctccgtatcatagcaatttattgtcaaatcccacaatatcaaggctttatttccaggatcacgtacaagattcgtatcttccgaataaggaaataaagtaattgtcaatcaagcatttatgtgtctttattatccacaa

SEQ ID NO: 83243 - DNA, 691 bp, Cannabis sativa
atatatatttatatatatttgtagcattgcattagttaatttgtgtgtgaaatgatgcatattttataatttttttttaggataattaacagaggttttttttttttttttattattatttaagcgtttatatattacaactatgttttacttgagactcgaacccagaattttcaacacacacacccacctatggccacttgagctagcctcaagtggcctcaagtgattaacaaaggttaatagattgttacaagattagtagaaggatttttttaatctcaaaaagtttagtgtattttaaggatatgtttaataaccattttatgaactgtaacaataaaattgcaactaagacatgagaaagagttttccttagagcaggcttggccctcagcataagtgaatttggcttgtgcctaggacgacctaattaattcagggacctaattagtattttttttacaatttcatttcttttatatattatttgtcaatatgattataaaataaataagtaaaaaaataaattagaaaaacaagtattattacgtagttgagacgttaatgagtcttaattcacaagtcaatattattgagctagaataacatcaaagtatttttatacaagtgtttttgctctagctgaaaaaatcctaattcttaaagcagaaatattttccaacccttt

SEQ ID NO: 83244 - DNA, 1756 bp, Cannabis sativa
agattagagtaaaaatacataaattttttttcatagcattttaattttaatgttaatgtttattttgttactagaaaaaatatatgtaatcatgttgtttagttaaagaaattttttagtgtaagtgtaatagttttggaaaaaaaaaagtttagtattttattataactttagtatagttcaggtaatgtttaattttataaagtttatttgatattaaaataattaaaaactttgatttttttttgtgttgatgtgtttgcaatatggtaggttattttttacaagtttgacgtgcttattcatcaatgatttttttttttagaatgtgcatgtatatcgttaagtctttctttggagcaatactagacgaaatttgaagttgagaccttaggatttaaagagtgtatttcattttgtaaacactttttttgcttcatagttgatgatgatagaattggaattgagttaaaaattttataagtctaaactagtacactatatattgtaattatatttgtgttattaataaatttttatttatgctcgatttatttaacaattatgattatgatattaatgaatatatagtaaaaatttaagaattttaaaattttataataattaaaaaaataggttattatactataggtgacggtttaaaatcgtcgcctataaaatgtaataggcgacggtttataaccgtgcttaattgtaatatcctgataagcctaatggtaaataattagggtttataaatatattatttgttaatcaagtaataagtgagattatgatcctactaatctagtttaacataaattttaaattttctgtaagtggataaataagcgtaatttataaattacggagatttatataatatatgtgaatataatatgagttaatggtgtcataaaaatattttaagttttagcgacctcggagactcgatcgagagtcagaattgtcataacatgcttaattgatggaattaataggaatattgtgataagttgataatgtatatattgggataaatgagagtatgtgaaatttaatttagtgtcctagaagtaaaaaaattttagtagctaagaaacgataaggtaaccattaataatttttttttattaatattattatattattataattcttactttaataatattattatattattattatattatatttttataaaacgtatcagttttaacatatatataatatatgatataaatttataaacagtaaacgaacaaaatgaaactatcgttctcctctttcgataaaattttctcctatatctattttcttttattttcaatccgaaacctaacaatctaagctccggtagtagcaggaaagtaaattctcagagggagaaagcttaaggtaaaatttaatttcatttttgagtttaaaataattagttttgtataggggttttgtgaattagaatagttataaaggttctgaccttataggattgttctcgggtagtcataggactagttccgatatttttttgctgaaattgaagtaattttgggttaaaaaattgagtttggaactctttaaagcttaatttgagctttaacagcgtttttcgtttaagagctcgattttaatttctgttacgtaaaaatagtagtatttacggtatatatgtgccctgtgaagtttggagtgatttaaataagttttggtagtgattgaataagttttggtagtgtttcggtgagtgcga

SEQ ID NO: 83245 - DNA, 2011 bp, Cannabis sativa
ttggtggaagttcttgggggttgcgattgggttttgacaggccaattgtgtggtggtctgattgagttgtggccgattgtgtggtggccgattgagttatggccgattgagttgtggccgattaagttggggccgattgtattaatgtctaattgagttgtgaggattgtttaataatcagttgcaatgagttttctaggaaaatataatttccattaaacaatagtctctagagaaaagtaaacaatattcaaagtctttaaacaaccgcaggaaaattcatcgcagtcttggaaacgacaatactgaatacactaaaggattgtggttagtaaaggattgtggtacggtgtgccatggcttctaatagtaaatcttatcaggaggtggaagaacaatatgcgaatatttccctagatggagaggatgatggggagttgagtattgattttcttgtccttgaggaccaagttttgaatgttgagttatgtattgtgggctggttcttgactagcagagccattgatttcgaagctatgcgccatgttatggcctctttgtggcaaccaggtaaaggagtttatgcaaaggagattgacaccaattgttatctatttcaattttttcatgaaattgatttagaaacggtggtggagggaaccccatggacgtttaatagggttcagtttgtttttcacgatctcagaaggggagatgatccaaaaagggtattattgaacaatctcgacatctgggtgcaaatccatggtctccaactgaggattaagtctgggagtgttgtggagaggttgggtaattttgttggtacgtatgttaaggctgatcctaagaacttccagaatgagtggagagattatatgcgtgttcgggttacattggacatcactgttcccttgagacggcgtaggaagctccgtcggactgcaatggaggaggggttttgggctgagtttaaatatgagtatctccccacgttttgtattatctgcggtataataggacactctaagaagttttgtcctaagttttttgatacaccagccgagatgctcgtaaagctttatggtgcttggatgagggctcaaccacgacgcagaaacaacctgttgggctctcagtggttgcgtgatgggaatgagacggatgagatgtttgccgaccggttcaatggtggtgtggcgactgcttcggtgatgttacaacagcagccaagaagggaggaggttgttggagtattttgtggcaattcagtcctgaataagggggggaattatcctcaatttaattcttctaatagtatggaaaatatgggatatcatgttggtgttggccatagttggaatgagatacatgctaatgacacttatattgatgattcgaatgatgatatcatgttattacattctgaaaaaggcgcacaagggatggagtgccatcgggccaacgtggtgtgggccaacatgctattgggtcgtgtaaggatctagttgagaaggataatagtagtatggatgttcatgtagctgaagttaatcaagaattgggctcaaaaaacgggcctctggtgggtgctgggattcaagcccaccgcccattatgagtatcattagctggaattgtcgtggacttgggaacccatgggcttatcaattccttgggatcttattatctaaaagaaacccaattttctatttttgtgtgagactctttgacggaaggacaggttggaaaggctacggtttgcggtggggtttgatggattgtattctgttgatgcgagaggacatagtggtggggtggccatgctttggcgtaataatgacgatgtgcagctggttggctacacttttcatcacattgatatttagatttcctaagtagcttcttctccttggcatttaacgggtctttatggagaaccttatagagttgtttggtatgaaaaatgggatgtattgtgtaacgccctaatgctaaggcacgctacagt

SEQ ID NO: 83246 - DNA, 816 bp, Cannabis sativa
gagccattaaacataatggagaatctgggtgtcctcacacaattcatcacagtctgaacaaaatgagaaggaaattggagtcctataagcatctcctctaagaactcccaatcaattgtatcataggctttgtgaagatcaagtttgatcatgcagttagccttgtttgtctttcttccataatgcctcacgaagtcctggcagatcatgatgctatgccctatgggtgcacacgggtcgggtttttggggggtcgggttcggatttttagattttgggtcttgaaaatgcataacagaacccgattttcgggtgtatgggaatgtcgggtttcgggtcgggcattgtcgggttgggcatggtcgggttcgggtgttattgggctgagcccgaatatttcatttatgggctcagataaatttaatttttaaaaataccaatatttatatatacctaccaaataaagctactatatataatatatatatatatatatatatatactattttatcttattcaatacagttttcttttttttttttttgtatctgtagttaatgttaaccgacctaaagaaaccattaccaaggcacacacatcacgaaaacacacactgggctctctctctcataaacaattaatcattaatagagagagtattgtactaatacgatacgactgttctgcaactccaagaacggatggagcaaagcaacgtcaacgaccaacgtcgatcgtacgatactaaaacatacctcgccagtcacctcggagggaactcaacagtcacgggcagacagtcggacaccagcggg

SEQ ID NO: 83247 - DNA, 976 bp, Cannabis sativa
aaaaaaatcaaccctttaacaactataaataaattataaaacaaagatatttagcaatttattttgtttatactgaagttttataaataaaaaagtttaaacaacaaaataaaaatttatccatattaacgtatttttgtattttttttagtttatgatctattatgtaaaaatttcacaatatgcatgtatttagatatagtaaccaataattgattatgcatacctttttgttgcaattattccaagggcaatattcttgatctataagaataggattaccaacattttccatgtcaatatcttcaaaatgcatatttgatgccaaaccatctgtagaatctggccaagttttgattctaacaccattcattgtatttttcatcgtacaacccttgaaaatcactctttctacggctttttcatctttatattttcctaaactcccgacgctaaaaccatgtccaggaccacaggtaacattcgttacagttatttgtttactaccatctccaatagaaacacagtcatcgccggtttgaatatttgagtcgataatgttaattctatttgaacgtccaatatggatcccatcagtgttaggactattttcaggagcaattactcgaacacctaagaaggtaatattttctccacccaaaacattgatatgaaattgtttactatcacgtgatattacgtcttgaattatggaattagtaacatagtcgaatcttacgttctgttcatattcatacaaatacaaacacatcaataaatttaaacatatttatatgattttgtcaaattaagagaaatttacataatatacttaaaaataaactttttttttttttttttttcatttttacattttttttatttacattttctcaaatacagtttgttatagatttttcacttattttttttggaataattacataaggcactatttttttttgtaaaatattta

SEQ ID NO: 83248 - DNA, 1641 bp, Cannabis sativa
agatactgttgtgtattgagtatagtctagagtttaaagttaaaaaagtttgaactacatatatcaataacttcttccacccctaagtgttatagagattcttgggagtttcgaatataatctagagttcaatagatgtaaaagatctttgaactgcatatattgcttcttaacttcttccacccctatcaaatcaaaagatcttttatcaaacaaaatcttaataatttcttaagaatttacaattattcataaacattgaatttaaattctaattgttcatgtggtattatctctttgtagagattaatataccatatattttgtatcattaataaacacataaaaaatgataaacatataaatataatacggtattggcatacaagttaaaaaacacgaagctcaatttcataaaagcaattcataatgaaaatatcttgaagagaaaatttgattaatattctcaaaaatatcataatgaattgtctgcaatatatgaaatagggaattaatttccaaactaataattgaaactaaattgttcattgactaaaacaatcaattcaaaaattaaataaaaaacgagcttcatctttaacttgaacaatctctacccttctgtccaaccatccgactcaactcgatatgatagcaatcaaagtttaagcagttggaggtgaaataagaaaaaaaataaatatggttagtaaatccaaaattaataacccaatgggataataattctctaaaacatatgagtttttaacaaagatagaaataccttatttctttgccaaaaacttaggacattgggtttccagtgggccttttcgctgcaatagaagcgatttcctttttcttttgatttctgattagcagctttttttattagctatgttaacagctttaagaggcttcttactattcttccattttctcttctttctaggttttgaagtagaggcaatgtttgcctcaggcttggccgtaccatttgtagcagtattagaactaggagctttgtttcctcctttctgcggtcctccaatcaaattttcaaaagtctgaaggttgttgattaacttgatgaagtcaaaagtcaatttgttcatgacataatttgaggtgaagggaagaaaagttagagtcaaactatttaaagtcaaaactcacttgattttcctgatctataatagctccatgattctcaacttcctggaagtaacttgccatgttgagcaggtgatcacgcacgttctgatgaggcttcatccatgctttgataaaattcttggtagtctcaaaatgaacttgatttgacgccatcctgaatgttcagttaagtggttcatgatatctacaaccgtgagagtgtttgcaaaccttgtcttcatggtgtcaactatgctagacatcataaagtatcgagctttattgttagcattctaccaataatcgatcttttccttaactgccttggtttcattatcacctaactgctcaagagcatctccagttaacacaaatagggcactttctcctatgagagcaatatttatgttctctttctatattacaaagttagctccaaagagcttgttgttagtcaacagcgacacaatggggttgttcatagtc

SEQ ID NO: 83249 - DNA, 896 bp, Cannabis sativa
gtatttgccgtgcaacagtataaatgtaataaaatgggaaaaatcagtagtgggtgtaaatttccctttatataaatatataaatatagattgggcctaaaaaagaacgaagagaaagatactctgtgatcacttgttctcacttctcactcctattttggatttggagtttctataaaaatattggacttcagacaaaaattataattttactgccacacaatttttttttataaaaatattatctttttataaaataacctaaaacaaccataaaataacaaaacagaacaattaaaaacaacagtagaacaactaaaaaacagccgtagaataacagtaaaaacttaacacagtatacaatataaaactaaaacttatatagtatttttagaaaagaaaaatacagtatttttgaagaaaaaaaatccgccccacaataaaaaaagaaaaaaagttcgaaatttctatggtgtaaaaacccttttggattttggactactcattgatcactgtaggcccagagccacaccgaaggctgtgaaacaggcccaaatattcatgagggaagtacgacccaaggcctgcctttattgtggataatcaaatgtggaaatgttacttacaaaactatggcaaaagttagcattgtttataaaaatatggcataaaaagtaattccactaaatatggcaaaatgtgtttggaatagaataagcctggttctattttcaattagcaaaatgattattaattgtttattgcaaattaaacctgtgtttggaagtaactgtgtaattactaggtagggtaattactaggatggtaattacacaatttagtaattacactatattttaaaatgcaaggtctgtttggatatgaggtggtaatta

SEQ ID NO: 83250 - DNA, 1164 bp, Cannabis sativa
atattgatagttagagaaaaaaaatgaattgaataaaatataattaaaagtataatattttatatgatatgaagaaaaataaagagttgatgtaaggttaaatgtaaaaatttgaggtaaactatagagtagagatcatgcgagtactttaaaagggaaaagatgagtgttttattatattttataggaaaaatcctttaaaaaaatttaaaaaaattaaataacttttcttttcttaatgattgtatttgttttttaagaaataattggttattttaactgttttttttttttcatatttttattcttttaattatttttataaaataatatatttttttataaaataacttattttattgttgcgagtctaataatatattggtcattatacaagaaagaaatttgtccaaccaagaaacctaatattctagttgtactgcatatgctaactcatgtgctgtattattatcatttcgtatcatatgttgaaaataaacatctaaaaagataaataacaaggatctaatagatttgaaagaaaaaaaattcctcaaaaaaagaatggacaaaattgagagcaaattcagtatcactctctacgaaagaaacaaaaagacacagttgcaagcaccactggaaaatagtaaaacataaaaaattgctaaaacttcaggttttttagggtaaaagaaaccagccaaatactttacaacatccacaacatgtaaatcatgataaaaaaaaatcatattcaccttaaaaatcataaaaacaccctttattagtcaaaattttatttaatttatatttattacatattttaaacttaaccattatagttgtaaaaatatgtaacccattatgaagaaaataaggtattcatgttcatgataaattgagtgttcatgaggaaaataaactatttaatttctacaaaattttttattattagtttttttatttttttcatataataacataaaggcacatgtaatgtctctcttgccaaacttgtattattaaagttttggtcggttgttagtgaatgttcccattttttttttttatctatttatgaaataatataactattacattaaggatgaaaaaaaaaacttatgaaagaatgttactactctaatctcattcccctactcataa

SEQ ID NO: 83251 - DNA, 1065 bp, Cannabis sativa
gttcctcttctccacagggagggaaaggatgtgattttcccaatccctcatcttcaatatagggatggagcacttgtaaaacggcactcactggaagcggtagtgtcggatctcattgatgtcccaagtaatgaagtagttctgggcatactcaccaactttggacataggtgtactgttggtgtcgcccaaccactgatggccggctggatgaagtagaaggatcaagtccggttttttgtcggggtagatttcatatcaaagtagtatccaatctcatgcagattgtgatgagaccagcctagctttgcatgtaaactaaacatcgtcgagaggtattttatagtttttggggggatttatgttggaaacatcccgaagtaagcaacaatgtctcaaaagtaggggtgtagtggcaacaccgccccctgttatatatgacactccgaccatgcaatccaactaacagcaagccagtgtgctctctgatatctagtgggtatctcacagtggacacccctcactagaccacaggctaatatcttgtcaaaagtctcgactgggataacagatgcaggagggacccacctgtctccctatgatctagcatcctgaacgtgaggctcagaaactgaatgaagacatggtccaaacccatcactgaaggctgaccaagcctgtttaatggctccccgttgacatcatattcaaatagaggggagttggggaggacatcacaagttctgtaactccttctcctaacaggcgcgacctcctccacctcagactcggagtcaaaactctcgacctcctggtcaacctcaggtacctctacctgaccaacctctagatctacatcatcatgaagctgtgtggcctcctctaaaactcttactctgcccatcgttgccactctggcaacatgagggtcatatggaggcactctacgacatgtttgtttcattctgagcatgactatcagtccagcatcacacaaaagaagcaaggggacagactaaatgctatctctcaaaagcaaagctgatgggacctatgaaacagggg

SEQ ID NO: 83252 - DNA, 762 bp, Cannabis sativa
ggtcagtttgagattctactttttctaatctttgttttatttagaattttttcagattgtatctatctagaatgacaggagttactcgcacttgtgtttgaatggatgttgtttaccttggtgtctaatagcataccatatgtaaatgttatttatgcagtacagaacgagtgaacttgctcaggactgaaggtcaggcgaagattggaggcacattcatttgtgtttctggtgctgtattaatgtgtttctaccgtggttgggctttgttaggaaatatggagcctgattattcagcacaaagtgaaataattgcaagaggtcaacccgagcctgttggatggctaatgtccagtttttcagagtttgggcttgatcattttcaccttggagttttgtgcttaattggaaactgcatgtgcatggctgcatttctggccattcaggtacatgactataatttattggttgaaatgaagaaatgagacaaagtagttaatgttgaatttctaagtaaatctgaagtggaagggaatcctcttttatgttctctgctagagactgttttgctgagaagtacttactttttttctcttctttctttaaagaggtaatgaagtatcttttgaaaagccaaaattaagcataattgtagtaggttttcacaatataaagttgcagaacaatttttaaaggttatgaaatcaagtgtttaatgggttttcattcatttgacgtgtgcttgaaggttttggtagaaat

SEQ ID NO: 83253 - DNA, 659 bp, Cannabis sativa
tactaggtgggcatcaattttgacaatcttaggctactgtgttttgattttcttcttgtgtaattctaaaatttacatgtagattagcaaccctaattgaatactaatgtaggattatattataatataattaagtatgtgatattatttgagtatatttcaattgaagaccccatttatgtatttgggtatttcataattttaacctgataatgataaaactatatttttctatatttagtgctaatggactacataattatgtagtatatttgctttgttgagttacaggtgaatttcgacaagttggcacagtatagtcacaaacagacattttaacttgaactagatttggggtccaaaattatgaataatgcgttatggcaacaatatatgatatatgtatttatttggagttatatgtgtgattgaaataacttatatgcccttagatgctaaatatgttgattttaagccttaaggcaagatggtcatttgaccacaattaagtaaattattatatcaaagccttattatgaatttaaagtcataaacaccaacttcttgctttcaacaacccaccatcaaacctttttctctttctttacgaaaaatttctacacttttatatttaggaggattgaagctaaattaagggc

SEQ ID NO: 83254 - DNA, 931 bp, Cannabis sativa
tgtatccgtactattctaacgacaggtcatttggaatcattttcccccttcccctccggcctttgtagttttattaattgtgttttttcatattttttatttatgttgattagaaaatgtgggaaaattataactaatagtgtaaaatcaaaatagctaaattttaaacaattaaggaattaataatgacaagagtaataaatcaaaatcaataatcatagatatagggataaatagagcattaaaatttagaaatgattaaagggtttaagtctgattagatcaatgtgatttatgactctaccttaattttaatacaccactgaaatcctctatcaaaaagttatacacttaacctgcaagttgtcacccatataaaaaaaatactattaaaaaggacaactagtaagttttttcagccaagttcccattccatcattcttcttttacacaaaactatccatcgaaagataataaacacacaacttcttttttctccgaaataggttaaactacgccacgtacatcgagctgcttaattcaccaagctacccccttcaccaagctataactaaattatattaacgtgcttattttaccaagctcgtataacaagcagcctactacctattcataagtctctttatttactttttaaagacctactcacgcacatacctaagattaaatcatgttgtacaaaaataagtatattttttcttcattttgtaatctcattccattactaaaaatgcagtcctaactccttgttaccgtagatgtaggaaaataaattttgttgaactatgtaaatgtgtatctcattttaaacaatatatcaaaatttgtatcacaacctatacaaatccttattaaccagtcattgagacaagttttttcaaagcctgatgcttgaggtcgattaataaag

SEQ ID NO: 83255 - DNA, 1850 bp, Cannabis sativa
ctctcttagtctcatattagttatatgacccataaaaaatttcactggtagcgtctttatgaatggatctgccaggttatgttctgacgcaatcttcaagacagtcgcatcacctctttctactatatctcttagtagatggtacttcttctcattgtgcttgtgtctcttgtggcttcttggttctatagagttggctatcgctctagtgttgtcacagtagagcaccagaggtttttctacttctagattagtgcagaattctttaattgaaccgcttccttagctgctttgcaagctgctatataatcaacttccatggtagaatctgcaatactaatttgcttaatgctctccagacaacaactctaccaccaagagtgaatattaacccagatgttgacttttgactatctttgtctgattggaaattaaaatcaatatatacattaggatttaactttcctctagaatacttgagaatgtgcttcaatatctactgttccaaacctagattcaattggtaacaactaacaattcttatatcatagcatatgtcaggtcttgtatacaacattgcatacattaagcttccaactactaatgcataaggatactttctcatgtcctccatctcctgtagagtttttagatgttgatccttgcatagagaaattccatgtctcgatggtaactgtcatttcttagaattctccattgacaatctttctagcaccgtatctatataagttgcttgagaaagtgctaatgttttcctctttctatctctataaatttttatgctgagaacatagcttacttctcccaaatccttcatttgatgttgttcggctaaccacttcgttacgtttaataacctttctacattgtatttaataaataaaatatcatcaacataaagtactaggaataccactacattacctttaatgtatttgtatacacgtgcttcattttcattttgttcgaagccatactttttaatagtttcattaaaggtgatattccaagatctagaagcttgcttcaatccataaatagatttaagaaatttgtaaaccttttgatcttccccttgttgcacataccctctaggttgttccatataaatagtttcatcaagatttctatttagaaaagcagtacgtcttgacgtctattttccatatctcataatcataagtggcagttatagatagaagaatataaatgaatttaagcatggccacatgagagaaggtttcgtcttaattgagggcttctcgatatgtgtagcctttggctaagagcttagctttaaatgtctctacctttccttcaccatttctcttcttcttgtaaatctatttgcatcctataggtgttacaccttcaggtaggatttatagcccagactttattggtacacatggaatccatctcttgatccacaatattattttacttgtctgagtcaaggtcatccattacttgctggtaagttaatgaatcgtccttgtacattcacaacggataggttgtctcacaacccttccactacaacgatgtattgaggtttccttttcaataattatgacaaccgttgttggttgttcaactgatagtactaaagttgatggttcataaatctgttcatttctcatttcctcgataaccattttaccacgtgcatggtttgtgacctttcacatagttatgttgctttctgaagttgttttcattttaatgttatactattttcaggttatgttatttttattttataaatgaataacaagtcaattataaaagtataaatggataaaaagtcaattataaatggaaaagcc

SEQ ID NO: 83256 - DNA, 664 bp, Cannabis sativa
aaaactaataaaatatgagaaaggtaaagaaataataatcaatgaagggtgaaaccaaaatttttatgtgtttaggatgttaatgtgccttagtccacgagtcactattattactataagactggaaatgccttatgatttacacaagtgtttaaactctagattttgtctgagtactcaaggattgaaattctaaccttggggttttttttttattttttttttttattttttatatatttatagtgctaaggttcttgcccaccgatgtggtaaatacagataatataatgactttgggctgatttggtgatgccctgtccatgaggcgttgattgtttgataacatggagaccacatcttgataattatcaaactgtgtcctacttttatggataataaagacactttaattcttgaccgtcaattagtatctttccatcttgggaagatatgatcctcagacgagatcctagaaattaagtcttgatatcgcgagatttggtaattaatgaatatgattgtgagctagatgtttggagactcgtttgttactttcccggatactctgactaaggtcttttggatacttgctatgctggagggttgtcttgcctggacggatcttctatccagcatgtggaggacatggcttggataacaa

SEQ ID NO: 83257 - DNA, 1173 bp, Cannabis sativa
  modified_base (639)..(647): a, c, t, g, unknown or other
gtatttttttagtattaaattaagggtttgggggttactaagtggttagcaacgttaaaaatgaaccaaaaatgctcaaaatgagttgttaggaaaatggctataggtagggtagtgtagacaatttgtgtgttatggtagtgccaaggtttttaggtattataaaaaaaaaatgtcaaatccaaatcgacacacttattaatcatgccgaaaattaaaattaaaactcaaatccaacttatttacaaacagattgacttaacgtgacatgtttaactcatttataaagaagagcattgttattagagcatcgatctctaatggtggtttgtattttttataaatgttaaaactcttcacatcatctaaacatattacaatttatttatcctatgtcaaatccaaattgacatatttattaaccttgtcaaaaattaaaattaaaacttaaatccaaattatttataaatggattgacttataaactgacctatttaacccattcatataaggaaaattattattattagacaatctccaatagtggtatgtactttttaaaagtgtcaaaactctttatatcatctaaacatattatattttagtagaattatttcatatactattttttttaatttnnnnnnnnnatttacggtttgagtttctaaaatcgttttttcggtggtttctatgtgagttgatatacgatttttggttgcgatttacgttgctccgctagttgtaataggggtttctatgtagaattccaaaaaaaaaaaaaaaactgctttgaagtttaaaaattaaaataaaaaaaataaaaaaatcctatatcttatttattttttttagcactcttacttttaaaagtattccaatgataagtactcttaaaatttgctctcatgatctcacacggtgacaccttattatttaatatattattggtcttagttttatttaagaaaaaaaaaaaaggagtatgacatcaatgccaagttttggcctcaatgttaaattataatttgacacctaaatatctctaatggttagcttctttaaagcattctgccacattgacagacactttctcaaagcaccaagcaccatcattggagatactcttaggcaccttgaggcttgaggttgtaacgtccccgcttcaagcctcca

SEQ ID NO: 83258 - DNA, 2799 bp, Cannabis sativa
tgtattttttttttttacattcctaacagtttaaaatcgttgcctataactgggtataggcgacagtttataatcgtgccctatactataggcaacggtttaaatcgtcgcctatacatagttgtaggcgacgatttaaatcgtcgagaaattcacattaacgacggttgtaactgtcgccttttctgctcattttacgacagtcgtataggcgacgattatagaaaccgacaggaatactttaaacgactatttaaaaacgttgagaaaacttatttttgtagtagtgcattctatctttttagtaagatttgacaggttgtattagtattaaccttttccacaattcatctctttagtcacaaaatccttgatattgtgaaattcatatctatatgtttactcctcttagggtattcgattctttactgtttgacaactttgtattactaggaagtaacactagtagttaatccatgactagaataatgtcaaaggctgtatagaactttccttaggctgaataattatccagtagcctttagggccactttaatattcagtctcactggtagaggtagagactttggataggtttttacacttctccaaaaatcactgttccatccccaaagtaagcaccatcccagatttagactttctagcattaatgcaaatctagaaatctgagttagtgtagtgtaaagggtttcaaaaactttgcccttatagactaacatatatgtcctcctttaatcttaagatttatttgattgtcttccaatattcttttcctggattaaactgatacctactcataactctcactcaacaacatgtgtctagtttaatgtataccagagtatacatgagacctctcactgttgacgcttaagaaattatttccttagattttgtttttcctagaatagttgaaactgttctttagataaactccatgcctaggagtcgaatgacttcctatagagttagccattgaaaaattctctaaaatcttacaaaagtaagttgcttgcataggagtaagtaagttaccaagcataccacaggccataggttcaaataatctcaaacttatgatactaggattaggaagtttgcataagtccattgagtagacctattatgagaatttcttttcttgtccttgtaatagaaaacttttagttgctttatttgaatggttttaaccatagttcttttggcttcaattctttgttctttccaaggactatctattgcttgtttaaactaacaatgagctatcatcactagtgtcttccaagtcataacagagtgagtttataaaaaatctctcattacgacgagttactgtgactttttgtctaggaacatcagtggtattgtccttatcggttgtgttaataaaacagagttagtgggaccatcttatatagaataagatgatagaaaactttgagattaaatcaaatagtatctcctctactttgctactttgttttcatatttagtcatgttcttagaaaagtagtatttattgaaataaaaattctcttatcttaatgaccataggatggtccactcctaatcactttagaacatttattaaacatgcaaactttagttagtagttctgtctttccttaagttcgtgatcagggcatccttgaatctagtaatggtgtacactaagttaacaaccattccaacattctaagattttcttgggatcagacttagatgggacgacatagaatgtcgtttgctatctctaaggcattttcctagaaggactttgacagcttctagtaactaatcacagaccttttattttcatttgtatgcaactccaatggggaggtaagtttggatacaattcgaagtttgacttaatgatctttgaactacataactaaatatttctcaacccctattagtccgcaagatcttttaccacttatctattggttttttatgatacaaatcatgtacgcagcagaagagttcatattatttgattatcattgtagcatagcccaatagatctccatatgtatgtacattaaatctaaacaataaaatacaagttaagaacatatacctcttgatgactatcaaggtatcatcgaaatttctcgtatgttgtatctcttagtccagatgttgaggatgatgcaaatgaactcagaccagtagcttccaaatcaatcctccacacgcaagaaatagtgtgggctattaggataaaatgtataattaattcttgttgaattctcaacacatgagcaagaacaatttgagagagaaaattcttttctttttctcaagtaattttaaaaataatgttgtgtaaaagctcttttaatttctcgaattaagattttatttattgtaattaaatccaattaaataaatcatttttaattattgaaataaaaaatatctataaccaatttctgttgctgaaatttatgagaaaatctcttaactacttgagagaatgtcttaataactttaaaatatttttaaccacttttcaaatttaaatatttatttgattgaattaattaaataaataattagcccaaaaagataaatctccataggtgtgtaccgtgtcttacttaggagaaagatggtatcttttatcctaacaacttttgtcttaaaaaatattgtctcgataaattttatcttaacaattttctcttttttcctatttaatttaaaaaattatttatttattacaaaaataaataattactatttttttcaattcaaaattaatttttctga

SEQ ID NO: 83259 - DNA, 547 bp, Cannabis sativa
taggatgttaatcaacatgcttgttagtaaatttagatcctggtaaaatattcccaacgatatttgggttattcggtttaatttgggcgggttgtttgggttggcggtttataaaaatttatgtacagccctagttgccccttaaggcagcttgtactaggatcttccaagctctatgagccgtagtaagacagttgccctgggttttttttgaaggagaaggtatggaaaagacttcaaggttggggaaccaagttcatatcttgggagggtaaagaatttttagtaaaatttgttgctcaatcgctcccaagctatgtcatgaatgttttttcgctacctcttgaaataacgagagagatgaagagttttatgtcaaagtattagtattcattggatgttgtggaaatgactttgtaaacacaaaatagaaggaggaatggattttcgcagtctaagggattttaatttggcacttttaggcaagcaaggttggaagtttcacactaagttagagtccttggtatctcgagttttcaaagccagg

SEQ ID NO: 83260 - DNA, 883 bp, Cannabis sativa
cagtctaaaagctagtatgttcctcatctgtgatatgcatcttgatttggttgtacccagagtaggcatccaatgaagctgagcaacttgtacccggacgtggcatctaccatttgatcgattcgtagaagcggcaaaataatctttttgggcaggccttgttcaggtctataaattctatacacatcctccacaagtctgacccatctagaaactcttctcggatagtttttatatccattaagtcttatgtccaagagaatattaacacgagaactctagagactcatttcctgaatgcaaacttgaacaaaatattaatggagcttccgttatccacgagaactcgagagactcatttgttggcgatctgcacatcaatcaccaaaggatcattatgggggaagtgcacatttttggtgttgtcctttgtgaaggtaattggcaagttcatcatcttgggatgctgggcaggagattgtaccagtgtgcatacttccccctcttatacttccctcaggtatcttttttgtgcattgcgagtagtttcagcaagatggggtccaccggagattgttgcgacatgttcatccataggttgtagagtaagtgttgaaggataaagggttcccgatctcgggcaagtaatgccaccctaattagagctagtagcgccaaaagggcaggtaacgatgttcgtagagcttgagagcgtccaaccccctacagaggatttatagcgctctgttgtcccagggctatcatgtgcccataagccatccccagttcaggataaataattgggatatggaccaactaccccaagtgtctgttggaaattgggtgcagcgaaataaaatgtctcattccgttcagatctcta

SEQ ID NO: 83261 - DNA, 1098 bp, Cannabis sativa
ggggcatcgactttcacattgtcatgcttatacaatgacgtttagattcgactggaatgtgatgtgattatattgaaccgtttttctttaataaacaatagaatttttttaatgtcaattaactaaaataataatctgcaatctaatcggttaatttctttattagagacacgactaatattaaaactaaaaaacgtactaaataattaatcgtctaattcctacatcatttgacaagaaaattaaaataaaatcggatgaaaaagattacaacattacaattaaccataaaaatatctataatcggtttcatccactattcagaagacacaatagttgaaactgttgcagcaaatttattgtgtaaggtacgtaactgcactactaagaatcttttcagtcgtagagaacttgttattctcaactactaaaaacgatttcatggtgagctatcgaaaaacaaagaagaactaacaacaaaacaaaattatgttacacaaacaatactaaaacactcaaaatcatgtcacaaagataagacaaaaagaatcaaaattatatcacagagacaataccaaaacattcaaaagcatgtcacagaaataagaataactagaataacaaaaatcgaattgccacaaaccatcagaaaagaaggcaacctttaataactataaaattaagaagaccccccattattaattaacccttgtattcagccgattttaacctaataaaaatagtactttattgggctcgactcgacttctacatagcttgtatactcaaatcaaatgaacagtgtaggaaattcgaagacagtcgtaaatgccaatggaggaagaactgggtcgactcgctccttgctcttctcttgctgttgattctgtcctccgcgtcggaacagtaaatatatatttttaatctctctttcgaagttccaatgtatgaattgtttctatatttcctttattttttattgtttaaaatctgatcaatccccaaataaatcgaaacccatttcaggctggtgcaatatggggcttgtgtgctgctccctatgacgctcgtaaacaaggtaattatatcaattacaat

SEQ ID NO: 83262 - DNA, 1637 bp, Cannabis sativa
  modified_base (27)..(28): a, c, t, g, unknown or other
aaccaagaattgccgttagatagacanntttaatatataaagatatattgatgattctatcactataattcatatgtttattaagtaataaggatcaatgaatttaagtggtaaatttaaatgctaacaaagtggaaaaatattagaatattttgtatagggaagtcaaatatatgatttgatttaatttataaaatatacaattaaaattttataactaattataaatattttaattatgatcagattttgattgtaaaatattctaattgttcaatttaattttctgaattaattgtcaaaatattctgacaattattgtgacacaaatattgataagtatcctacttataaagatatagtaccattcccaagctcactactcgttttgtgtacattgtaaatgccatctaaaagagttagtgagagcttggaagattgaatatctgttcttaaagttattttcaattttcttttgtaaatctaaatatcctaggattgaagctcaaaaaattaacaaatgtgagtatttttgtcctttcactgcatatatatcgatatgtttacaactttaattttgcattgatatcgatcatattatatgctttatgtttatatattaatttcttacaataacaaaatcaactatgttaggaaaaaacaaaatgtttatatattaacttcttataataacaaaacccactgctgaaacataaaacaaaaaaataaaagcacctaaaaagtcatcaacatttaggacgcaaaagtcatcaaaatggacaccaccaccaagtgtagaagcaccccacacccatgggagcccgccaaaacccacaggaaaccaaccaaacactcacccaactaggagtgaaacccccctcactaggctgccacaaagatgcccaagctagagaaatcaatgtcatccatatagaaaccccaatcttattcttagtcatttcattatgggcgatcataactttagtttgctttcatttcgagcataaaagtcatccacggacttgagccacagcttagttgtgtgacatgagtagtaaatatgatggtaacaaactaaaaatacaactatattacacataaaaatataaaatagaaagaaaaaaaaatcacattcatcccatgttacaaaattggcaccaaagtttctactgattattcctgagttattaagagctaaggaaactcaggaagctgcagataagcatgtgattctttggttctgcaaagctcaacgaatcagaaatcctaacacttttttgagaatctttggagcttttatggtgaaattatgggcagcacctcatgactcgtctgacttgccatcgtcttctgtttgtggcttttgaactatgccccgttccaaatattcttcttcaatggtttctttgaggatgaagagtctttgtataactacagggtcaatcagctgcttggcttccctaatatcagtctcttccttgttgagatggtatgcgtcgagcatgatcttaatccacttgagtagctccttgggagtactgctaatccatacaagttatttattagttttgagcaaaacaaaaccggctacaatctaaaagataatttcatatcctgaatgagaaaattctcttacg

SEQ ID NO: 83263 - DNA, 1356 bp, Cannabis sativa
ttagtagacttatgataattgggtatatgggtgctcattaataggtaaagtatgtatgttgtatgcatgtaaatacttttcttactgagtttgtagactcacacacatatatatatttgtgtgtagaaaaaggcaaagcaaaggttgaatcgcagtgaaagatgagcttggtgaagattgtacatatctagtagtctaagcctagagatttgaaaacttcgagacaacactaacatctttttggttaagtcgttagatgacaacttttgatactttatattacatatgtgttttgtaactagatttcaggattctagattgtaatattttataaaagtggttttgtttagtaaagttgtaattatctcaaaaaaaattattaaatatactttgtatgttgaaaccatttaattaacaaaagttagcacaataattaagaaaaacaccataacgtgccctacctattagggtgttacaatagggcatttgttccaaggcttcagcaaagggagtgttgatatgttgcttttaaaacacctccgaaaacttagaaaaatgtctatcaactatagttttcctaagcctttgaggatatggcacatgcacatgctaatcaaacataataggtggactcttttttaagttcttactatcttcagttagctcttcttcaattgtaccaaaatttttaggtacatctttaccctaaccctctttttgttgtaacacaggttgctctatttgtttaccactccttaacttaaatgctaagttgtgtgccaattggtccctagtaggcttgtcacagtagactcctctcatgagttacccactactgatctcatcaattatctcggtcgacagcgatgatggaagggatatccatcttcacttcttccccaactcaagaatccgaggcttgggagcctcctccaagacatggtctatcttgacctttgacgggcaaccaagagcattcaaaggcctcccagcctcatcataagaacccaaagggttattcaaaatacggtacaagtcttttaccgcctcccaacgggtacaacctttttgacttcagatgcactatttgtcccagtcgaagcatcttcttcttgactagccacagttagctcgaccatcagttccttaacctggctgacccttggctgaacattttgaggctattctgcctcctcaacaatactaatccagcctcttatcattagctcaacgatgtgagggtcgtgagggggtgccttatggcatgtctatttggtccttgccattacaaactcagagtgtctagtaacagtatccacaatctctatggtagggagatctctagctagtgaagtt

SEQ ID NO: 83264 - DNA, 893 bp, Cannabis sativa
caattaacagattgggcgggttgtaattttttcggtttatttcggtttgtaatttttatcggttttttcggttcggtttgggcgggttatctagtttgggcagtttacaattttattttgtacaaccctataatttagtaatgatctcataaattaataaaataattgtagaaaagtaaaatatgaataggagcttaaatataaaaaaggatggcatgtttaagacaaataagtaaacacgagtaaagtatgatacgaatttgaatatgaaaaaattaagtcatgtcatccttccttttaaaaatatttgtacaacaagacatgattcatattttttaatagcacaacactgctcatattttgaaatgcatgaaaaaatatttatgaagcatgacacacacaaacttataacactaatcaatactattgatttaatgttataattctataattaaaattactaaaaaaaaatataaaattaaaattaacaaattatatattaatttattgtaacgtgcgatttaaaaatttgaatatttaaattctagaaaaattattaagatatgattctttataaaattttgttagtacatacattaatgcaaggacataaagtagaggggataaatattaaatagtgtatctttgatcacatcatgatcccaaatgctgcatcaacatcgagatatatcactcttgaacatctcagatttcttaattaatgttctcttttaatttcctttgacctttcgtgtatatatatgggtgcgcttttaatgagtttacccataaatgtgtaaaattataaaattttaaatttttatacttaatttttttatctaattaaaaaaatatctcatttttatatcacattgttccatcggtaaaaaaaa

SEQ ID NO: 83265 - DNA, 686 bp, Cannabis sativa
atgtttttattgagattagaactcatgactttcactacgtgcataaaataatagttttattattatactaaaatttatattatgtttattaatattatttttattcgaaaatatatattgtaactaattaaaatgtttatatatttttttcttaatttttttttcaaatgtgacttaatcacctcacctctatgtgggtcaacccattgtaatgacacatcagtaaataaataattacgctagccgtatgtgatagaatttaatagaattaccgcactctacaatattataattagtttgagaattatttttagtggactaaaaaattaagagggtgcaataatataaatgttgccttattattaatatggtatttgtgtctatctttggttagctttgtacttggtatttgctctaccattgtaacccaattaatttattgtatcttagttgtctccattatgatatgatatctatgcagctttaagagtgactttcccttaattttttttttagtattaaaaagtgagttcaaatcaagctgtttccctaaaaactcaaatatgaaacattacaagttgatataagaagtgaaagtactattaagcagttaatatggggcccataacagtgggcagagtttaattaagcaggcccattagacctaagcataaattagtactctc

SEQ ID NO: 83266 - DNA, 968 bp, Cannabis sativa
tcctcgtttctttcacaaatcgatatctaatgatattcctgttttaagagatgcccaatttagtattccagttatagatcttgaaggtcttgatggagatcgagttaagcgaagagagatcgttgatagagtaagagaagcctcagagaatggagggttcttccaaattgtcaatcatagcatttcagaaagtgttatgaaagaaatgaaagatggtgttaaaagattttatgagcaagaaacagaggtaaagaaagctttttatacaagagattccactaagccagtggtttataacaccaacaatagattgtatacatctccatctgctgattggagggacacatttcttgttcgaatggctcctgaccctcctaagccagaggatttgccccttatatgcaggtacacacacttttgaatatgtattattattgcttttgaaacaaaaccaaatattaaaatatgtcttctttttttttccctacttgaagagacatacttgtagagtactcgaagcaagtaatgaaagtaggaactttgttgttcgagttgatctcagaagctcttgggctaaatccaaatcacttacatgacataaattgcgatgaaggattagtgttactatgtcattactatccgccatgtccagagccagaactaactatgggagtaaccaaacatgtcgatattgattttctaacggtgttgctccaagatgacattggtggtttgcaagttttgaataacaatcaatggattgatgtttcacctcacccgggagctttagttgtaaacattggagatctacttcaagtaaaatattcttaagttatcgaagtagtttttcctaaattttattttttttattttacttcaaacttttacgttactatgaataaaatagggtaaataacattttggaccctctgttttacaaaagttaccaattggaccctgtattttgt

SEQ ID NO: 83267 - DNA, 688 bp, Cannabis sativa
caacaacaacaacaacaccaccaacagcaactgcatcagcagcagcaagcagcaatccatgcgcaaatggtaatgagaccggctgggaccaacaatggtatgcatccaatgcatcacgttgaggctactgttggtgcaggaggcagtgttgggcctaattcagctgctggcccaaacgaagggcgtggcggtggcaaacaagaaggttctgaagctggggcagctggcgcagatggtcaggggacctcagctgctggagatggagaggaccccaagtgacaaggccctgttagtcattccatatggatgcatgtggatgttgataatagatggttttgtacttttatgctcttgacaatcttgcttaaaatttagtggttacagattaggtaggtaagagtctgagttatgagtctcttggcatgcagtgagtcgtgtgttgaaatggaactagcagtaggaaagtgaaggtttggaatggaagctagtggtatgctgtaatttatgtatgtcaaatagtagtaggttaagaagtcatcactctgttccaaaagttgcttgtctcagcaataagttttgataatttatcgtttagtttcttagaatcttctctgaaaaggtttggtcaatttttctatgcgaaatcactaaaaagaaaggggtttttggtaagtttgtagatataaaa

SEQ ID NO: 83268 - DNA, 780 bp, Cannabis sativa
atttggtataagtcttaaaaaaaatttatattttatttttcaatcttaaaaattggtggtagttattttttttaactgattctttagacattaataaaatattacatattaattttgtattggtctaaattataattttaaatatttatttaaaataaaataaaaaaaataacaatttttttcttcttcgttttctttactcagccacgagagctccaccgaagcaccaccataggttgtggtcactgttttgacaacaacaaacgaggacatggtcatggccatgggactagggactttaggacctagagaggccatttgtggccttcatttggcttgtagtgaccggagctggcactgttgtgcacaaccgagaaggagagagggagaaagacggacagtgagtgagctagaaggtggaaggttggggtttgagtttcgagttgtttgggattcttttcgagcttggacgaccgagaacggccgacgtcgggcctggttgtggctgttcgacggagaagagagaaaggagagagacagagggtgagctcgagagatcggggacaggtggaagactaagttttgggttccaagacccagagatttcgaatttatggtctgctcggaccactgccgccagagatgtttggtccttgactaagtcggcaccacacaagagaaggtattaattattaaaaaaaattggttgtaataattaatacaatacattgtttaatccaaacatagtgttatctcttatttaatacaatacaaccctta

SEQ ID NO: 83269 - DNA, 688 bp, Cannabis sativa
gtgtcggggaaattcctgccgcaattacgtggtgggtaaaacaattttttccagtgcaattggtaatgcattgacagagcaactttacactaacactttccttcgccggcaaaaagtgactccctagtattaagtgtaggctaaatatttattgaaaagttttgtcggcactataatgcacaggtgaaagttggcaggctatttcaaagaaaaaaaaaagagatgaggtaccctaaaaatagaaaaaaaaaataataattcccatggaaccttctcttctataatcacaataattttctactatgatgacatcaccataattgcaaataattatatgttcaaaatttatatattaaaatataattatgaaaacagacatgtgaacaaagtatatgacaaggtaaatataatttaattttttattggtaataaatatataggaattgagttttatttagtgaaatcttaataatttgccttaaaaaatagaaagaaaatgatgcatgatataatctactaataaataaagtgagatttaataaagtattctagaaggtaagaagtgaaactcttgtaagtgctttaagaattgatccactcaatgcatagactttattctatccttcctcttgcaactaaacaaaaacaaagtgtaagggttacactactacaaaaacactctttagag

SEQ ID NO: 83270 - DNA, 2646 bp, Cannabis sativa
gagattattccaggtcaagtatgcttaatttttgagttccttagtgatggattaccaaaaagaaaaggcatcttattaatgtaggtagtctcgtatctacaaagtcttaaaatcatcgcacttgatcttttccagacaatataaaattgcacatcttacccacggattacgaaactctaactgtcacattctctcaaaagaaaagcaattaagtatagaagttagcaaattgagagaaggaatctaacaattacaataggttgggcaacaataatatatggtaccaccataaggcttcgtatcttttaatttaggctatgtttggtaggaaggaaggtatgatggctggaggttaagagagatgaagaaaatagttgctctttattgacacataaatctagccaacacttgctcgctagattggcgataaaaaatataaattaagtaataaatagagagatacaagagatttatagtagtccactccctgtatcataacagtaataaagctacgtctacttcgagtttttattgctgacgagaattacaagaaattgagtaaggcaatagctctaatttctagatagatactctgaccttaagggctcttttgtgaatgtgaaaaatgaactagtggagcttttcttttataaggaaggatgtcctattaaaatattaataatataataaaaaaaatacaaaaaaaatcactttgggttgatcttgtccattgatgacaatctaatggtaaaaattgaatcttgataaaaatcgttaattttcggagcttgaatctcgttcgttggatcgttattgggtaatctgtgaaaaaattgcacttgtcttggggacaaattttggactttaaatctttatacttacgatatggttttgggatatgacttgaaagagctttagaatgcaagttgaattgcgttaatcagattaatatttagggcattatgaccgttttactaaaggctgctcaggacccaacgcccaagttgacatactgacgtcaatctggacgttgggtgagtgaaaaaatgtcacttaacaaatttatcaggtttggtgaagttgttcactagttttcggagatatcgcttttcgataaaatttggtagactcgaaactttttaattttgctgatattccacctcgttaaaagggtaaaatatcgtagtgtgaatttgacataccacaagtcgtaactctcatttactataaaaactagtcaaatgcttgagacaaaatcagaatctgataagtagaacttagcgcatcaggtcatacatcaacttaggtgttgggtgcttctcgaggattttcccaaagcttgttttaatacttctaaggtatttgagattgcaaacaaggtctcatataccaattttaaccaaaataagaagaatgcccagagcataatttgtatttgaggagcagaactacacactccaagttgaatgtcaatctgggcgttggggccctattttggctccttagagattttgtttgctccccgaaatcacttgtagcttcattaaaagatgcccaaaatactttttgcggaaacaatcatatatatgagaaaaaaaaatacatgaaagaagaaagcacaagaaaaaaaaacatatgagacccatcataatttaagacatcaagtgaaactaaaggtgacttataattgttaaaaaaggttacttaattatgtgtatactactaatatttgtaatactatccatatataaacaagattatgttattgactctcaaaaaatgttctaataaggcacaaaagcacattgatgattgggagccctctcaattttaattttattatggaaaaaaaatcaagtccactaaataaaacttcaaaaaatttaagtaatccctcattataagttatgtccctctcttttgattattaatgattatgtctaaaagttactaaaataatatttgttctccaagttagagtatgcaattgagtatatgcctacaaatattatattgtaaacaacctaaaaaagcattttattaaaaaagatctttgaattaatatattttctaatgatatatattcaacaacctatacaataccatcattaataaacaattttctgattaaaaaaaaatataaaaataaacaattttcttcaaaattaataaataattgtgcttgtatccatgtgtgtttacattaaacttaaacccaatatcttcccatattatcttattttttttttcaattgaattgatgtatttaaaaatcactaatctaatacatttaaaaaaatcattaatttcaactattataatcataaattgtcataaaaaaaagatataatcataagtcttaacaattcatatacaattccaagatacaacttagtttgacactcaataatcttcaataaaaatctagttttacaacatttaaaggtttttctttttttttttctttctaaatgtacaaaattgtagactaagaatgatcttgttgggtgcatgcatctctaataaattaggtgtattgatacatttttcacatttttcacattataattctaagtatatttttgtttaataatatatattgtagttatattaatctttaaaagttttgaaataatttatagtact

SEQ ID NO: 83271 - DNA, 652 bp, Cannabis sativa
aactgctgcttgatcacattcacagccttcgagcttctcgctggtaacagaaaacgacaaagaaagagaccaaaattgagggagaaagtgagagcgaggcagagttatcgtgtcaaagtgttatcaacttaaagatacaaattttataactcatgcttatgcataactctataattatttatttatgcttatgtgtatgacacacttactaaattataattagaatcgaataaatcaaatgaatggatttaatatataaaataattaaagattatattttattaagttgtttagtaaactgattagaaaataaattaaaattattatattttgtttagaaaatgtaatataatatatgttttactatgactaaattgcaatagttaaaatgtgtaattatttttgttttataaatttttgtcatctgtgaattttttattttttattaataaaattaaatgttaaaataaaataaataaggaagaaaaatgttatccttgtattttctctgctcacccctggtactaggcatactttctattacttgagtctattattttgatttttaatttttttaattctcgtatgattcatttttgcttaaaaatgaagaagaatgaatatgattaagaagaagagaatggatcttttt

SEQ ID NO: 83272 - DNA, 905 bp, Cannabis sativa
tgggagaatgagtatacattatgttgagtacccaaaatgcccatgtatactctcctcactctctcaatctaccgctctctttctctcttcactctcttctctcaaaacctcattttctctcattcactctcaaccatttcacactaaaattttattcttagtatacaattaacctctccaagctactacaaggtactagaagttagagaatttggtgtaggactccagtcttacagcattgaacatacttggggaacaatcaatgagtaaatgatctttatgttattagttcttatatttaatttagaatattattttcataattaatctgtgagttgttgttgttttgtgttaaaatggttactgcatggttttttattggtttttctggtttctaaatttttttcatctaatttaatggggctagataggggcccgatgctagtgcaatagagttcttagatctaaggacaacaatgatggcccgacgggcctgatatcggcccgatgttagtccgatggtcagcttggacctaaggacagggcccaataggcccaatattggcttgatgctagtctaacggtcatcgtggacctaaggacaaggatgatgggcccaatagtaggcccaatatggtctgatgcttgacatatttatggcattttgaggacttttttatgacttttttgttagatttttttttctaattaattgtattttttaatatctggtcaaaggttcaactgtttttgcattcgttatgtataatggtgtttgtgagctcagattgggtttaaaattgagcaaattttttgacatttaagattgatacgaacgtcacctactcacgtttgcttgatcttttgtacgaagaactcgatgttgacaaagtgcagtatgactt

SEQ ID NO: 83273 - DNA, 1152 bp, Cannabis sativa
cagagttaaaagctattgggtttgctttgaagtgggcactgcagaataattggttggaaatttttattttctcggattctcaagtggtggttcaggctcttcagaaaaggaactgcattcctacatggcagctcactagtgtttctttatcagttttagagttaatttctaagtttagactgttcgttctattatattaaccgtaggttcaattgtattgctgatggtttggcaaaaaaagttagacattatagtcattttgctggccttttcttaggggagggaatcccccctgtgattcccaattccttttccttttaattgaactaatggttctttcagaaaaaaaaaaaaaaaaaattcctaagttgccacatcatcatcttaaacaatgagattatatagatatatagattataaaattcaaaccttttaactcttcaacataatagtctcttcgaaggatcagggacgaacccacttttattgatgtggggctatagccccactaacaaaaatattgtattttaaaaaattagatgcaatttttttaatttcataattatagattaaaatagtagaaaaagcccacacaaaattaaataaatctagtaagagtaattataatatagatataaatattttttaatgataaataagcccccacaaagtaaaacttctgggtccgtcactgcgaaggatatactcatattcttcactatactaggtgttaacacaattttgtctatgccacatcatgtaatattttaggggtaaaatttgcctccaaatttattataatatatatagccattaattagtgggaacaacaagtataatatttttgaaagtaaatatagaatttttattaatttactataaatcaactaaaagataagattgtacctcaacaaaaattcttgttgaacactcgatctaaaaaagaacaagatgctctagtaagactatgagcaatcatgttagtttattttttaataaaaaataaggaaacattatttaaagatggaagaagtttatgacaatcttatataataactcaaaaaaaaagtataggtaataaatttcaaatagagtgtactgctaccaagaaaatctcactccaactccactttctactattgttgagtttta

SEQ ID NO: 83274 - DNA, 1105 bp, Cannabis sativa
cttaaaatcatccagaaacccatccctttcttccaaggactactcgacagctagcaatagacccatctgagtaacggaccaagggtggaggatcacgtccatagagcacccgaaaaggtgtacaacccaaggaggaatggtaagtggtgttataccagtattcggcccaagataaccatttagcccaagccttaggtctatccgaagcgaagcaacgaagatacgtttccaaacaacgattgaccacttccgattgtccgtccgtttgggggtggtaagcggtgctatgcctcagctaagtaccttgaaggcgaaacagttcagcccaaaaatggctcaaaaagacccggtcccgatccgagacaatgatgcaagggaggccatgaagcttgacaacctctcgaataaagtgttcggcgaccgtacgagctgaaaatggatgtctgaggggaatgaaatggctatatttgctcaactgatccaccaccacaagtatcgtgtcgaccccctccgacttgggtaagccctcaatgaaatccatagtcaaatcttcccaaacttgagcgggtaattccaatggctgaagtaaccccctggagacatagcaagatgcttgtttcgttggcaaacatcacaagcgcggaaaaagtcccccacgcgggccttcatgcccacccaatacacatccccacgaagacgaaggtaggtgcggtactctccggaatgaccgcctactggagagctatgatactcttgcaagaaatgcagagtcaaggaaaatgtagccgccaagaccaaccggttgcgatacagcaaccgaccctttgccaaagtgaacccgagaaattatttcccttgttccaaatctgctacaacacgagagaggaaaggatcttgactgttttcttgttcaaccactgcccaatcaagccaagtggtggtagtgagcacaaaacactccttggcctgcacccgagacaaggcatcagcagcccggttgcccacccccggccgatactgaatgtcaaaatcataccctaacagtttaaccaaccacttctgatgtttcggagtcaccaaccgttgttcaagcagaaacttcaaa

SEQ ID NO: 83275 - DNA, 797 bp, Cannabis sativa
gcctctaaagggtgtttttgtagtagtggtgatcataaccattgaaatggaagtttaacggtcacctttacccctagtttgagctaggtaggtgcctccaagaagtaaaaagaatggactaacaccttcataagtgggataaacaatcaccacatactcataggtcaaattagtctaaggggtaaatgacactaaccccaatatggacataatcattctgaaaggtagatgagtacatcctcacgacaccatgactaccctcaacgtctaagaggtctcagggggtcaccccgatatgaaatttcacaccctcctcgtgttgggtctcgggggtgtcacccccaagtattagcttctattcctgaaggtggttaatgaccgtgttacactcttgagaaaccctcatcgtcagtggctagttcaaatattcaaatatcacaagaagctcaaagacagttacaaacccacaaaaatagcaggatattatcacaaaaattagacttcaatcacctctgaaaactaagaagacggttgagatagctccgcattggtcgcgactcctgaagcgagaagcaccaaatttttcccttatataaggggtcacccatgacttgggaaatggatccgcaattttgagcacttagagaaaaacactttattattctctgcatttaagagcatatgttcttgacttttgcaactatgattaataaaacacaaggagagtaggctattaccaatatttggggctgaacctctttaaattttgctacctttctttacatttattacgaatt

SEQ ID NO: 83276 - DNA, 705 bp, Cannabis sativa
tgaaattaccccaagggtacaccctaaaaagaaacattcctaaaatgcagtataaaaactacaaaatagtctatatggcctcaaacaagcttccaaacaatggtatgccaaagtcaacaatatcttgttacaatagaatttcaaacaatcaaaaaatgatcacagtttattcatcagaacaaaatcagacatcttccttgccttattaatctatgtagatgacatagtagttgccaccaatagtcttgatgaactacaacatctcatatatactcttgattctcacttcaaactcaatgaacttgaccccttacatttctttttaagtcttgaaattgccagatgtagtaaaggaatctctgtttcacagagaccattcacacttaatttactaaaagaaactggttatgtaggcatcaaactagtctccactcttatggagcccaacaacaaactcaacaatgaaacatgcaaacttcttaccaatcacacacaatataggactttgattgggaaactcatctacctcacaatcacaagaccagacatttcattctctatcaacaaactaagaaaatatctacaaatccaagggaaactcatcttcggcagctacaagaattctacagtacttaaaaagctctcctagacaaggactcttcttctatgcctccacaccaaaacatctccacctacaagcctttg

SEQ ID NO: 83277 - DNA, 678 bp, Cannabis sativa
gggttttgaaaaaaaagtatagtttttttatagtttaagtttttggtataataataaatttttttaattatttaagcatataaaatcaaaattttaacttcaaaattacgtaaaatttatttgtctttattattttcaatcatcttttaatattatttaattatcaatcaagattcatttattaattaacaaaaaattgcgctaacattaataaaattatatcttttctttctcaaagactaaattactaaatttgtttttaaattaccaattaactaaattttaatataaggttataggtaataatttattaattattttagtaattaattttcaaattaatcgtgtaagtgttcaataataatttactaattaaaattaatataattattatagttacaaatgtaactattcaaacattatctatgtatatattatagtcatactaacacttggttataaatagagaacattatttattaattcctagaaacgacagtgcatcgtgtgtcatctatttttcaattactatgtttttttttgaaaaaagaaaaatagggtaacaatcacataattaattaattaattgtgtttaaattaacaataatctatcaatttgtgcttgtcatcaacaatttaattataggctaaaagaaaaatgagatcacattttttttt

SEQ ID NO: 83278 - DNA, 714 bp, Cannabis sativa
taaaaaattaattttttttttcttcttctttcttctttcttcttctttttctgcagaaaccttcccagcccaataaacgtttgactaattaatttgggttagacgaaaactatggaaagagtgtagattttctgttaatgaaaaaattacataacttaaggctaaaggaaagattaattaatttctcatattatttctttgaatataaggactccgaacaacatgtgcaaaaaagcaaataatttagctacacaattatatttacacatttactctcatagcaagtatcaaccccatttatttgtatgggaaaaatattcagtaaaaatgataaagagaaagaaagaaaatgattattggggtgtgtgatcattcggaggacggagaagagtctgtcgttattattatttggagagccacctaaaacgacgccgtctgcaatggtctccaccaatcctcatatgaaccttttcaaactcagatactccacagggtatggtgatccgacccggatgattgaagccatggactttttcagcctccttcaacagatccccaaacaaggggcgattgaagtatatgacaggcaccaagtacatctgagtctcgtgtagtgactcacccacgtacacagccaggtgatctttaggtatcccttgctattgattcagactatgaaccgggtcatgggtcaagggggcataatcaccagac

SEQ ID NO: 83279 - DNA, 625 bp, Cannabis sativa
agtactaaatagatagaaatatcatatggagttaaggtacaaatctattcattaagagcccaatttagtcttataatggtttatcatatatgtaatagttgttattatagctgttgcatttgatgtataaatatttaagaagcttttcttttcttatgttaactacttttctttcctcttttaaatttctgattctaatcattgacagttgtgatcataataacaaatttcgtctagcatcaagaattttctgagctgaaaacagaaaatgagtggattagggtcctagagaaggcactgccgtcatcatgcttatttgatcgaaaggctgatctctactcttacttgtcagttgtcaatgcctttgaaaattaataggcttctaaatctatctaagccacatagctagtttgcatttcaaatcggctttcgtctaaacctttagaagtcttctcagatgcagattgggctacgaaactcggatgacaaaaaagatcaactagttacattttcgtatgtttcttggtgaaaatctgactaattggagttcgagaatgcaagaagtcagttaccaaataaacacttgtaactaattctgttatttctgtaacttcacttgtcactc

SEQ ID NO: 83280 - DNA, 544 bp, Cannabis sativa
ataacttcattgttcatcattttagggtcactaggacctactcgcttgaactttttcaaaggatagcacctaaaaacgactttgttggaccttagtgccctgggcaaccattgatgtcaactaaggcacctgcacagtttccaatgcccaaattgaccaccctagtcttggtaaataaggccctagagttgttttcttcttgccacgtgtcaaaagtggtgtccatgtccatgtcatctggtcattttacttttaacaaatagaagctatatatgtccatacctatatctatgattaaaacttccactcaattatactactgagttcccaaaattttagtattggctagaccataaagtacgcttataatgaaaaaaaaattaaagaactcaaatagcaaaattagcttaaagcttaatctcaagtataactgcataataagacatgaaaatttagcaaataattaattaatattttattaaattatggaataatatgtgattgtagaaataaaaaattattattaaaaaattgacagatgttg

SEQ ID NO: 83281 - DNA, 841 bp, Cannabis sativa
tgatgttgagcatttgtaccctgtgtgttcctgaccgcagctacctcacattctaattcaacgtttcgtcgatgcgcctcttccagacagtgtcttaagtgacagttttccaatttgtaggtaccttctcccagaggctgaatccccccacgattgggctcttcatctctcatcccagagttccggccattcccacgctgagttattttcgagcgtgttgtccgcgtactcagaccaacgtcgggttgagtcttccaggaatgtgtggtccatgtactggggccaccctcaggttgagtcctcttggaacaggtggtccatttggaccttggcttggtagaccttctagagcccatgggctctttcccagaacgatgaatagtttcctcatgaggggtattaatattttctggattttcagccatgaatgagagttttttttaagaaggaaggaaggttttttctgagcattttcacagagactctcaatgaaagcacgaaaatgttgacacatatttttgttaaccaaatttgagcctcaaaataatgatttcacacagaaaaaaataaaagctataaaagttaaagtatgaacacagtgttttgtacgtgcttttgcagttaaaattctgtatagtccacgagttaatcttattcagatttctgattatttttcaggtcttctctagtacgagttttttcgtcccttttatgatcttgtttgccactatttataataacatagtgggcagttaactacaaagttgatcgttatttgtttacaatgatcatcccctaatatcacggggtttgattatacatcacgtagtgtaaatgcggt

SEQ ID NO: 83282 - DNA, 1949 bp, Cannabis sativa
tttgttaatttaagatattttgtcttgtgtaataggtttttacaatggtgtataaacgaaagaggggtcctggtgcagagaaaaaggatcgagctgagataaaaaaaaaagaattcaaaggaagcttaggaaaaatatttgtaagttatttgtcccagtgtttttgcgctaatattttttggttttgaaaacaacacttttaattcccttcctttatttaattgatgacgccaaaccaatttcaaagcttctgatgttgcacatgcagataaatcaaaagcagatttgagtgacttggagtgtgttatggatcttttatttttcatattcatcatttaccgttctttacttaatcgagagtcttaattttgcaggtgcttggtagttttaaagagtaatttaagctgctaagtgacgaagtgattgagaattgggcttcatatgaagttgaggcttcccctccgaaggttggtgttagaggaaaagggaataaaggagacagtatctactgagccaggaattgagaacaatgaatgggtaggggatgttcaagcatctggtcgttgctccttcgaatgtttgggtagaatagtcccacttctcaacgacgctcaaaaagaaatggtcacaaatgtttgtttctcaacattcttaagggaggatgacccctacattgatgctaagatagttatttggctgatcgatcacatagatccaaccaattctcggctggagatatttggaagaacaattcaactatcgtcgaagctgtttgaggatgtcatcggaatcagggatgggggagaacctgtggtaacagaaaatgatcgtgacctccttgagttgagaaaatttttaagggtaatgactataggtttttcctgactctgctggagaaggatctgaaggaaagtagcgagagcgattacctgtttctcattaagtttctgcttatttgtaatggaacagtcttgctatccaagaatggtaccgaggtcagcattagctacatgcattctttaattgatacaaggtcaattaagaagaagaattgggtgactgctggctttcaatatctaatgagctctctatagcaaaacaagactaagaacacgaaaaatgtttccaactgcaccatatttttacaggtcagtttccccttattgtgatggtattaattttattcgtttgtgcactgcagtgcttatagatgtatgtatttttgttttgtagaatcttgtatatttgactcatgttgactggactgctagtcacgtggaccgcactgtggctccaatggacttttggaacataaaacagtgcgaatcagtgtacatgtggattcgagaccacggtggtcacactagtggaaaggtacatttagtacttcaattttctgatgcgttagaatttgatttcagagatatgctaactaacttttttggtgtactaagcaggtgaaattgactatcacatatgtgttagtaacaagttttgaatccactgtagttgggcaacaaacaaatgacacaatttacaaagcgacatgactcacaatctaataagatagcttactatattggggacaaagtttcttaagcaaaggaagggatggatgacctaaacgacaatatgcctcaaaagcggaagcaacactcgaacaagcaatagaggttggcggaagtgggtcaagaacatacaagccacaagattcatgtgctttaccaataatcgtcttcgtcataagatatttaaaaaacaatgatcaggaaagaatgagatacaacaatttagattatgagtgagttgactaacctaaagcaaattaaaggacaaataaggtaaatgtaggactgatgaaaaagtgagcataggtgtaggtgttggattatattttactaggatctaaatttactaccatgtatgttatttaacatcctgaatatgaa

SEQ ID NO: 83283 - DNA, 1878 bp, Cannabis sativa
cttttctcttccttctccaaaaagttagtagtaagttgtcaatctagaaccaaaaactcttctctaaagttggtaaagagattttatttaaagcagtgatccaagctattccctcatatacgatgtcctgctataggctctcactctctttctgtaaacactttgaaagactcatggaaaacttttggtggggatctttgggcaataatcatcataagattcattggaaaaaatggacccaagtttgtaactccaagttttatggcggtctcggttttagggatattattcatcaaaaccaggctatgcttgctaaacaaggctggcgcatatacactaactctgattcccttgtgtcttccctcttaaaagctaaatattttaaaaacaatgattttcatcatgctcccattggtcattatccctcatattgttggaggagtcttctctggggtagggaccttctttctaagggcttagtttggaaagtgggggatcgtaaatctattcacatcactagtcctaattggattcctgatttaaactctatctcttttaaaaatgattctcctccacctaaaaacatagtttcttagttcatcggggaggatggtacttggaattctgataacctcaattttttttcatcaggagctagttaactcgatccttaaagtgcctattgaccccactaatatggattgtctcatttggggacacggtccttctggatctttcacagtcagtttagcctacgacctagccaattctaactctcccaatcctagttcttccaatcctgagactttcaaggcttggtggatgtctgtttggtcctccaatgttcctcccaagattaaatattttatttggaaggccttccaccacctactaccttctaaacttaatctcttttccataaagattattgataacccttactggtctgtttgtttaaatcaaattgattctaatactcattccctagtaaactgttccaggacaggtaagtattggaaacaaacccacttttcttctttctttcataataataaagtttgtgacatcaaagaatttctttgaagaagatttgatttgtttcaaaaagacgagttgactatactttttggtattttatgggctatttgaaatcatcgtaacaagttcctcttcgcatataataagaagttttgtaaggatatagaggtttctataacttcttatttgccggagtataaggaagctcaagataaagtcatatcatcaccaaatagcactgttcaagatatcaactctgatcagtggggcacgaaatctttgttttcttctctagttaagtataaattgagtgttgatgttgcggttaagaacgcatggatatggagccataatgcgagactcacaaaacaaaataattgcaggtttcttatcctcagcaaactcaagacttcctcctatctatacagaagcaggggctcttcttagagtattacaatggagccaagcagttcatttccctatctgttagaatttgggataagatgaatggggttccatctcaaaactaattagcaatgggaggagtagctcattcctctaatatattctattatctttccacacattagtgatgtgagactatctaacatcctccctcaagatggtagctattttatttgctcactatcttggacaactcgatcataagcggttctttctttggctcactatcccggatcacaagtggctcttttgctctactttttggatcggtattttttttgtgactctttttatttttttgctcactattcttgaatcacaagtgacttttttgactttggctcgtggatcttttttttttttggatttttggtg

SEQ ID NO: 83284 - DNA, 909 bp, Cannabis sativa
gaaaatttagtgggttttttgacttaatgtctcttattagtcattggaatctatacattcacagtcctagcttattggattgctttcctgtgcatgcatcaccaagtgctctatataagaggacaccaatgttgagtaataaataattcatgcatgattgataccaatgaatgggaaagaaaaacgagctaaatatccagaaccatgtaaataatataattgttgatggtatcttcgtacaaacaagagcttcatatgagaggaaacttgagtatataattgaatacaatgcttattgtacgtgtaacagaaatggggaaagactgagaaataactggtgcattcaagacaagacagaaatctttgtgccaattgttatcctaataaatatgtaggaaatataggcatagaaaacacttgctcgatagcaggaagacataagaaaatagaaccttcatcactagaggacaatcaattctggacaataagtgctgaataagttcaggctccactctaaagtgtactgttgaatatatatttttaaatatatatatatatatgctatttagtggctgttaactctgcaattactagtttcagtactttgtcgttcaccattatgatagttctttttcccgcctatgtccttcaaccttcatataagggtctcggtcttttgaaaggcattggataatgacataaacttgtactcagaatcaatcagaaggcctgtgacagtgctaccccatggatgtaggtctgtacttggcactaaccagtaaaaccgctgtgttcaatttttttgtgttgtggtgtgtgagatcttgtgagagtaacaaaataaatatatttatgtacaaagttcaaaatgcagtaccagatataaaacaaacaaaattccaattctaa

SEQ ID NO: 83285 - DNA, 1113 bp, Cannabis sativa
aaataataataataagaaactctcttaattttgaataaataaggattttaggggtcggagcaaatttttttttttaataaagcaagcatatctaattttagagtcaactttttataatttctcttagtataattgcattacgagagtcatatttattttttgcacactgcaaatgttaatgttggtgaggagacttttcaaaggaatgcgcaaaaactttctcactcaaataaaacgaacatcaagctcgatatgtttgatacgctccatatgtttgatacgcacatgaagcatacaatcgaagattgtcatcacatcataaaataagagactcagagattggatatatcataggtaaagctctaattatgcaatcagatataataaaatatatttaattatgttaaattgatttttatggagttagattttcaccttccattgctaggtagtttaaataccaataataatattttagttctttttttaaaaaaaatgaaagtgtgaacggttaaacttgtgacttccttaactaataaaaaaattaccactataccaagcaaccttatttatattatttaacagaaaaatgtttgggataagaatccaaaaaatttagttacaattaaaatccaaataatttaagatcggttttaatatttttcagctggtcgggcgaccgccccacctagtctacacctagctatgcgtgggagtcttgtgtaaaagatcatcacgattcaacaatgaacttaattagtaaaatccctttaattattgttgcaaattaagaatttaaagccaaagaaaataacttgccaaatgccaattaatgatagtagtgttaaaatatataaccttttcaacacgagtcttgattacaattagctgtgtaatcaaaattgaattagtactaataatccctttgtacttagtgctgttcttgtacaatataatcatattatttatatatatatatatatatatgaataagaatatgtatgtgtaagtgggggctataatatataaatgctaaattaatgttatgatatgcatgctaaattgtgtgggggagattttttagtttgatcaatagtgattatagtactagat

SEQ ID NO: 83286 - DNA, 1944 bp, Cannabis sativa
cagaccatgacaccagattacctccaaaaaaacatcacacagccccttgtacttcgtctgtcatcaatgcaggaagcccaatcaacattcgagtaaccttctaaagtcaatgttgaggttggtgtgagatgtaatccatgatggacaatacgtttgagatatctcatgagtcgcttgcaagcttgccaatgtatggatgtagaggcatgaatgaattgactcaatttatttataatgatagccacatccagtcttatgagtttgagatattacaaagtgcccaatatacttctgtaaagagtgtgatcatgaaatgactctccttttgtaagagatagtttagtagatgaacttgttggatgggcatatgctttggctccttccatgttaagtcgaacaagtaaatttgtaatatatttgatttgtgagagatccatgccagttgaatatcaatatatctccactctaagaaaataatgaaccagacctaaatcttttagagaaaaagatttgttaagatcaaaaataagtcgagtaatgagaagatcatttggtcctgtcaccaaaaagtcatcgacgtggactaatagaatgatgagattgttgtccgagccataaatgaataatgaagtgtcaaattttgatgcaaagaacccctattctagtattttatcttttaatgtttgattccaggcacggaaagcctatttcagcccataaagagctttgtggagttgacaaacatgtgaaggtttcgttagatccacaaatcattcaggttgactcataaacacagtctcatataatttttcattgagaaaaacattgcttacatccaattgagagaaatggctaaagtgagaatgatcctcactgtggcaagtttaagaacaggaaaaaaagttccctcataatctatccctagtgtttgcaaatatcctttagcaaccagtcttgatttgagcctttgaagagtgtcatttgcattgagctttaatttatgtatccacttattgccaatcactgaaatctctagtgaataaggaacaagtgtccaagttcccacattcttgagggcaacgaattctttgttcatagacttaagccactgaggatttttaagggttgtagctgtacttttgggttctgatggaattagtgattcgagtaagggatattttgttgcattgtaagctttaggttttcttatcccacttagagatctagtctgtattttctgagttcttgtcaaagcttgtatggctaagatagagataccagtcatcttgagtagttattgcaggaatgggaattgggatagggttattgtaatgttgaggatcaaccatagagatactatttttagcaacaagtatgggattggtgtgatttgtgtttggggttctggtggctgcaacaactatgtcattggtgtgtgtttcaatgtttaaggtgttggtttctataacaggtataggattggtgcgcgtttcagtgtttgaggttctagtttttctaacaggtatgggattggtgtgtgttttagtgtcagaggttctggttggtgcaacaggtattggacaggtatttgtgtcattgtgtatggtgtttgtagcagtagaagttatgggaattagatgatggggattttgtggttcatttgtgggataatgttggtgtgttggaggaatttgatgtggtattatgttgggtggattttcctcaatagaaaaggtaggatttgttggatcagaagccacaaaacccgagttagtgcattgaggaacatcaatagtttgaaagctaaaagtaagagcttgagatgagtaaggtacctgttgttgtgaggagatactgttgttggagagtgcaggaaagtgtctctcatttaatgtaacatgtctcgatatatagatcattccatcttgatgttcacacaaataa

SEQ ID NO: 83287 - DNA, 807 bp, Cannabis sativa
attaccatcacattattcatcatcatctactttctacaagcaaaataagaaatcagtattcatgatgaacttcacagctgatcacaacaactgtgttgttccttttacaaattcttatacttattctgatagcttgcaacaatgtttagatcaacaacaagaagatgactacttgaagaaattgatgatgaggaatattactactacagaaaatattaataatgttaggacgttagacttggaattggagttgggtttgctcaaaggtcatgatctaaaggaggatgataatgataatgtactggatttggagcttcgtctatagctataaattggtatgaatattatatatgttagctaataattaatacttcaattatatatattatatgttttaattctatatgtgtatatatttaattgggtctttttttaaaattaataaaaaaaatgtgtaatatatatatatatataattgaatgtgtccctttgcttaattataactagctatatatattaagagaattacttgattattggtttattaatcatattagatatatattatacatgattatagtaaatctcatagttaattttcttaaattaatggcatatatattcttatttcttatagggcttgactgaatcagagaaccctgagagatttacatcatcaatcatcatcatcatcaaaagtgttggtattggaaatcataaattagtcacattatatatataatatatatttaagagtgtatatttgatgatgtaagattgtgcatctccattattgtgattattctc

SEQ ID NO: 83288 - DNA, 1687 bp, Cannabis sativa
attgacttgtaaattatgaggtcaaattggttgtctttcaaatgtacatgggaaacatattaagttaaataatactttggcggcttgaagtaatgaaagatgttagagaaataaaagttaatttaaggggttctgaacctctcacaataagactattaagataatttttcacttgaaggttaagtaatgtagggttgatatcatttccggcttagacatagtgttgcaaatatataagatatctttgcaagtgcacaaattaaacatgtagtaaagtggtctaaagactaatatcgtctcacaaaaagcttttaaaacaattatggctaatactaaacctaattttaccaaagtaaacatttacgaatgattagaaaaaatttaaacaaaaattgcaaaataaatcttgataaaactcaagataaagacaagtatctaagggttttgattttgctttattataatttcaatttctttcattaatatgcctaaatcaattcaaaattcttaaaatcttagagcatttttttatctctatgttttttgtttgagtgtcgcataaagaatgtgtaaataaacaataatctatatctctatatgattatcaaactttctctccatcaaattcaatataaatctatatttctcttataaatatggctatgtgttaatattcttaaactaattctttaaatcattgatcagtttgattttgacttgttaggattttggaagtctaatcatgcatttaaagtcatttggagggatttaaatacatttttatgaaaaatagtagaagttgaagagcttattcgacaatcagaatataattgtgaattttcacaacttcaaaggaagaattaaattcagagctaaacattatgctgtatattggttaaatataataaaagggtaagcacaattgtggtgctttatacttttaaaagttttacatcaagagagtgagaactttgatataccataattattaattatgttttgaaagtttaaatgactttatagagtgtataaggttatctaagaaatttgaaattgtttggagatgtcaaagcggacatttacgcacatagttattttgtgtccaagcgacatgtcacccatgccaggcaacatgtctccttgagcacattgcacgagtcatgcatttacgtaactttgactctatcagactgctccatgtcgcttgggaggtgagatgaagtttccaaaacacaaaaataaactctgtctgaaagttccaagcgacatgttgcctagtcctaatcttaggcgacatgtcgccccagccatttaaagaaaatttcagcatttactttaaaacgtgttttggctccaaagttgattcaaagtgtcctaatcctattggttgagacctaggaagacttttacaatatatagggtttatgagagtgaaaatatgatgatcacatattttctctttctgtctaaatgtaacgccctaataattaggcacgttacccaaggtgattaagaaaccctaatcccctaaatgggattactagtatgataagcgcggaaaagtttaaacattaaacgaacataaaatgaaaataaaacttgtaataactttaactttacaatcaaaattacatgtttcgagatcccaaaaaaatatttacaaaatattacaagtcctttccactag

SEQ ID NO: 83289 - DNA, 736 bp, Cannabis sativa
cctttaagtaataaatactcattattggttggtgctccataatccaaagcaatttaatataatgtatttattatgttattatttggaaatgcataggagatagatatagcatatatagccgtactcttctttcaatgaaagaggaataataacaattttggaaagttaggtaagttgagaaagagagaaatgcagctttactcaagagccaccctgattttgtatggtagctctaccagccactcttcttctctgtccattggtggaactatgtgtccttgtggagtggccttggccatatggcccccctaattttttagaagaaaaaaactatatataagttatataaattaaattagggtaattagattttagttattagaaaaaaaaacctcttattataagcacaatgatgaatttttaagttgaagatatataaaagataaaagcccaaatccactattgttgataagagtaagatttattattttggaaaattgtatggtgcacctttttaaaagaagtgcattaatgaacctttatttgtttcaccgtctagaaaatatttttagtataattttgttatataatcatgtatattgtgattatttaagatattttataaaatgtagaaaaattcgaaaaagttaacacaacgaaaataaagtttaaatagtctgttgtacattaagcttttttattatatacgcgtgtgaaataaagtgtttgaacatat

SEQ ID NO: 83290 - DNA, 1372 bp, Cannabis sativa
  modified_base (26)..(28): a, c, t, g, unknown or other
cctattcccattcccattcctattcnnntattttcattcctccaaaccaaacgcctcccattgtttggcaattaactacagtcctcgtgaaagcgatactttatttatcattatattacttgattcgactatgtatacttttgtactagaattctcacaacaagattttggcactattattggggattgttttagttaatattaaaataattaaattttattctaatttgattttttttcaccttttactaactttatttgggtaaatctttctcttttcaggaacaactagtttatgcaacgtcaagaaacaaccacaagagtgcttgttgatcctgatagaaagacttgtaaaaagaatagaaaaaatgagaggttagaaagagctgcttctggaggggttagattagaagaagtcatgactcgtaataggaataatgagggtgcagtagaccaggataatgcccataatccacctggtagaagcttgaagaattatgtgttacccacaatgataggggtccaatcttatataagaccacccgttgttgatacagataattttaaaatcaagtcagctattctttagatggttcaatcaacaatccaatttgggggctaccttccgaagactcaaatatgcacttagctaatttcatggagttttgtcaggcatttaagatgaatggagttagtgacgattccattcgcttgagatttgtaatatcccaaaaatctaattatgaataattatggtatattatatattatggattaattaggtagtggtaagtaggattatgatcctgctaacctaatttagcataaattataaatttgttagtaaataaataagtgtaatttgttaattatggagatttatttgaaatatgtaataatataagttatttgtgaaataaaaatatttacaagttcgacgacttgaaaacttgattggaaaccaaaaatgttacagtggttttagttctaaaaatcgattttagacccgattgtctgattaccgacattaattagtctttttttttttttttatatatatacaaataaaaaattcgtgtgagattgaaactcaaataattaataactaagggtatttcaatcctataattaaattgtgtatatattcatttaattctgcattttatacataattatatatatactttccattatccatataaatgtctaacatatagcccctatgattcaaatgccaatgtagtttcaccattgttcaacgggtaatatcctacccatttttgtaaactcagaaataaataaatttattgataaaattgtcaaataaatctagtatttttgtagttttgatgttttctttagttgccatttt

SEQ ID NO: 83291 - DNA, 1392 bp, Cannabis sativa
ggtatttttatttcttgttgatccataaaaatgtaaaacatagggaaaaccatattatataatttccctatagataagaatgaacaattgctattctacttctacaaatagcaatgaaaataacaattgaaggggacataaaattttgtatatcaaatccttgcaaaaatttatacacaaacactcagagaaataaaagtgacttgtgaactatgtagatttaattacaaaactacgtaaaaatccttactttatttaatgtagccattacagttcaagtataatttattacataattatttcaaagtattaattatcaagacttatttatgttaatgaaattttgatttaacatttttatgttttcattagagcttttgataattaaaactcataaacacatctccttaaccatgatatgtaactatggaaaacgatcctcagaatgttcatatgaaaccggaggaacatgatggaatgaaccataggagagccctaaggaactcagcctgcgaatattccaaacacatgaagaggccctaatgtttcaaccatggaaagacctaccattggtgctcctgagatgacgagaaattatgatggcgcatatgatcccacaagatatgtctccattatcagagtagaaaatcgacaattgcaataaaggttggctgaatccaatcgaaggaacgtaaaacttgagcgtgaagcaactgaggcgttacctcaatttcgacgtccgcaagaaaggccttggggatctagggcatggataagttaaaatgtccctcctgtgaatgagaatgtaccccacacaactcgcccccaagatcaacaacacgaggcaacaagagatgtgccaattgattcggaaggtcattctaatcctaaaggttcaaaccacatggaaatgtgacctgatattcttgaaccttctcacatgggaccatcaccctcaccaattcacaatcctccaccaagcaaacatcatcctcctaaagaccctcataggccgattaggagtcacatatcttacttgtttgcccaaaggagtcgaccaagacaagagactcactcacatagaacaagttcgaacaatgtcagtaacaaacctaggaacagtcaatctcgacgtcaatcttctagatcccgcaccggggaagtatcacatggaagaggtaactctccttgccaaaatcatggcagacaacgcaccccaagttatctagaaagttaccactcagaaagtatcgttggccaggtcggtcaacaattatgatcatgccctaatgcgtcgccaagactacaaaaatgagcatgatctttgaaatcaaataaactaaaagcgcttagatctgcgtgaccagataagtcaaaatacttcagacatac

SEQ ID NO: 83292 - DNA, 1288 bp, Cannabis sativa
actttcagtccagttataaaagcatccaccatcagaatcattttttcactagctgtcacttatgattgggatatacaacaaatagatgtaaataatgcttttttaaatggagagttaaaggagaaagtgtatatgcagcagcctcaagggtatgaagatcccactaaacccgattatgtatgccaactgaccaaatccctctatggtctcaaacaagcaccaagatcttggtttgacaccttaaaaggaaccttaattcaatggggattcaaagttttagtttcagattcttccctattctataaaaaccagcagggttcattacttcttgtcttggtttatgttgatgatttgttaataacaggtgctgataacactgccctttcacatctgatatccaacttgcatacaaaatttgcattaaaatctctgggctcggttagctatttcctggggtttgaggcctatcgaaatgcatcaggaatttatctaacacaatcaaagtatgccactgatcttctttcccgcacaaactttgaagaagccaaggactgtaacactcttatggtttcagcaaataaattagctcaagatgacagtcctagcatggacaaaccagaaatttataggagtacaatcggggctctgcagtatctcacattgacaaggccggaattgcctattctgtcaataaattgagccaatatctcaagtctccaacagttaaacactggaatgcttgcaaaagaattctgagatatatcaaaggaacccctcatcttggactacatttcagaccatctacattactcagtcttgaaggatactcggatgccgattgggcctccagccttgacgatagaaaatccgcaagtggcttctgtgtcttccttggtggcaatttaatcaattggagttctcgcaaacagaaagcagtggcaagatcatcaacagaatccgagtacagagcccttgcctctgctgcaacagaactggtatggatacactcgcttctcactgaaattggcatcggtctacacaaaactcctccagttctctggtgtgataatcagagtgctcaatccctggccctcaatcctgtcttccacaccagaaccaagcacattgaacttgatgtacactacattcgggaccaaattgctcagaacaagctgcaagtttgctacattccaactcaagatcagactgctgacttgtttactaaacctctgtcctttcctagattccagttgttatgtaacaagctttacttagaacactcaaagta

SEQ ID NO: 83293 - DNA, 609 bp, Cannabis sativa
aaaatatcgtattttttataaataaaatcataaaaatcataaaaatatttaaaatttcgtacaaccatatttttgtaattttttttattgtttttaagtatttataaaataattattttctatatgtattattttataaataaaaccatttttagaaagaaaaaaaaaacaactaaaaacattattgatttaatttccattaacattttttatggataaatttctatagcagttaatgatatgctgtgatgaacttatgattgtgaatatttgatttttaaaaattactactttttttatgtatattattttatgaataaagcaatttaaaaaaaaaaaaaaacaacaacaaaaactattatttgcttaattaccgttaaatttttttttaaataaatttacagttaatagaacgctgttattatattgtggatatttgattttcttttgtaaataaaaaaaaaataaaaatgcacctggttttcaataataataacacaaataaaatagtatagggtgattcacccccttaaaagggatgcactgatgcaccttaacttgtttcggcatccagaaaatttttttaatttaattttttttcatattcat

SEQ ID NO: 83294 - DNA, 983 bp, Cannabis sativa
taaactgttactaaaatgtaaagattgtttgaacttagcaagagcaccagcaggagctttagtttccataaggaacaaaagttgaggattttggtcacgaacaagcaaacagagacgatcgaatgcactcgaattcctcaaaccctgtgcattctagcttaaaacattcatggctgtgagcgaaattactgatcaacaacacccgttggagaagatggcattaactcagtagaatccataagaaaattagaaacttcctgagatatggaaccatcagtagatgaagattgttgcttgttgctgcgacaccttttcaagatgcttctaagactatcagaatccacttatcttttgaaagccttgttatgcagaacagagtattgatcatcttcacatgtaatgatagtttttcctttagcctctgtagaagtaataatagcatcacaactcttaacagtataagcattatccatttgagtagttagattcctgaggtgaaaatcggtggggggatgtgtggcaacatcattggttatgggatgtaaattgatggtagaaataaggttatggctagtgttaagtcccaccgtggtattagctaaaatcccttcatcaatagagggaattcaagaatgatagtaagaaggaaaatgagaatgaaactcaggtaaaatctccctagtaggagtagccaaggattgtttagaggaagattcaacaatggtgagtggaattggataaggaatggttccaatagctaagtgtttattggaatttatagcagggatagacggagtaatggcctttcgagtgagacgggtcaaaaaaagataaacattagccttggaaaaatcactctgataatgagcatacccagaatttgggagtttatccccaatcatttcaaggccataaggaaggttgggattaattattattatcaatctcttcaaggaaggaagtgttggaattttatgccctaa

SEQ ID NO: 83295 - DNA, 773 bp, Cannabis sativa
cagagccatcaccaccctgcaaaaattcatacatgatcatcagttatatgtaaaaatgacgcatttcatagattgaaattcaatttttatctatccatatcagtaataagtgacaacaacaaaggattgtcgggataaaaaggacaggaactaaaacactactctagctcaaaacagtgtgacgcaaattgttagaattagtacgaatgtgcataattctacctcaaaattacttggcaatgagttctatttatcacacattaacaatgttaggctatttctaatacacccgcctaacgattcggcttagaaaatgtgagtaataagtgacaacaacaaaggactgtcgggttaaaaaggagaggaatctaaaacactattctagctgacacaaattattagaatttaaatataattttgcgggactatctgtaatagtatttctaatacaacctcctcatgtttatgaagctttaagagaccacaggaagaaattaatctgtgtataaacacgtcgacgaattctatatttgattagtaagtactaatgcagcacatgtaagaaaaaacaagtttctaatcatcaaaggtcaaatatttgtgtcataaaagtaatgatctgagaatgaatatgatatataatataagcatatagaagttagaagattagactcacatatttcttgcgaccatggcgttcctcgctgtaaccgtacttgggacgatcctcatcatcatcatcacgcctctcataactaggcttacgataaccc

SEQ ID NO: 83296 - DNA, 643 bp, Cannabis sativa
tattttgatgtctaactttgaaaaacttttaatcgttactagtcggcattgtgatttaataattgtcgaactagttttttctgagtcttgcatattgctgatgttgtaatgctttgctcgtttctgtagattttgctggttccatagacttttcaacccttacacaaacttgtcatcgttgtttgctgttaattttgttaaatctattgggtttttggatatttgaatttttcattcctgaaacgtacttatgtttatttcagctttcattttagtatttatgaaaatttgttctattgctggattttcacctcagtattcttacttacagggactttatagaagggcaatagagttgctgaaagctccgccattggaaactgaaggtacggtcaatagcttaataattaattagttatttaagggttcaaaatgagggggaaatttaaaagtaatgtcttttttttttttttttttttttttattttgtggattctgtaggtgcagacgcaaaggtagctagatgtgatattatggcccttgctagaggtaataaccaagaatttaaaatggtttttaaaggaaaaattaactgtaaatgtatctgaataacaagtccctgctgcatacacaccgaaacaca

SEQ ID NO: 83297 - DNA, 604 bp, Cannabis sativa
tagtcacaacaattattgtgactataaaaacacatttagtcacaacgaattataatttttgtgactaatacctttagctacaaatattttagcgacaatataagaatgatgatttataattagttataatgtttttactttttgtcgcaagttttgtaattgtgactaaaaataaaatttgtttattggttttattaagaggtgattctttattattggttatcgatattattacaccaataataatataacacttttagatagtgctagtctgctagacactactaatatttaacttttcttaattatattactatttcaaatcttaactaattacgaggccaccaatatagagggtataatggtaatttaggtatcatagtagcatctataaatagaagtattgcatgcatatatagtatatctaaaaacatttgctataataataataataataatagtaagaatgagtaaaaatgataatatgggagttggagctggcacaactaccatcctaagtattgatggaggaggagttagagggatcatccctggagtcatgcttgattttcttgaatcaaaacttcaggttataataataatt

SEQ ID NO: 83298 - DNA, 721 bp, Cannabis sativa
gatgttataggttcgaacttttttatttgtttcttatacttctatacttctatatagacatttatccataatttttttgagaatgaataaacttcactaaggcatctgccaaaagggcgaactcaaatacaaggattagttccggacactaacctttgcataattcaagttaatgttatatatttaaaattttgtcaaatattctataatgataatctttaaaatttacataacaaagggaacaattacttcccatttttatttttacaataataactaagttcaatgaaaaacataattccgatgcatataataaacacatgaacatgtttcactaattacagctcatttatattcaactaatctaaaaaaggacatgcaaacattaattatacacagaattgtcatatttttcttttaataataacatagaattgacataattaaacgactgtatatacatcatagcttctgaaaatctcatgaaccagagatttgaatggctttaacatcaagcttcttcacctctgccttagggacaaccatagtgagaagaccacagtactccatgccagcctttgcttgatccaatttagcattctccggcaacctaaaccacctcaagaacattcctcctccctgctcatcatacattatttccttctccttctcctccttgccactaacctggagcagcctatcgttttcgtaactgacttta

SEQ ID NO: 83299 - DNA, 1291 bp, Cannabis sativa
  modified_base (959)..(962): a, c, t, g, unknown or other
ttggtgagtgtaattagaagccttcaattatctgtaattatactgtataattgcataatcaaataaataagtcaaactaagtagttatcgagaatcacacttgaatgaaattacaaaacggctttgcaaatgcactattagtaattacatgaaaaaaaaaattaacattatacaacaattaattatctacaaaataataatatttgggcgttaaaccttccttaagggttagacttttggcttgacaaatctctactagatggattcctacaaaattcaacttagttcgtcatgctctttgtcttatttgcgagttaaaagaagaaactatccatcgtattttttggagtactctttttttatattggacaataaacaaaaaattaataaaaatcaatatattaatatatatatagataaaaaaactgaagtataagatgatgatgacattttttaaaaacacttccaattctagaatctaaaaatcaatcaatatatttatataagagactttaaaagtgataaagtgacatcttatattttttttattgtattttctcttttgtgggagcttcaaattttatttaataaaaaagacatatgattccttactaacaattgtttttggcatggtatacattttaataccaatatatataattttttttagctatgtatatattttttaagtattaatataataattttatttttgttagaattttttttagtatataattttattactacattgtatattgtatatatttaatataatatatttattttgtaattacaataaatcaataaactatactaccaaatttatctagcataatttcaagaactttttttatttttatattttaaatgcaattttttaatatttttataaaaatccacataacaattaacaaaacaacataaaaacccaaactgtaaaataaaaaaaaaaaaannnnaaaataatatatgaaataattcccctaattttatcaaaattaacatgaaataaaagcaatttcataattttcattatctaattttattctatttgcccagtttgctaaaacttaaaaaaaaatcctaactattctatatatttggagtcattttccacatttaaccgtaagaattaaataaatcaccactgttaaatgtgctttacagaaatgtagtcagttcctttgctacaatagccattttgagttacacattcaagccctctaagtttctcccacataaataccaatggataaacataaaataccattctactacaaaccaacaa

SEQ ID NO: 83300 - DNA, 633 bp, Cannabis sativa
taatatataaagatatatcatatatcttattactaaaataataattaaaatactaaaaaaattaaacaactagttatttttcatatacgattctaacctattgttaccgaacattatgtatggtaatttacgatttgagatttgttgctttatttattgttctgttgtgacgcaaacaatggtgagatgctgcaaaaaataaatttctataaccaatgagattcatatagtttgaatagttttcttttcttatcttaatgtcattctaatgacattaaggtattttgatgaaaaattagttttgtgtgtatacaggtggtatatatataagagtttgatacaaaaattttaaattaccactaattatacctaaagatcatgataatgtgttgatttttttgaacataaatatcatgatcatatattgatttttaaagatctaccctataatgatattggtcatattttaattaaaagatcatgattatatatgtataaaatttaaaaaatatgccatataattatattagatcatgtttatgatcgtgagtgtgtcttcttaatagaaattttgttatttattgattgtatcttaataatgatcatgtccatattaattgccatgctaaatta

SEQ ID NO: 83301 - DNA, 768 bp, Cannabis sativa
cgttaaaactgccaaaatagccaagaaagaggctcaatacagagcctttactgaggaacagttaaaggttgaggatttggtcacaattgaaatgttacgtaggtctggcttaattataaagtttcagaacattaatcctgttagcctccggggacaatgccaggctcttatagaggtgaaaaaagccactgcaacagatctagtcgtcgttatcattgaggtgggccaagaggagaaacccctggagcctgactggctgatccaccatccaaatcccctatctgaggacgaggaggaaatccctgagagatttgctcttgcatatctggacgtagggactgatggagctagcactttgataaatactttttgagtttagaccaccatagatatcccatgaaagattatatagatagagtagacaaaattgttaggagccctagtaatctgaaggcatcctcgtggggaacctcatagcagctcactgaattattgtacccatgcacaagtatttttagtggatttttctatttcatgattgtgcttttatttgctttgacttggcttttattttatagttgcttatattgcagttatgtgtgtagatactccagaatctaggatgttgaagtcgttgagtaacaaaattgccgccaccttggccaaagttagagaaactcaagagaaggggaagggtaagatcaagtcccaggcctctaagtgttgggttttatgccctaaataaaacccatttcatataatcagatt

SEQ ID NO: 83302 - DNA, 686 bp, Cannabis sativa
ttttattttaatttttatcataatatttcgaatatatttatttttattttataagaatatgagaaaagaaaattgtataaattaaaaattattttttatataaaataaaaaatattaaaaataaggtctcattataaaattttttttttttttaattgacccttttattttaaacttacaaaacaaaaacctaaatgtgaacaaagcagacgtctataaacggcgatgtttaaccgacaagagtaccacgtggcagcattatatactcgtgtttttcctcctagtccttcagcagaaatcaaacggtacacgagtggcttacgtggtcaatttgagacctaagagaaccaagatttgattgacacgtgcatgggttgtatttgtgcttatctctccttattgtcgtttagttgagctgcactttgttattattattaatgctgttaccaattagatacggttaaaccctaaaccggtcaaaattcggtggtcactggtcaagcatataaccgtcatttcgagaatattctaaagatcattacctttttcctttattaaaatcatatatacactgtttctagtcaaaagagttaatattatatacatatacatatgatgaaggaatagtggttctctctttccaattggatttcatactttcaaaaatttacaaaattgggctctcc

SEQ ID NO: 83303 - DNA, 2723 bp, Cannabis sativa
  modified_base (165)..(166): a, c, t, g, unknown or other
  modified_base (2157)..(2159): a, c, t, g, unknown or other
tacatattgtctcatcacaattgtatgcttttgataataagataaataaagcctactttttgtttagagatctaggaaagaagacttagctgatatcgaattacggtaattgttatggatcaatcaggtattgtaggtgctaaaatctacaatgatcagaatganngtttgtgggcaccaacaacctgcggaataaagacaaaagataaccgtgaaatctcgagacaccggggtggtgtcggccgaaggcacttcgacgatcaagtcagtaaacttatagtgtgaattaaaaagaaaataagaaatgtaagtaaatattttctgtgtcaatggttatgcgagatgatcgacggccaaaccttgctcactagaatgaggaagagtacgtcaaattgtagagaaattataggtccaggtgtaaaactacaaaaagagagtgaatattagtgtatcattctatagtactccacgtccccctcactcagtcctagtgagtgtctatttattatcttaggaacacgactacctcttgaaacgtggtccatccttagagaaacagtcttcttccacttttatagggatgagcgtcatcttttagattagttgcaggataaacatattctcatcattacttggagggttgatctctttgctccgctacgctagaaaagattgctatttttatggtttagttgggaaacttaacatccttattcctccacgtgtcaaacctaacatgacactttaagatcaagctttattgtggactggacatttgaatatgggtatgactcaaaagggatggattgggtgtggctcatgtgagccattggacttacgggttccttatttctgatttataagtgggctttgtaagtactttgatcgttggaccttttttgttgggcttagaataatttttggccactacaagtatgtatacttaattattatccgtgtgttcatgaaattatctttatattgatatattacatgctaaatttcgttggataatttatgagaattttatgtttatagttttaaggtttataatttcattatgaaattaattttggattttttaattctattgattataaattgaaattgattataaataaatgattttctatcgttttataatgttgcttcatatttaaattcctgatttaatcgaaaaattagtaggttttatgttaaattttttgttttgaaattttcagattaaattacaacatttacattgtgtatgcatttatacttgaaattaatagtacagatctcttagaaatctcatccgatcaaaacccctcaatgtccctgtcattttcgtgcattttttggtcagagttcgtccagatccgacaagagcacgaaccaagtcgcgcggccaaattagatccaagtggaagttgaagataatcttttccaaccatgcccacacaggcgaggtgcgtgggggtgcgtgcgaccccttctgtcgttatttttttacgtttcttttttctagcatgcttcgaatttaatttttaattttttgatgatttttaattaaattttttactctatttagtaattattattaatttaatgataaagttaaaaaaatattaaaaataatctttgatgattttttgagatcggtaaatcatagaaaattttatgggctttttttaattttatttgacatagtcactctgttattttgatttatattgattatgtaatctccaccaacattctttaatatttttctattatttgttgttctaaaattataaaatttgattgtttgatgcaaaaataatatctatggtggacactttattttttaagaaagttgtgtgttatgtgtattctttttagaaaaaaaaaatattgtgaattgatcaaagttatataagtttaatcgtatagagaataatatatgagatgcatgcatacatagggtaaaaaaataggaaaatttacaaaaatactgaaatttgggttaacatacaaaaatactatcacacggaaatctttttaaaaatactatatctatataaaacatcagtagaacacaaaacagaacaactcaaaacaacagtagctaactaaaaaatatcagtagaacaacagtgaaaacttagcacagtatgaaacttataaaaaaannnagtaaaaaagtaaaaaaaaaataccgtcaggcagtatttttgtaaaaaaatgacaaaaattagtataccatgtaaattttctaaaaaatattgctaattaagtactaaaaaaaataactaaacaaagattacacactattgatgtaccaaaaaaaaacaaagaaagaaagaacaaagtatatattttataggtagttattagctaaatctcttaatttaaaagaaaaaaaaaaaatcaaaagccaaaagccaaaaatgtgaccttatataaaattgataaaaaattaaatactcaagaatgctaattaaataatcatttttaaatatagattttaaagttttagagtttcatgtcacttctcatatttttcctaaatatatagatttaaatttatataataaaagctaattagtatttgtaaaacaattttttttattagatgttaaagatggaagttttttacttggagcaaaggatggtttttatgtcagtagtttacagacagtctgtgctatatatattttacggtctttaataatttgatggtggttactgtgattagt

SEQ ID NO: 83304 - DNA, 715 bp, Cannabis sativa
taatttatatatataaaaaattatctacctatctatctatatttatatctatctatttatgtatatatataaaggagaagtattgaggatgatggtaggtggctccgaaaccgtgacgagattggtgacttctttcgacagaattttgcccaagttttcacctcgattgaccctgtgatcagtagtgactttgatgatctcttcaccccagctgttacggatgtggagaatcatgatttatgtaaattccttctgcagaagagatcaaacaagtggtatttgcgatgcatcctttgaaagcgcctgggcctaacggcttctctggaattttctacaaaaagtattggaggattgttggtagtcaagtcgttgagatggtccaagaattcttctcccaaaaaactataagcagtaatttgaaccatacttttctttgcctaatccctaaaacgactaatgcttgtaggttcgatcactttcgacctataagcctttgtaatttttgctacaagataatctcaaggattctcacggataggttgaagggtatcattgataaactggtctctcctactcaatcggcatttatcccgggccgttggatagctgaatgttcaattttagcccatgaggttttgcacagtttcaaaaataagaaaggaaagcatggtgtgatggcaattaagaccgatatgagcaaagcctatgataggct

SEQ ID NO: 83305 - DNA, 609 bp, Cannabis sativa
cagccacccatgaactcaaacaactaagtattacacgggcgggtttgggtgctattttattccttatctattgaattcgaaactcgatcaactcgcctgatgttcaacctacttctagacaatcttatatatatatatattaaaactttattatattataaacccaatacctagctaaatgcacatttattcaaatttagtgaatcatttggtgttacttatgtatataatatatagggagtagattttgttgtgagtatgcattctattcacccctacaactagtaaattacttgtttgcttgattagttattattttttctactttttattagtgtggagtaaataaaagaaggaaacaaaatgatccattaaaattatacatatatatatgattataaaatttattatgttatgaataatatatattaatatgttttgcagaaatcgatcgaatcaacaaataaaaaagctggacgaaggtttacaacaagtgctgctggggaggttcctgtttccttccaactccctaatgattttccacctcatcatatcaatattgacatggtcagtcactcactcacttatataatcatttatatatatata

SEQ ID NO: 83306 - DNA, 893 bp, Cannabis sativa
aaatgttctgtgtcttctattatttcataatattcaaagatatatttattagagtttttaaataattaaagacattccgacataaacaccaaatacgaaaggagttcttctagatgtgtcatttttctcaaataattttttatgtggtcacacactactcgtataattatagtacggggacatatttaactaagttaaattagctaaaattaaatacaataatcttaaaattttaaacattaactctaaattatagatatgcaatcccaaattttatcattagagtactaataattttttgccctaaatcaattttacttctggaaattatttaactgcaaaaataaacaaaatgtaactgttgtcattacttcaagaaattttatcattagttattgccttcacattgtatagattgctttttgtactactattctggttttgtactgtactgacagttaagttagttatcctaactaacttaactgtcttagcttagctacctgattcaacctatgtctttatataggttaactcttgtacaatgtaatcaatcttgtaatacactttctcatcaataataagaaagcattcattatttatttccttggttaagagcaagtgctctggttttatgcatctgtgtgtatggcattgttgtcgtaagtcgttttcgattgccaacaagaaagagtttgatcataagtgtaagattgcaaatccaacaattggtatcagagctcagagaagaggttcaaagaagatcatcttgatcttagctcaagaatctggtgaacatccaagaaaatgggcaatgcaaagtatgatcttgaaaaaatcactggaaagaacaattttggtctatggagagggattcaagtagctctgctagg

SEQ ID NO: 83307 - DNA, 2516 bp, Cannabis sativa
cccattcccactatgggaatgacacatatcttctcactactatcttcatccgacatcaataacttcatcaaagcctcttcgtcagtctttctaccatagagttcaggttcatcttgtagagaagtcttcgcacgtgaactttctaatggtttcatctcgacaacattcttttcaagattcaagtttccaatctgattggctaagtactccaacctcttaagaatctcttccatattagcattcctcacacgattacttgaattagaatttttagagaaacgagagagtaacttactcattgtcttccttttgctttcttagactcatcagctttgccgggtttcatagcatcgtattcaatattgccaaagaagtcttcagcatcatcgacaacatccagaagatcatccagccacttctccacagcagggtttttgattctcttgttctccacctcaaagagaaccgcaacaagagtattgaaggttgacttcaacttgaaaagcctctcaaaaacaaaactttcattttttcctttgaagaagagctcttcaacatatggagacgcaatcttttcaagcaaaaaatcaaaagaagcagaaagaacaacaccgatcacaagctcagtcatcggtaacaagctcagttactacacacaatagtcaaagattcagagaggaagatctataggagagactgagagcaaaagagtagtcaaagaatgaggcaagtaatggaaacgatggtatctaatgcttcttttgatttcaatgttataatattttattgccatatataaattatcgtaatcactatcagattagcacatgcttacttcttcttttctattcatccaatgctatttaatttgacagtatttgtacaattaactatataatattgactgagtatctccttagtttaagttatatacagtctagtctgtatttgtttgtcttcttgctattataaaacactattttactgcctttcaaatggtcccaaagttctaatttatagacaaacttattatatttattaatgtttgttaattttggtcttttaatgaattccattactataatattgtttattagtagactaatgattctaacaataatgaatataataagtaaatttgaaagtgccataaaaatttacaattccaagtatatcgatttgaggaccaaaccaaatcagtaagtaattaagaaaaaattaagagtttagcatgatcttaattgactggtaaattcatcactcaatttatttagtgaaaaagcacaataaaccagattactaatttttcattcctcgttctgatgtggattttcgaagatcaaattttgggtggcaacttggatttttaagtcgaaaggattctagggactttcttttgaggtcttattctatatgaagataatcttaggcttatagactgtagagcataaatcgatgtctgatataaatttataggatgattgatcaatcctgtttaatgggaatgaatgatttgatcttattgttgtgtagataatataatttattataaagagactcattcattgcatgcaccattaatccattttaccataatttttatcaacattgagttacatgtttaatattgattccaaccaagaatactattgatctaacaccaacacaacactgcttgtgtcatgccatggaatctacctccttccttccttcctccatattaagaagacataaattgaatagaccataataaaacaggggattcttctaattattaacaaattcaccaataaattattaacacttgttcacaaatatatttacaaagatttaatctctattttaataaaaacagagattccttgaaaagaaacaaggcaaggcagaatctaaacaaaaacaacaactgtacagactaagagcagaacaggtcctatagtattatacataaataaaatggaagaacgataagttaatcaaacaaacctgagattatgtcgcaaatgcaagctcatcatgagaaaatgacatggtgtacgtgactaatgttgttccagtactcctcattcccactctcctttgggtcgtactttttcttcaccagaggacaacggtgtatgctcaaagaagtgagggaggttggaaacccttcttctgacaatgtctccaactcagggcaaaacaagactccaagtgtttgcaaggaggtgagttgtgtaagcccatttttgtccagccctctaagttttgaaaaaaaagagatactaagagaggtaatagtggtaggcagtagcccttcttccggaaatgactccatatcttctccattaccagaaatagaaagataggtaagatggggtaatgtttgccaattccatttcatccttaaaagttcatcatacgatataacaagactagacaaagtaacaggcagaactcagcttgggagcaataagtccatcatttgggaaagatacaaaactaccacaattacgaatagataaagatgttagttc

SEQ ID NO: 83308 - DNA, 520 bp, Cannabis sativa
agaggaagcataataacgtcagtgagctattgttgagagaaatcttgtatttatcttgaacctagtaacataggtcttcttttgcgtttgcttttagtttcgatcattttggactgaggaggatatcgtaatgagatttgcaacattaagatgttggggaagcaattgccgtgttcaaaaagagttggttgagctagctggctcacttgaagaatgttaatttgcttttgcctcttattatggcttgctctaaagatggaagttggattgtatgcattcagattggccaatgtaagggaattgtaaccaataaagcagcaattcacatgacaaaatttggtagagcctccccaactacttgatttatttactattaatttattccagatcttttagcgtgttgacaatctgaatttggtgatgcaacttcaaaggcattatctttgactagtcagcattcactgaaaatggagaaaatggtagagttggcctcttcaaaacttgggggtgagatttgagt

SEQ ID NO: 83309 - DNA, 1314 bp, Cannabis sativa
  modified_base (36)..(44): a, c, t, g, unknown or other
gccaaattgttttcaaaaaacaattttctgtttttnnnnnnnnnaaacagttttttagttatgatgtcaaacatgcactaaatttttcaggtcttaataatatggtgacatatacttttctttacataaaataatattaaaaatatcacatggaaagcatgacaaattgacttatcaaatattgattttaaaatgtatataattaatccgcactcaataattaaaagtttctttgaaaaagtaataattaaatatttcttttcgaaaataatcattaatcataatttatatagattatgagttttaagtttaattaattaagatggtattgggtaatatttttgttttttaatttttttatcagaaaaatgacagtagaatttttatttttaaaaattttatctttaaaaaataaaaaatatgttctataatcactttaatttttaaattttaaaaatagataacaaaaatgtgttatgtaaatttgacaaacgctcttctttaaaagtcgtgagctcagatgttatgtctgttcttttcttgaaacattattaagactcagttggcatgagattttatgatgcagttatggattattttcaggctggatcaatagtgattgatcaatgcaacgagtgtaattcttattcttaaggtgcttaatttaaaaaagtatctcagtttagatttatttttctttacaatgtggttaagatttattttaaaaattattgcaaatagaattagatcgatttttctctgacttatttgtagggtggaacatttaaaataacaatgtgttagtcaaaaaaataagggtttcttcaatattaaaaaacaggtaaataaataagaggtatcaatgaaaacatgcctgtgaaaagaaccatctaatttattatacatatcttgaggaaactagaagtttctaggtatggattgacatgtaatttataaattaattattcttatctttcttaaattgttacattgaatatattaataacattattttgatatggtagcttagaaattagtgcttacttttttaatattatctctctgaaatctatatatatttccatatttgggatgatcctataatcaataatgttgtagcagtagttggctggccggtatatgttaaatcatcatttaagtgcgtttgaaagtaattgtgtaattgctagttagggtagttactagagtagtaattatacattgtactaattacattatattttaaaatgcaaagtgtgtttggatatgaagtggtaattacatatgaattcctaatatcttgtttggcaaaat

SEQ ID NO: 83310 - DNA, 724 bp, Cannabis sativa
caagatcaagaaactcttgtaattgaatctttaattcccttacctcagcaagagccatttgatagggtgattttgatactgattctactcctgaaactaactcaatgacaaattcaatttccccatgaagaggtaatccagacaaatcctctaaaaaatacatataaaaattaacatacaagcctcgtactcttgggtccaatcgtaattgtttgtctagtattcacaattttaactagaaattatatgcagcctctatgcattaggtctctagctttcaaatttgtaattctgggtatacatgatcctcataccttacccctaaacacaactaggtcagcactatcaggttcaaataccaacattttttgcttacaatagattgggactccatacttggataagaagtacattcccaaaattatatcaaaagcacacaactgtagctcaatcaatttggcagttaactcacaatcgtcaatccaaaaagataaggatctaatccatctagtatagatcattaactccctagatggtaacaaagttccaaaccctgaagcataaactttaagagatttatgaaaactttctatcactctacttgacacataagagtgtgtagctccagaatcaaataacattgtataatggaaaccattaataattaactggcatgtcacaacagatggacaagcatcaacgtcagcctgagttaccatgaaca

SEQ ID NO: 83311 - DNA, 1006 bp, Cannabis sativa
gtgacaagtgaaagcacatgtatatatagtattttcttccttttatagtttttcttaagactgattcgagaaatgagtaagacgtctgactcgcataaaacctagtaaaactgtgtcaaatgagttaataatacatgcttcaggttagagtgcttaacattctagatgatagccatttatggttaccagattctagtgggaccttttcttctaaatcagcgtctactggttttcctcaagcaagaattctgctgggctgttctggacaaagaccctatggaaaagcagaggaccttctaaagttaaaattgtttgggtggctggtggctctagataaactgaatgtacatgccagagtgcaaaaaaaagcgaccattcttgtgcaagtcacctggctggtgtgcttgttgtaagaaaaatggggaagacgtggcacatttgtttttatgttgctgccttgcgcacgtagtctttggataaaactgataaacgaatttgagatgcaatggtttataccctgttcggttcctcaaatgatagtgagtaaggtgggggcagtaaacggagcacatgtttatggagaatggcggtcttggcagttttaaggactgtttggttagaaagaaataatagaatttttgaaggttctgagtgttcagcaaaagtcctatgggaaaaaaattagattttggacaacatcttgggtatacatgatgaagtattttgaaaatgtttcattttcagacataattagggactggagagcattgttgtagtttctttgctgctgcctcatatgaatattttctaatgtgagggatctggttttatgtgggtcctaggggattgcacctaaaacgtctgtttggggcagtgagtatgctcatggtgtttagattgcttcaggtttttgtgcttggcttttaactttataaccacggtcttcctccgccacaagtgagagtttttatttatatcgggagggggctagtctaagacaaaggcc

SEQ ID NO: 83312 - DNA, 538 bp, Cannabis sativa
aaaaaaaaaaaaaaaagccattaacatacaaacattagaagaattaggacacaacaatttgattctactaagccatgtgttcatttcgttcttctttgttaaccttagggcaattattattgtgctggatgaagcatttgatcaaacattttgcatgcagtaatagataaggagcagcccaataaggagtcatggagtgatcattaaaagaaaatgtctgaatcacacacaggggcggactaattaaggtctggttgtgtcgaaattgtattaatgtacaaggattggtgaattaactggacctgaccaagtccatttcggtctaaataaatgttcattttaggcaagcatgctattctttttgaattaataaatcaagctttaggctgcacaagaagaaaacccaaaatatatttttacatgagtgataaactacaacacagaggaggagatggaggttccatccattagatgtattggattggatcggttctatccattagatgctttaactggttttttattggattggattgga

SEQ ID NO: 83313 - DNA, 1661 bp, Cannabis sativa
aagttagattcataaagtgcattacaaatgattccgacaataatttagagggagtctaaacttgtttaagtcaattttctttgtaattgttgatactttattaattgatatctttctctgggcatgacctcgtagattaggagtgttcgaaagaatactgataccacgtacggatctcttgtgtcaagtgatttaattttctacaattatttttatattctgctggttctactttgtttctgcaaagctgttttctacagtaaaaattatattctgctgctgcagacgtttataattatatatttattataattctataatattttttttatatttgcaaaaattcagtttttcaatatacattctaactaattaattgtactgtaacttttttatgtaatatgttgaattaagattttatatcatatttcacatccacatatatataattatataattagaatcataaacaatagaagataagatatcaccattaaatcatagagtgtctgtccatgttcatgctctgtggcagttttttttagttattttcaacccactcccctgtctttctttttctccacgatcaatcttgcactgaacttcatcttgtctgattctttatatcacactgttacaatgaatccacttcttgataaaatgaaatcgacaatgactcttactgaaaatgagagtgaaattctggccattactgatgatggctctgatgttgtttcttccccagaatttattctcattgctcgtgtattaacaagcaaaaaaatctggttatccaccttccaaaggcagatggcagaccattgggatgggcgttttaaagttaacattaaggatcatcactcagatttgtttctgctatgtttcggatgtgagggggatcgtgctcgagtgttggagaaggaaccatggcactttcaaaaccaccatattgtcctcattgatccttctttgtacttaaatgttactccagacatcatgatccatagtccattttgggttcaagcctatagattgccttttctcagtaagtctcgatctttggctaaagcattggcttctattcttagtgagtttattgcggttcatgatgattctctgaatgagggttgggggccttttttgcgctttcgggttaaccttaatctcaataaaccactgctgcggggtagaatgattactctccctaaaatcaaggatgaattttgggtagaatttcgttatgagcggttaccggactattgtatggaatgtggattaattggtcatctctaccaaaagtgtccaatttttctagagaaattagatctgaatattgagcctgaactgccatatggtccagaaattaaaggttctaaacttcctacttcaccatatgatcgatataggactgatttccctaaaggcaatgcatggccactgcttactcgattggccagaacttccttgcaatcggctgtccctaaacttaaatctttacctattcctcaaccatctcctttacttgttggtgaatcctcaaactctgtccatgatgctgatcatgttgatcatgctcaaactgtcaatattaatccttcaatccccatcaggaccatatctaaccaaacaaatacatctatctttgtaccttccactctaga

SEQ ID NO: 83314 - DNA, 644 bp, Cannabis sativa
  modified_base (56)..(60): a, c, t, g, unknown or other
taataaaattaagagagaaggtaaaaatgttgatgtaaccgtgttgttgtatatannnnntaaagttggtattttgtattttttgtgtaaaaatttcattttattgggtaaaaattatttaaaattaaaaaaaaatcaattaaagggattacatgctataaaaaaaaatatttggagtcctaaaatatgaattgacattttatttttatatcaaaaaattaatttaatagaatagaaaacaaaaccctaatttaaaaaccctaactcatctctttctccctctcttctaccttcgacagccagtccagagtacttgtcggtttttgaaaatccttatttttgctctgatatctctctctctctcctcatcatgccggtttcaccctcgcttaagctctctttctctccgtctctctcaattttcttggtggagccaccctcgttcggcgaaggcctaaatgaaggccatggctaacgtccacgagccacgaaaccccaagaactcgtgttccccgatccctctctcgctctgggacccttctctctcgtcgcgtcaagctcagcccaatgtcgaagggtgtctctggccatccatagaaaaagtggaagccaagaatggcttgttggaaaattctcattacaag

SEQ ID NO: 83315 - DNA, 862 bp, Cannabis sativa
tttttttttaaattctgttattccttgtcttcatttttagaacatcttgatctgcaatagaagagttatgtatcgattatcgcacatggaaaaaccgaagatggatttttactcttgtatgaaacatatttcaccaaatgtgtatttccaaaattgataaaacgcatgttcataagtatctaaagttttgagtttgtaagcagcatagactggataatattttttaatggaataagtaccgaatgttagtagaattgtaattttcatctagtctcatccgtatagacttcattagcgtcttaaattgtcttaaatttgtaactagatttagttttttaatctgcaaaagaagatttaaaagtaactgatattatacattatatattactgtacagatatttagaatatgggccacacttgtgtcctgtttaaggaactaatgaagtctatactgataaaactggatgaaaattatagttttactaacattgaattgagtacttattttgctaaacaaatcattgaatttatgctgtctacaaatttaaaactttgagtgtgcaaatatcccttaatacttttactaatctactagaagttgaacaaaatattgtgtttcattcaaatatttggtttttagagtacaaaagaaagtaagaaaatcaatgcagggatcatataaacctgtgtgttgccaagggatagagacaagaggaatgagattgttgtgatcagattggagaagtaccctcactgctagtctgtgattctcctcctcgccacgcgtcctgaacttgagctgcatactgcaagttccacagcacatcttcgatcgaaggtctctcttcggggttttggagta

SEQ ID NO: 83316 - DNA, 1312 bp, Cannabis sativa
ctaattattgatatttttatagttctttgtaaatttaattaattatgcgtcccattattaaaaatgggcattagagttataatttcttaattccagagattttattaaactctaggtgtattatgtgtgttatatttgaattatgctatttttacaatttatgctcgacgacaatagaaaatgtgatagatggttattttaatcacatgggtaagtctagaacattttcttagtgggatatatgttggagaaaaatagaataccaaatttgagcagggttagggtttttgaccattttacccctaggcttgaattggctttatttaagcaccaagggtattttagtaattttgtgagggggagtaggtggctgcatgtgtgtgtgacagctgccccctttgtttgtgctaaataattgaattatgttgcattttcgaaataaggaaattagaaagaataatcaagaaattaagagaaaaaccattttccctttctctctccttgctcgtgtaccaccaaactagaaagaaccaaccatttttttcttttatttctagaattcagtagggattcatgtaggattcaagttaaggtaacccctagaacacttactctttgtttttcaagctttggttttggtttggatgtgtgattttgagtattaacggttgttcgggttagagctatttgtaattcagtttctgagtataattatagtttattttaagttctagtaggtgttttagagttgtgggatgatggatgtacaagtttgagtttgaaaactagttcatccatggcatattttgagtgtgtgtttttttttttggttttgttgattggaaatgattgtgtaagctcattataggtgttctggaaagtttggtggcatttggacaagttttgagcaagtttggaattgtttggggaaacctagtgcaaaccggttaaccgatttgccaggacctataaaaccgattaatcggttttgacagattccccgaacaactcattttcttaatttgtgcccatttcagtgccttggttgggtgatttcctatttccttggatattttagttccaaatagtaacagcagaaccttaagttgtaggttcgggtttcctagattagggttttgacatgtgatttacccggttatgttatgtgattagggcatccatcgagcacgagactttccgtttagattgatatatatatatgcgaatgtatgtatgtgtgaaatatatatatgcatgcttggtttgattcatacactaccaacacttgtacgatagcggtacagagtgcatt

SEQ ID NO: 83317 - DNA, 696 bp, Cannabis sativa
taacaatgcatttttaaatggtgacttgcaagaagaaatatacatggtttagccacctggttttgttgatccatctgctcctcacaaagtgtgcaaactacagaaggtaatttatggcctaaagcaggccccaagagcttagtttgaaaaatcatctgtttttatatcacttggttttgtttcagcaaaaatagatcaggcactttttgttaagattgattcagcctgttgtttgtatgttcctatatatgttgatgatatcttaataactggttctaatggtactcaagttgctgccttgataaccaggttaaataaatcttttgcacttaaagatcttggcacattgaattatttacttggtattaaggccctgccaacagcaactggtatgatactttcttagaaaaagtacatccaagaactcttatgcaaggctgagatggaaggtgccaagactcatagcactcctatgaacaatggactgaagcttttcaactatggcagtgttcttgtcactgatccaaccttgtacagatcaattattaaggcagtatgccgcaatcaccaagacagatattgcttttagtgtcaataaggtttgtcagcttatgcataatctacttcagtctcattgggttgcagtaaaaacgttcttaagatacttggctagtacacttgattatggtcttcagt

SEQ ID NO: 83318 - DNA, 1372 bp, Cannabis sativa
tgttacacagattacagagctattgccattattcccactctcactctgactcagacagatgtttggcactctttttgctggactaaatcaaattaaattgtgatgctagagtggggttggagtttatgtgtattgttgttgttgctagaaatcacatgggttttgttgggtggcaactgctagacttgatttttcagaccctctttgtggcgaggctactgcttgttgctttgcttttgagatggggacggagaagatggaattttgttattgtggagagtcactctcaggcagtgatttactctcttaagggagtggagtctagatggaaaatcgagaattactctcggcaatatttaagcacttcttctttatttgtggggtttttactctaatgtagcttgttcttgtaatgtttgtgttcataattatgtggtgaaagtgcatttttacccacaatcgttatgattctctagatggatgatgacattccttcaaacctaatttgtaatgaccttacggtctaactattttatttgttatgtataacgcattttcttaaaaaaaaaaaaagttatataatgtttagtgataaaattccttaactaaagagatattataagtctaacactagataaatattttctgcaggtccaacttaatattacatcttatatatatgattttaataattattagaaaaaaaataatagtgatatgttagacaacaataatactcttccttataaagtctggccgatcgcttggtgttagattgtactatatacatgaatgctctacacaacaagtttggatgtatatatgagatagtatatatgatacaattaataggcttctttgagtacttatcttaaaatttctaagtaaggcagagattcatgagaagatagctaaaaatgatcaacatatatatatatatataaaattacaatacacatattgaacaatagattttagaaataccaattaagatcaaaagactagtcaagttttctttgtatagataaatggtcagagttttgaagggctgaccagtccaatatttgacggtcttctatgaaatttaggaatgaccataccgaaaacatgttgtatatatttatatctctaaactattattttgcatgcatgcaacatccgtgaatcttatcttttaaaattgcaattataagagataaatcaatatggctagtttctatgtgtagtccaatgatcttagtccatataaatagacatcatacaggccattatttccttccaagcatattaacctatataccagtattcataacagagaatctaccttctaaattcaaagtagctaattaactatgtctattgatgctttggc

SEQ ID NO: 83319 - DNA, 947 bp, Cannabis sativa
tattataaattatttatactttaactttttattttttagttatcacactaatacattaacatataattatttgatatttttatgatgagaggatagttacattagctagtaataatttcaaaaatgttttttttaaatatcattttctttattacgtcaaaaaggaaaaaaagaaatttcaaaattagtaatttatttataaacaatgtatataaaactagataaatatatataaacgaaaaaaatctcaaaatataaatgttcaaaaaaaattaactaattaaatatttcctttctgaataaattaaatcttaatcttcaattgactgtaaataagtaaattttttgctaacattaatttttagaaatttaggtagatttactctccactttccatccttccctaatactttctaccaaataaagaaatcgacctcttcatccactcctctaacatagggttagtgttagtgatttagttttatgctgttttgttactttgggttatgttttctaataaggtgtcccattcgttggcacatacttgcataatatacacatactaattttccttccaaaatacactatcaatcatataaacgggcacatgcttgcataatatacacaaatccaacaaaatttcactgatgaaaagtactagtttatttttgcttttgttgtgcaccacaacgaatgaaaacaagcttcatttttcaagtgcactaaacacttgaatagttgtttattaaaatcaccattttattgtgttgtaacttcaaagaaccaagagggtataaattaaacatttcaacagaatttgtatctccataaatcaaacaaagctcaaaacttagttactctagccaactctattcaacctcaatcaaacagcactaggcattcaaattgtgtagtttcggatgtaatgtaaaaattgcttgaaacca

SEQ ID NO: 83320 - DNA, 814 bp, Cannabis sativa
acagggaaagcttatgaaaagaaaactttcctcattttgtgtcatactcagtaatacatggatggattttgtgtacaggaaagtcaagaattagattgaattggattcaaaggctaaaggtagctcttgatactgcaagaggcttggcttatcttcatgaacttgtcaaccctccaataatacacagggatattaagtcaaccaatgtcctcttggataatcgattgaacgcaaaagtggctgattttggtctctcgaagctcatgggtgatgatgagcaagatcatgtcagcactcaagttaaaggcacaatggtaggtttaacctttgaatccctcgacaaatcaaaatagaatgtgtgcgtacgtgcataatgtttgtgctacacttacagttgaattgaataagtttgcaactaggccttctaaactaaaataaaattgtttagatgcacacttgaatgcttaaagccagatcacacatttttcctttccttaggtaatttcttagaagaaaataaattgtatcttaaaatctgcatttatatttcacttttatcattatgagaatatatttagaaagaactttcaagactgccatatcaaccatcaaatgcccttttctcatgtaagaggtgcagcctacgagtctagtatctttgtctaagaaaaggtagttgcaattaatggtatgcaagcagaggcaattagcaaacaaaacatataatttttgttataaaaatgtgattgtgatttaggaagatagatgaacacatgtgtttatcatgttaagagtgtcatagatatctacaact

SEQ ID NO: 83321 - DNA, 1000 bp, Cannabis sativa
gaccttccccaggcgatgtgggattgtacatcttacccggtattgtgatagtcagtaccaatcaaccctctatctctttcgacattctctatctcccgctctatgtaaacacgcacatagagcacataatcaaaccacccacatgacccacgactcatgaaccacctcgaccttgcgaccacaccacccacacgactcatggaccatcgcaaccacaccacccaacgccaacaatgtattgtcaaagataatccctaattttttcatgaatttttaactgtaattattttattttttcatgatttagggttaaagtaattagatttaggattgggtctgtatttttagtggagaatatatgatttttgagttttttagggttgaatctgtattttgggaggaatctgtgatttttgcctgacccaatgaaggttgaagaagatagttcgatagatttgatatagggttgataatgggccttatggtccttataattttaaatttgattgtaacacgatagacccgatattggggtccaaaatgctcattttgtgatacgtataattttttattaacaaatacttgttaaattacacgacttataattcttaaagttattttttaaagaatttaaagataaaggaaaataaaaaattgcgtgattattcaccttcttctttttatatattatatatattgtataattatatgatgtaatcttttttttttttccagagtttttatatatctgtaacatttatataacaaatctttttagtttttatattattttacaatctagttgtaatattttgatgtattcgattaatgcgtaaaataacaactcaacaactattttaactagaatttcgatggcatcatctagaaaatcaacgatgacattaatattgaataggacttgtgcttggactataatcattaaacacacatatatatacacattatatatatttatagatacctgattggcgcttagtgt

SEQ ID NO: 83322 - DNA, 2189 bp, Cannabis sativa
gaccttccccaggcgatgtgggattgcacagctttccacataatcctaccctaaaataaaactataggggcaacacttcacgattcaaacatccacgacatcctagacctagcttgaacttagaatttatatctcaggtacaaaatagcaaataatcaacaaagcgtcaggatacttacttgtagtatgagtagtaaaagagtggttgtcatggaaatctgcctaaaaatgttgaacccagtcgattacacaattgtagccgacctgagcatcgaagctttcatctgactgggtgtgggacgattcgagattcaatgaccctgcttctggaaaataggctgaactgaggtttagaaagatttgaatcaagcagtcaaagacttcttgcattcattgtttggagacgatagtgagaagtaagttttctggaagatgggagcatctggcttgaaaattcaaaaatggggagtctgaaagtctgaagtgatgaaaaagaagaaatgaattgggcgagcctatttgtacctcggtcaggatccttgcgatttgaaatggacaacccatatttcttcatccaaaaagcacattttgatccgatggatgggaagttgaaaaaatggcatttaaaactcgttcccagtgtttattattcaccagtgcacgcctcgagtaccgtacacattaaaagaggggtcattttaatcgtcctaccatcatttccactcctcctaagaaaggcacccccgacatgcatgtgttgtcaacaattacatcaaaggcgctgtatgcgtgtcgcgctcgtggtaccttcactttatggcctttttacttggtgacaactcacgaggtgcatccacgatcccaacagttaccacgtgtaaagaacttatctccaagaaactaaaaaaaattgcaagctcccggacctcatagagtcctgaaagcttgggggtaaatgttattcgtgtttttaagcacgtcacacgtggcatttaaagaaaggaattagcctcataatttctctaattaaaatccttcattacaaccctgtctcagagaaacctcgtggatccaagagcaagcaaagactaaaaaatacatggaagtccacttcgtcctgtcctagcttctcggacgcggaaggtgcttagtctctctcggacctagagggtccaaatatggaagccttcccagctgatatctggatgcatactcaaatggtgtaatacagatgtcgaccgcccaggagtgtcgtggacgtttacctttgatacaagtcaggtcaccaagtgactgttatactttttctgacgcaaaatcaaatattgtcccatgcgtccaagcatgatagtgtgcacacctccacccctttttaaacatacggatattatagacacctctacttttaaaggtgaaagctttgggcgatatgtggcctctacttttaatgctaaattttttaataacacgtgtccatatagtacaaatggtccccgttgtccagctgcagcacgcacgggcacaatggtttccaacagacccaacattgagctctcagttcacatgtaataatttaccctattaatgaacttttagcagaaaccctaggcggttcatggacatgtctatacctgccacttagcctataaacaccgtgaacacatcaaaaatgctctaaaaggctaatagactgactcgtagactaaagttaattaatacctaaaccacataaaaaatttccatctctttatttttacattttattatttttttagttcttaaatatttagttttgaaaaatctcaataaacatttaccaataattatattataataaatagtaaaactaaaaattatgaccttacactaaataatatttatcacataattaatttttgaatcttagctaaaataaaaataatgaacattcatatgtcactattctaccattgactacaaaattccactatctttataccctgcgcttggagaattaatttatataaccaagtctaatatgatactcaactacagccaaaattttcttaaatctgaaaaataaatccacataagatttaattagtctcaaccaacttggaaccgctataactaggggtgttcattggatcacatccaatggatttggacccatccgatccaatccaattatttattggatatttgatttt

SEQ ID NO: 83323 - DNA, 828 bp, Cannabis sativa
  modified_base (37)..(38): a, c, t, g, unknown or other
agttctaataccaacattgatttgccaaccccctttnnctaatacatcacaagtaaattctaatttaccagcgcaatactaacttttgctaagtatgtactggcaaaaatggcatttcttgtagtttatttttttataattatatgagctattctattatttttaaatatgtattttataattaaattaaaggatgatttataaccattaatatattcctacaacacctttgacgactttaattgtggatattatatatctctgacggcctactagaatgtgacacacccattcgacaagttaccgtgtttgcttgtttttttttgttcttgcattaatgtaaaatattgcaacaattcattcaaccagcataagaattttcattgctcaaaataaatttcgattccatctttaacacaattcttgtacaaaattaccaaaaccaagaggagcaacaaaagataaaaaaaaaaaaaacatgcataaagaaaagtaaaacataataattcagtggccataatcaaaaaaattctcccatcaatccaaaataacaatattccataactaattactaaggaaccaaagaaaaaaaaacacccccttgaactatcaaaaggtgataacattatttcccattattgaagccttggcatctacaatgaaacattgagtaagagctgttttagtgtgcagagaagccttcaacaacctcaaaccctgtccatacatattaacaaaatcaatgaaaccctaagcaataatgtatatatatagttatacaacataaatatgaataattaacagacctcatgaatgccaactgaaaca

SEQ ID NO: 83324 - DNA, 562 bp, Cannabis sativa
ccctgattgggcatagtttaaaaaaaagtcaagtctagcatcattcgttgtttgatttcaggaatcaagatgtaaagaagttcctgaaaagcaaatcctaccatgactggaggctcgggaagagccactatggccattggtagccaaggggcttgaaaataacacacacgtgtcaaaaaacccaaagacccaactgggacttgtcttccatacgcacaggacgagcggcgttaatccctcttgcatgtcgtcacatgcattcacgtgagaggacgaccagaccatggtagtcctttctggccgagagaaaggacctagggttcctttcttcgggacatgaccgaaggacctttggtcctagctacagtcaaagctcctccatgcacagtgacagtcagggactgttgtatgatgtcatccggtggtcgaacaaccctagtgaatgagaacaggaatggtagctagggcacgagtttgaatctcgagaaggacctgccatctttgttgacagctcacgatggtctaagcagtgcacagttggggtttcacgtgaaatttgagc

SEQ ID NO: 83325 - DNA, 614 bp, Cannabis sativa
aattaagagtcacagaatatgtccaggtggtcaacccgtacttcatgtgccagcttgaggctagctattagggcttcatatttagccttgttgtttgaggatttgaagtcgaatttgattggtctgtgcagtcgttaccaccaagtgttataagggccatgcctgcatcaaaaacttggtcagtgtagcttccatcgacatggagcttccatgttggcgctttagatttattctgctgcagttgctcttacttcttctttggctcttgctttctcccaaatcttgagagatctcaagggatgagtttgtgcactctgccacgaagtctacaagggcttgaccctttatgtccattcttggttgatatgtgatgtcaaacttgccaagtttaatggcccacttgggtagtcgacctgatgctttaggtttctgtaaaacctactacaatggttgattggtgtacacctttattgagtctgcctggaagtatggccttagctttctaaaagacaaaaacaagctgtaggttagcttctccatgagtgggtaccgactttcagcattaattaatcttttactgatgtagtatatagggtgttgtacaccatcttctt

SEQ ID NO: 83326 - DNA, 1038 bp, Cannabis sativa
tttttgaatacaatcttaccaaaatttaaaaaaaatgggcacacgttataatatattaatattaatgcctataatactcttctttcttctaacttcaccatccatactctcaattctcatccatatcgatggtagtccaatgagggtccgatagtaacccaatgctaccttttttataatgcttttgtacataaaaaatagtagcatcaggccactatcagaccatattctacatttatagatgttaagctccatccattaagctcgtcaggaaggcatcgagccaccaccggatcaccatcaaattatatcctacatttataggtagcatcgggctactatcggacttttgtcttcaacttttactcattttaacaacagaaaggcatcgggcctggcaaaataactaaatttctgccaaaaaactcagattcgaccgtttttaatcctaaatttaacatcaacccataggtaatagatattaatcataaaatttattcatttgataatattgccgatggagaagccgtgattgatggagaaattgttgggttcgcggtggtcattgggtctgtggtcgcggtggtcgtggaaagaagggatcaagattgtgggtggtgggttgtgagttgagtcctcggggtgagttcagagagcaatagagagaatggaggatgagagagggtcaagtgtttgaaatggaaggattaaaattggattttatgaaatgttagcctattctaccaatatgggttaatttaagtttagagaaataattttaatctaataaatgcatagaaagttaaatttcttaaataaaataacatatcaaaattataatatttaaatgacatagagaaaaataaaaaattgatttatagtgtaatgtaaaatggaaaaaataaggttttgactattgacgatttattttgaagaataaaacagagaaactgataagatattatagtgctttttagtttaaattattttttagatttgtgtatgtgtgttatatattaatacaggatcggccctagg

SEQ ID NO: 83327 - DNA, 2363 bp, Cannabis sativa
gggtctatttctaaatttcgtaatcctttaattttccgaatggtatagaagttccaaggataggtttaagtggtggtttgcttttcctttggaagtctaatgtaaatgtaactattatcaattatggacaaaactttgttgactgttatttggcttttgatgatggcttctcttgtcacttctcgggtttttatggtgctcctgttgtatctcaaaggaaattcacttgggaattattgacaaaacttaaagactcaactcctctcatgccttggttggtcatgggggatttcaatgaaataatctctcatttggataaactaggaggacctctaaagaatgaaactcaaatagatgattttcggactgcaattgataaaagtggattacaagaactgaattttgatgggaaccgattcacttggcacaataacaatacaaacgggactaatgtgaaggaaaggttggactatggtttcatcaactccatgtggttcaacaacttcaacgttccaacagtttctcatttggattttttccaatctgatcacagagctttactagtgcaaatcaatcctttgctgtctacttgtaaccagaaattcaagtctcgatttcgctttgaaaagcaatggttaaatgaagatatgtgctctgaaatcattgccaacaactggaagaatgctacagccgatcccactactcaaattctgcagaatttgacagcatgttctcaccaattacaagcctggcacatgcaaaaatttggagatctccctaagaaaatcaagactagtcagcaaaaagtggaagcccttcacaactcctctgcaacaactcgttctcactttgaagagttgaaatcaagtgaaaatattcttgatgaattattagctcaggaggaagagtattggcaccaacgttctagagtttcttggttaaaatcgggtgattccaacacgaaatattttcaccaacatgcgcacaaccccttctgaaattggacaaatcattcagacctattttcagaacattttcactacaacagggatggatttagaagctctccaacatgtcttacctactattccgaaaactatcacagcagacattaatcatcttaaccgtgccttatacagctgatgatgtttatacagctctttcctcaatgagtgatgatagcagccccggtctagatggtatgtcggttatgttttacataaactattggcatatagttggcgaattggtgtctacaactgtgttgaaaattctcaatgaaggtggggatcccacatgcttcaaccaaaccttaatcacattgattcctaaggtcaaaaagcctactgcaatgtcccagctgagacccattagcctctgcaatgtgctctacaagatagtatctaaagccattgttcttagattaaagccttttctctctttggttatttcagaatctcaaagtgcttttcttcaatcaaggcttatcacagacaatgttttagttgcttttgagcttttacattcattgaaacatttaaagaggggtaaggaaggttatgcagccatcaagcttgacatgagtaaagcttttgatagagttgaatggcatttcatcgacaatatcatgactgctatgggatttgactcttcggttattgatctcatcatccgatgcattagcattgtaacatattctttttcggtcaatggtaatactcaaggtcatcttactccaacacgtggtattcgacaaggcgacccattgtcaccatttctctttatactttgtgctgaaggtctctcaaaattattccaacatgaagaaagatgtggcaatcttcaaggtattcgtattgctcgaggtgctcctatggtctctcatttattttttgcggacgatagccttgtcatttgccgagcaaataaccgttcagccatggcgatcaagcgatctttgaatttttactgccgtgcatcaggtcaaagcctaaatttggaaaagtcggtcctttctttttcacctaatacattacctgctattcaatccaacatctagcagattttccaaatggctatccaaccttgccatgagagatacttgggcttaccttcatactcaggccgagataagaagcttctatttggtgaaatcaaggaaaagttatggaatctactttcagcttggcaagaacagttattttccattggtggaaaggaagtattgctaaaagcagttgcccaatctatctcgacttatgctatgagttgttttagacttttaaaatctcttattaaccaaatagagaccatgtgtaataagttttggtggggttcaaattcttcatcttcgggcattaatt

SEQ ID NO: 83328 - DNA, 708 bp, Cannabis sativa
tctctattctattcatctttctatgctttacactttgaattctaaaaatcactatattttttatttctttaacgatgtgagcagctattttagaatatccctcaacagaaaatttgttcttatttaaccaaagacagtagcaagtggcagcaaagacagcaacatcaacaacttgcatggtattcgaaggtggctgggctaactaactctaccacccgacaaggccagtcgaccaagctctcttcattaaccaactgaaaatttgctccaccacatatctcgaaagataacacctgaaaagaagatgctcatgtcattcatattcagctgtacaaacagggcaacccagagaatcaatgtcaacatgaagcttaactagattgtctctagttaagagctgaaggttcattgcttgctatagaacaaatattttaagtttaggtaatgttagagaactccgcacaactctgtggtaaagtgccacattttgagtaagagagctgttgtaaatcatgtattttacgccaattattgtattagtcttataggaatttcgagactggtcgttcctctcttatttttctcagtcttccaacatactcacgagtacgtgggttaatgagttgaaagctcttaaagaacttgttatccaccctttccagcaatataccttcagtcttcgtattttttttgaattatctaggttag

SEQ ID NO: 83329 - DNA, 1697 bp, Cannabis sativa
gttgctcgatcctctattgagtctgaattctatgtgttagccaacacggataccgagcttaagtggttgcaatctttcttcattgaactttaggttactttagctgttgttcccattatttgggtcgataattagggtgcagttgccttggctactaatctggtttttaatgcatgctacaagtatatcgagattgattaatactttgttcaagatcaaatcctcaacaatgaactctttgttcgttatgttcattcagttgatcaaattgctgatgcacttactaaatctttgcctaaaaatcgatttcactatttgaaaactaaacttaaagtggtttctacccatttgtttgagggagtatgatgaccaacaaactaattagttagttgattggtagttaggcttagttgtattcttgatttttgaattgtactatcaactaaagtttatatacagtgaaatgaattcaaaggcatgttatgattttctagcatcatttctcaaatactctctcttatgttctaatttttcacactaaaacgtgcgacatgcattaaagacagataatgcatgccagcgtttcgagatgtattttaaaatcgtttttatcattaatgcatttattagtatttaattatcaaatggttaattgagtgatctagtatgttacatgcacctaagtttcgtataaattaaaattagttaaattatttttgttcaactactaatctcttgtttatgtaattactcttctaaatgtgtacttgctgcatatatctagataggctttactttcattaagtaaaataaaattgggggagccattttcatataaacgttcacgcgaatgaaatcgcgtgtgaatacgttcggttctgtttcagactctcagtctccccaaaggttgcttacaggaacgtgtgagcacgcgccttgtagtactggtggtggtgtaatgcctcaaccaaaaacaaaacagtttgtggttttgagttttgagttttgagttttgatcatctcattattttcattattttttcttcatgtaattgccaggaaaatgtccaagggtcgtttggttgcctagaaaatttgatctgaaaaatcagttcttttgagtgagaaaggtcaaactgttggtttccatggaaacagaatctatgatagtgctgcccagtggtaaaaggcctcacttctatgcgttttactcttctcacttaagcgcagaacaactggtaatcaatcttttcaccataataatagagtttttttctttaattattgttgtatttcttcttctgcttttgtttttgattttttttttcttgtgcgtttgaagaaattagggttaggggaaatttctgggtattacagtatgaagattataatggttagaaagatttggtaggagagagttagagttttgttttttcgttaggaatttttattttcaaggaaaaagggaggattttgattgggtaaatgtttgattttggctatttattgtgtccattttctcatttgcatgctttgagagtaaatcaggtatatgaaattgagttattagcggttccaaaccccaaataaggttcttcatttcataactaaaacccaaaactagtagtttagcacctacattttgaattccttttcccagaaatctaagttggaagtaatgtactaccctctaacta

SEQ ID NO: 83330 - DNA, 3121 bp, Cannabis sativa
actaatcagattgtaaagagttttatttagggcataaatcctaacagatttgggggaccctggctgaccctgggtgatactaactttgttcttagtgcctctgaaagagaaggttcctcgggttgggatcctttcatcccgatcatatctaacctgttggacgcccgaggtctaatcaattttcctatccaaggggacaacttgacttgggataaccataggtctgggaggcatcatgtgaaatctgcgttggacaaaggattagtgaattgcgcttgactcaatttatttcctagggccatcctctgctcgtcccatacttgcaacaccgatcataggcctttgtgcttaatgtcggatggtcaggtcaccaagtataaaagaagcttcaaatttgaggaagggtggacccgtgatgctagaagcaatctggtagtgaacaatgcttggaattcagttagtcataattgggcacctgcaagaatcttcaaaaaggttggggccactagggtggccctctttaactggagcagaacccaattcggaaagcttgatgtggctataaaagagcttgagaataagcttaactctctgcagagcctaccggctgggtcccgagactggagtcaagaactgttattcgccgagagttgaatgagtcgttagaaagaaaggcgatctattggaaacaaagggccagaatctcttggctcaaagatggggataaatgctcaaagtttttcttcctttcggcgaccattaagggatgacgaaatgccattgagagtattatcaacaaagataatgtccggatctctgggcggaagccgtagggagagagttcttggactactttaagggtatatttacagaggctgtgacttgtctggattacaattgctcccagttgtttcaagagcgaatccctcaagaggagttggaggctcttgtttgctctcttagttctgattagatcaaaaaaactctgttcgccatgaataaccataaagctccaagtccggatgggatgtcagttttgttttataaacattattgggagtctattggtgctgatttttgtgatgcgattcaagatttctttttgagtggcaaaatgcatagagggattaatgccacgaacattgtgctcatcccgaaggtcgaaaaccctaaacgtacaaaccaattcaggctgatttctttatgcaatgtggtgtacaaggttatagctcagatcatagcaaataggttaaaacctattcttccttctattatttgccctacgcaagctgcttttgttccagggccgaagatccatgacaataatgtgattatccaagaaattatccattcctttaataggaagaaaggtaaggagcggctctttgctatcaaaatcgatcttattaaagcttacgacaggctgagctgcaggtttattgatcatgttttagaatgctctggcattcctccgtggttccgtccttggatttcgcagtgtatttcaaccacgaccctcaacgtctgtctaaatgggggtcaggttgggaacatcaacccctcttgtgggcttcgtcaaggagaccctctctccccttatcttttcatctgggctgctgaagttctttcaagattgttctccaattctcttgaccgggatttcatcaaggggataaaacttagaaggggaggcccggtgctctcccacattttctttgctgatgatttaattttggtgggtagagctaatttaattgaggcaaatggtttctagagttgcctagaaaatttctgttcttggtcgggtcagttggtaaatcagcttaagacaaccattttctttagtaaaaacaccccaatggaaatgcggcgtgatatcaaggaagctttggacattgattttccagaggggtgcgtaaaatatttgggtctgcctctattcagatctaggcaaaaggaggttgatttcacctttaatttagacaatctcacggcaaagcttcaaggttggaaggctaaaactttgtcaaaggtagggcgtgcaactcttataaaatctgtgggcctgttgctgcctatgtatgctatgcaaaccacaaaactctctacttgaatggtcaaccggatagatgggttggtgcgagacttctggtggggtttcgagaaaggaaatcatggtattcatcttaaggcttggtataaactctgccttccaaaatctttaggccggttgggcttcaggaaaactaaagaaatgaaccaagctttcttatcaaaatgggggtggaatatcctaaatggaagccaatctttatgttgcagagtgctggaagccaagtaccttaggggcaaagattttctcaactgtaggtacaaaaattctgattcttggttctggaagagtgttgtgaaagctaattctatcttgaggaaagaggcttgcaagttaatagctaatggagagactacgaatatctggcgggacccctggattcctcactacaaaggtttctgtccgaaaccaagagggggtgcccccccaaccttaaccatgtggcagaccttgttctagacaatgggtaatgggatacccaaaagttgaatcaatgttttgaccatgaaacagttacaactattctcaaaggagggcaaccctctggtgccagagttgatagatggatatggactctagagagtcatgggcagttctcgtgcaagtctgcctatcttggtcaagccttggaaagagctccccactgtgacgtcgccccaaagctttggaacaaactctggaatagcaaaattttggagcgacataagggcttatggtggtgtatcctgtctagtgccctcccggtaagagctgtgatcggtactagatttcatatagaggatcaaagatgtcccctttgtggaaggtgtgttgaatccattgaacacttgtttctatcctgtgaggtggttcttcatttctgtcgttcatctccttggggtatttacccgatgtgtgatacaggaatccgagctttggattgggtcaagttcatctaggatctaaaacataaaggagctcgtgtcgatgatatattcttatatgcttctattgtagtggatactattt

SEQ ID NO: 83331 - DNA, 689 bp, Cannabis sativa
  modified_base (501)..(506): a, c, t, g, unknown or other
tagtattttgttttgtgtatgactaatcagtacagatatttgaattaaagtataagtcttgccatatggcatgtgtttttgttttttctctctaaagttcttctttgtcattttctgggttttcttatttttggttggtgattaagttggaactgtattactttgagtctcgtttggtctgtgtaatggcttctagtagcagacttctggaggaagtggaagagcgatatgcttgcattgatctcgaaggggaagaggagggagtggagattgatgctcttgactcggaggagggggtgatttttgatgatcggttttgtttggtaggaaggtttttgaacgctagatcagtggacttcgacgctatgcgacatactttggcagggttgtggaagcctggtaaaggactgtttgtcaaagaattggggccaaatctttatctatttcaattctgtcatgaaatagatattaaacgggttatcaatggaagcccgtggactnnnnnncgactcctttttctgtttggaagagtgtcgcaaggaggggatccgaaatctgtccctctgaataaattggatatgtgggtgcagattcatggcttaacttcaggattcatgacggagagagtggtgaaggaggcggcgaaggtaatcggagaatttgttgaatccgatccgaagaacaataac

SEQ ID NO: 83332 - DNA, 1185 bp, Cannabis sativa
acgtacacttgcgtgtgcaaaaatatcgcaacactaccttcaatttctcaaatgcaaaatccaatgtgaccattgaatctaaaatgaccaaaaaggagtataataccttttcctcaatttcagaagccttggaagtatcaaaacgagatcccgagagcttaggaatgggtacccaacgcctaggttgacaaatggcccagtgcgctgggttttgcttatccgattctgattctgtttcaaccatctgtctagcttttcacaataactaagattcatgaagttagagaaatcaaattcacaacttagcatttctcatttctcacatgggaatttcactcgtaaatgaagagtttcgagtctctcatttctgcagaatagcaacttctctaagaactagtgaccaacttctctggaacatataaatagactaagtgttgtcaaaatatcacttgggcatcttacaagagatcccttggccattttttcacttacccagcgtccaggtcactcaatattgatcagattggtgcaattcaacttgcgttatgaacctatttaaatgaaattcaacttgcattatgaacctatataaatgccctatcaagtcatgtctcacactcaaatcgcaattctgaagctatcgttgtcaaaattcaccccaaagtagttatgaaaatcagctctaagttacttgtagtgagacccccgggctccaaaaattggccatcatcatcaacggtggaaaaaatttatttttatttttctcctgtttttgtgggccctccttcacctataaaaggatatctctcttagctcatttttcacattcagaaaactactcacaaggtcaaagcttctctctctagattttctctctctagaatttagagcttctgacacttagcctattgttgtaagaccatctcgtaagaaataaaaactcgaagtagacgtagctctattactgtagcaatacagagagtgaactactataaatttgttgtgtctctcttataattatacttaactactttttcatccttgctaatctagcgagcgggtgtagcttagaagtctaatctagatttttgaatcaacattgtggtactttcattaagagccacagctcaagaaaattactaacaagatggttacaacatattctacaagtgttgacagacagac

SEQ ID NO: 83333 - DNA, 853 bp, Cannabis sativa
atcttggtgcactcgactgtgaattcagctagggattaacccttgattgcaactcttggctggtatttaatgtctaattggctaagttcgataacctatttcaacaatatacgtgagcattctggtttctacaatacgtgcatgatggggtgatttgtcagtaccttgatggcatgggctttaaagtaaatctcaactatctctagccgcttagcaagaaaaatgataacttttcaatcagaggatatcgggacttcaggcccaatcttttacttacataatacaacgaaagttagacatttccttcttctcgcactaatgaaacacttatagcatgttcacacacaaccagctacatgtacaatggttctccctcaacaagttttgacaaaattaaaagtttagccaaatgacccattagcttctagaagggttcctcacacataacagttcactcaagcttctcgtttccacaaaaaatgttaatgaaatgaatacacttatcaatagcttttgaaatgaacctactgagtgcaactattcttcctgcaaaactttgcacatctttgtgttcttttggacatagcatgtcaacgagaacttgaatcttttctggattggcttttattacacaaaaattaactatgaaacttaggaaattccttgaggaaactgtgcatttcttaggattcaccttcatcacgtacttctaaactattgagaaagcatccttaagatcatctctacattctcttaaagttttggacttcaccaacatgttatccacattaaacatccatatttttccgaagaacatacttgaacatttagttgaccagatgttagtatgagc

SEQ ID NO: 83334 - DNA, 873 bp, Cannabis sativa
atcctttgctctagcgatggatgcgtccgtggtttggggaaggggctttgtcggactgggaggagtgatacaggatgcagcgggggtggtttgattggcgtggtcatcaggtgtgttaggtgatttttctattaatgtggcgaaaatgcttaccattcatctgggtttgactcttgcgcatcaatttgattttagtttatccatattaatagcgattctattatggcaattgattgaattaataagcttcacactaattttatttttcaatctattttattatatatctattctttattagttgttgttggtgatggttcttgtaatgccattccgcattcgacgaatggtgttgcctacatactggcaacctctgttactaatttagggaattgtgtttagacaaatacttgtccacaatttttgagttttttcgtaataacaaatttattttaatgaattatgtttttctttcaaaaataaaaataaaaatatccacttaagattaagtttgcaaggcagctgacttatatcttgaatttgttaattccgttgtggacttatgtctatatatagctttagccttaactgatttcttaagattgagatggacgttgacagagtgtcaattgagcattgctattaggtactagtggtgcctagcactttcttaacatgtcgcgttacgattggctagtgatactccctaaaagttattatattaaattatatgggacccgatacttagttgtaccaatagcgatattgacacgtaagatggtgttaggcaccacttgtgtcctttagcatttcttagtgtcaattatattgattactttgattcgctaaatatttgtcattattgttttatta

SEQ ID NO: 83335 - DNA, 1248 bp, Cannabis sativa
  modified_base (309)..(312): a, c, t, g, unknown or other
aaaggttattagattattaccttattaatggtattatccattaaaaagtgttccatttatatatatttataaccctaatatctcacccacaaccaatttctacatcgatgtaccctactgcatatactaattcatcatatcttctcttttccttttactaatgcatcattcttttcttttcattcagtttactaaatgccgaaagactacatacatttggtgatggctcttgaatagaggtatgatagaatttcttttttaatttttattttgacatcatcatgttttgaagcaaaaaaaaaaaaaaannnngtcaatccaaaattatattattgtgagctcaaagtgtctataattaatataattcatatattgttacttttagtatattagcattactttagaaatattgtgctttttgtgtgtaattatactattgttttgtttttttgtttttgttttttttttttttcatttgctgaatgatttatatatttaatcttctaaaaatcattatagattcttatttatttgcctacttatttaattttctaaaaatcataatcataattactttgagaatcgagatatgtttagtaattcatcatcatgccaaaatacttagaaatatacaagtaagaaattttataataaaatcattcacttatgtgtaaaaagttattagtagttaattaactcaagtatatgatttgttttatgtacagagctaacttattttgatcaatagtaacaacttaaaataagatatgatgatgacagcgactttgaatgtagtggcgactacaagtgagatacggtgatgacatcggcttttgaaacagttttgaaattgtataatgaattttctataaatttatcattttttgtagatctttattttgtgtgaggattttctaacctctatttatttttattttactataacgtttgaagatatctctttgttactttcttttatagataagaaattgtatgatgaatttttctaaaatatttatttatttttttgtataaaaattatgaaaatttttagtagaatagttactcatgctatataaaaaaaaatatatcaaatttaatatatttttataacttaattattaaaaaaaaatataaccgcacgcgtagtgcgatttgtttcctagtatatatctataaaggagaagtatgaggcggtgacatgacattttaaaatcactctaaaattatttttctcttctctcctta

SEQ ID NO: 83336 - DNA, 1562 bp, Cannabis sativa
atttgcgtttttttaaacattgctttatacttcaaccaagatccttgccatttgaaatgaatggcccagatctcttcttccaaaaagcacactttgatttaatggatgggaagttgaaaagatggcatttaaaactcacccttggcgtttattattcatcattacacgcctcgagtatcgtacgcattaaaagagaggtcatttcaatcgtcctgccatcattacatctcttcccaagaaataacaattccattaaaggcgtcgcatgcgtgccacgcctgtgataccttcaatttatggccctttacttgatgacagctcacgggatgcgttcacgatctccgcagttgccagtcaagcacttatctttaagaaacggaagaggactgcacgctcctagatctcatagagtcccagaagcttgggggtaaatgttatccgtgtttgtgagcaagtgacacgtggcaaataaaggaagagataacctcataatctcactaattaaaatcccctactacaaccttgtcacggagaagcctcgcgaatccatgagcaagtcaagactgaaaagatgcatgggagtccactttgccctatcctggcttccagacgcaaatgaaattgtctcttctggacacggaaggatccgaatatggaagcctgcctagttgatacccaaacgggtactcaaagggcttaatgcggatgtcgaccgtcgaggagtgtcgcgaacgtctacttttggaataacccgattgaccctgtgacaattatggtttttttgacacaagatcaaatcttgtcccttgtgtccaggcatggtagtgcccgcacctctatcacctttttgccagacggattttgcaaacctctacttttaaaggtgaaagctttgggcaacacgtggcctctacttttgaaggttaaatctttgagcaatacgtgtccacgtagtacaaatgatccccaattgtctagctgcagcatgcacgagcataattgttttcgagggatgcaatagtcagctctcattttgcatgcagtttacctcattagtggactttcagcagaaccttaggcgggtcatagacatgtctatactcgccatttagcctataaatgcgcttctatttccatatgaaaggggatgagaacattttatagcaaaaattctgccaatattactcttcgggtttttcttcaagagaaactgagagtatagagttatggtttcttgcaaaactactgtaaacacatcaaatacacccttagaggctaatagattgactcgtggagtaaggttaattgatactcgaactacgtaaaaaatctccatctctttatctttgcatttagttttcgaaaatcttggtaaatactatctatatcatcttttgaatttaatgcagtgtcaatgtggtcatataaatagattatatatataattatacataatatatttattttttggactgtaactactctgacttttgaacttgtggttatggttatcttcaccagtgagttttttcccatacattaggtggcatttggttggaggt

SEQ ID NO: 83337 - DNA, 1384 bp, Cannabis sativa
tcagaggtaaattatttcgggagacaaaatttttataaggaggggataattgtaataccctaagttttaataactaaattagtaaccttaactaggttaattaagtgtaaatgagaaattacattattatatgatttaatttgtgaaattattatgagttatttcattttaagacccccattggtgtgtcaggggtatttccataattttaacccaagaagagtaaaatcataattttatggtagattgtgcttatagactatattattatatagtatgtttattctaactttctgcagatattttctaacaagtctgcacgatagtcacaaccgggtattttagcccgaattggattcggggcccaaaatatattttcgagatttagttatggattttatggcttttatatgttaaatagaaaaatataatttatatgtgtgagtggaaatggcaaaatggtcctttaatgtgaatatgcttatcagtgtgtcttaggggcaatttggtcatttgaccaaataatgcattattcaacaaaatctgattttggcaaaattagaaaacacttttttgggttttgcttctccctaaccgcctctctctcaccctctccatttttgtattttaaaataattttggaaggaaaagcttggaatttttggtgtgactttatgctagttcttgcttggagcttgaggaatttgtggtaaagatttttaatttctttttcttacgttaattctagtatttgcagcttcataattatgtttttggaggttcttgatgttctttgtttgtggatatgcatgtttatgaaaattgagggaattttggtgaatattgtatgatagtgttattaggtctttggttgattcatccttgttgttttgggaggctttgaaatgttgtattgatgtctaaattctggaaattgctttgaatttctaggttaagatttaaagctttgagtttcaaggcttgtgaaataatgtgtaatattattattgtgtagcatgctttgggtatgttttggctttgatcttgagctttgttttaagcttaagttcttgctaatgttggataaggatggtgtggaatagaacttgaggttgggagtggttttgcttgagttttggtatgaaattggttgattttcgaagttatgaaaaattggaaattttggggttttagagcccgttgccacggcgagggccttggtcgctgcggcgagaccctattttcccatagtttttttttactcgtttttaccataacttttgactcagaactccattttgaacgttcttggtatcgtgggaaagcttattttgggctctatttgttaatctataaatggaatgcaaactatgtgtatatgtga

SEQ ID NO: 83338 - DNA, 902 bp, Cannabis sativa
attagaaaataatttccataaataaaatattctaatatattaagctggcatttagttagaggaaataaaataaaatagaatggatataaaacaattttaaaatattaaaatatcatttttatttaagttatatttttattttttccaataacttcatttaatagggtgtttgtgatgtaaatttgaattgaacaaaatagaatttgaggaagtaaacttgcagggaatataaaactcatgtgtttgagaagattaatattaccacggttttaatttaaaatatgagacttattagaaaatacaaacctcttgtcattcaaatttagtttaaattttacattctctcattttcattaaatctaaaccacgtaccgaacacttcataacacttaataaacaacctatgagtgtaataggattgacgtccaacttaagatattgctcgtgagtgaattataaaatttttaagccttaatcctatgataaaatttatatgtttggtgtgctaaaaataataatttgttaactattttatcgaaaaataaataaaaaaattaaaggttaatgtacgagagagggaactgaaaaaggtggtatgctaatttacacttgtaatctctaaggatggattgagctgtaaccaccatactcaacatggtgggtagattcccaatctcatttctcaactgtaaaaagataagtgctacactaacagatgagttggaatcttataatatcagtaatataaaaggtaaaaagcaatttaattagaggatataaatttggtttttggtatctttttgtaccttactttgtatagctttggtataccatgtatgcgtttcctagctagctaggtcaatttgtgtatatctagcttaatttatgaaagactaggccta

SEQ ID NO: 83339 - DNA, 982 bp, Cannabis sativa
attttatatatttaatatatatttaacacatgagattaatgaaaaaatactttaaatttaaaatatgaattctcatctttctaaatgctaataaattctcaatgcgtattgaataaatttaattttttaacaattttattatgagatcatgaaaattaggttggactaaactaatatttattatgtatgttggattattaagtttcaaattatttttatatatatatatatttctttttaatgaaatcaacttaaatagtagctaaaatggattggatggatccaatccaatctaatagaaaaccaatcaatgaatctaatggttagaaccgatctaatccaatacatccataggatcgaatcaaatcagatgacttaattcgattagattggatcggatggcaaaatttaacatctaataaataattggattggatcgattgagtccacattcattgaatgtgatctaatgaacactcctatctgcatacatgcggaagactttaaatataagtttggttttaaaagtaatagttaggcatatttttttttcatatatataaaattatatgattatagttgtttgctaatcaattttctttacctatatattttataagtaattttgctcaagttggttctttacctcagtttgctcgatgaggtagtctcaagctaattactaacactatcttttagaaatcgattttatatatcttttggatagacaaaaaaaacttgttggtaagaagtgcctccacttcgaggtttctcttttccatgattcatatcaccataaaatatttatatgtatatatattattaattattagttgcataaaatatagcaccacttatagatcgatattgatggagtcattaaaaaagtaacctttgatccataatgatattattaaagtctcacaacatgtgaaaataaattggtatatataaaatgaagagaaaattacatctgccaacg

SEQ ID NO: 83340 - DNA, 1056 bp, Cannabis sativa
tatatatataatgtttaattaatttgactaaatattttaataaacattttatttgattaagttattttaagattttaaaatcttattagtaatcgtgagtcatgatataatataataagttagttattttgggttagtaatgcaaataatataaaatgtaaaatttttaagtaaaatatatttatttagtaggatatttggtataaattattagagttattatactaaaagtagaaaattctccaccaaattggtgtagattctacactaaattggtgtaactattagagatgtctaagatctcgaaaaccattttaccaaattggtataaaatctttacactatttcacacaccaaattggtgtgtattaaattctaaactattattaatggtattcaattttgaatttataccaattcaaaagccttgcttacccagaagagacaaattaaaatctctcaaatctctaaatctcaatcttccattagacttatgcttgctgagttttgaccaacttttccaagaaataccatgactttctgtcgagcttgaactccgctagaagtaagatatcttgcgttcaattgattgacacatctctttagtcaacaagaatactaggtagagattgcacgacatacttgattaatacgtttctcccagcattggacagaatttttttttttttttttaaatatgtacaataagcttaaatttaaattgtaatgttaaaataataataaaaaaaaatgttaaagaaaacacatttaatatataagataaaagataatgaatttaaatttgaattgtaataatttttttttaaaaaaaaatattttcaactgttatatagccaaagttaatataatataaatatatgtttatatatatatactagatacatgttacgtgccaaattacgtatgttaattttattttagtttttagtttttttttaatatcataattttaaaattaataatattcaatatactgataatcattgaaatttcaaatttaatataaaataatatttaaaatttaactaattctaa

SEQ ID NO: 83341 - DNA, 1547 bp, Cannabis sativa
  modified_base (99)..(106): a, c, t, g, unknown or other
ttctgctgcatcaatgttaggtttcctaaaatcttatgtgtttaatttcattgtattagagagttcatatttagggtgttaatgaaacatacatgttannnnnnnnagatcctggtaaaataaatcccaaaaattggcctgagagccatggtaaagatttactttcatgaaatatggatttaaaatgatgattgttgatttggatgtgttcatgttggtttatgtgtgatttgatgattttatgtgaattacaaaatttttctataaaaataattttatttttctgaaattaatttatttagattctttgtgaaaattatgtaatttttgttttcacagagctcaatttcgataaaaaatgagagagatatgaaagtttgaagttttagggtccattggttgttgtcgcttgacaccacagcacacagggctcaaacaaggtgatgtccacccgtgtctgaactgctggcctatgtcagaagcacccattttgtccgaagttgaggctgcaacgcagcccttgggcatgcgaatgaggccgccagtagcctcctacgcgcgcggatgaggctgcatgcagcgtgggcactcagagagagtgctttgcacccaaaaatatgatttttgtgatttttttctcaccaattttatattttttttttcaaaaccataaatatcgaaataaaatattacttttagtaattaaacttaaatatcaaaattttcaaataaataatatttaatttttctaatagattattattaatttgagatgttttgaagtttaaatttaaaaattaattatttttttaatatataaccatatggcgtcggttatttaagaataacaaatggcataagctacaaatgtcaaaaataaatgacacatatgccgtcagttaatttcaaataaccgacgccataggggattttttccagtttattatttttaattaaaaactgcctctaaatgattttaacaaatgttatagccagtgtttataaagtaattgtctttaaatgtcaattttcaacaggcagatatttttaaaattgtgaaaaatatagcctctaaaagattgtttatagtagtaagaacatgaatttcttggagcacattctcaaaccaaatttcaactagtattggagatagttatatcatctcaggaaggtgtttcatcatcttgataagtctaattactaatgctgtaatggaagttactgtttacatcatcttgatcaacaagaacaattgtatttttaaaggtttctgtgttacactatgaaataatgtaggggcttattagtaatttgtaaagggtgtgaaagactataaatatgaaattgtgaggctattgttggatatagatcagaaaataaagcattggttcaattggagtttgacactgattcgaagagtgtattttaagagatttatcttgtctcgaagaggactattatctaccattgctgctttcattgagagaaattacactgagagattcattgtattaactctcattcatggaagatgaagagattattca

SEQ ID NO: 83342 - DNA, 522 bp, Cannabis sativa
aatacactctcctcacgtttggacttgaaagtataggtaacgaacaacctttaagagactataggatcaaacataatatttgaaatgatttcacagggtaaagtcgagaaatttatatatcgaaaaatttataaattttgaaacaagtcaaatattccaatactgaaaatagacacacattgatggatactaaaggagaggcgaaagattttgttttgctcgtctttttggattgatggtacttcaaacaacagatcacaaacaactcttttatagctcgtctttttaaatcgatgatacttttagctcacaacaaatcacaagcggctctaatactatttaaatatgaaaatgattaaaatgtaattaaagtgaatgagttctatcttctattactaatttatattcttgcatcagtaacatggactaactctaataatatgttgggtgctcttccataattcattataggaagtatatgataacctttttcttttatttgttttgaaattttaaaatata

SEQ ID NO: 83343 - DNA, 1285 bp, Cannabis sativa
aggtttttttgagataataaattcttcgcaggaggattaaaaaaaactattttactaaaacgatcatatctagagttctatagctcagattgaggtgattctagtggcgttaaaaagataattcaaagatctataaattaggtagaaatagatttatcgtaatttgaactttattggggtcaaaattaagctatacgacctattaagcttagtatagaaaccccaagttttaaaattcaaatttaagacttatacctaacaaataagattattatttaattattctatttagagttaaattaacatcagattataatgattattttattattttcccttacaccattattagatttgattagattataaaacctaaatctctcttactcttgctacgtaatatgcagagagcctagaaccgtaagaaaaaaaaatcaatctctatctctttctttcagcctaaagcacaagtttttttaaagaagacacttataaaaattttataccctacaagctattcatctcgttatctatcaaatatttattgttttcttcttatttcattctctttgccaaacaccactcatgcttctcatcaacataggattgagatcatcatcatcattctaataattgagattcaagatctagaattttattaagaagagtcaccaagatgtaagaggatttcttgcacttattggtgtacaatttttggttaaattattgaaatctcattttcattttttctaaaaattattgttttagtaaatagtcacatctctctcaatatttattcaattcatgcaaccttagtgtctatattcttcataatttttatgaagaaatattttactaattcaaaatttttatgtatcaaaactagaatatctattttgttagtcgtaaatcgctttctcatatttcctataaaagttgtctccactaaattagaatctctctctaaatactgatctgtttccaaagatcttagtatctttagaaagcttattagatttttcataagttttatgaagaaaccttttattaatttggagtcatactatgtcaaatagttaattgttttctgtatcatgttattcgtatcttgaatattgtgctttaaaaactgttttagtaaaacttcaatatctctctgaatataataataatttaaaagattttttgtgtcattggaaagggagtgaaattttctaaaactttcatgaaaatattattctctagttctgagtatttttgtttactccatattccttctcagatt

SEQ ID NO: 83344 - DNA, 606 bp, Cannabis sativa
cctcccatactctctctctctctcgctcatacttaacactacctaagaaaaccacataaccccagttcaccacaggacattctctaatcgatcttattctcccaatttttgttcactttatgtggtaattacacgtggcttaattcagctgacacttggcataacgtgagactttcgggcaaaaacatcccgggtagttcctagataaagttgatatcaataaaatgtatattatcttccaggaatcacctagctgaattaccaatatgacggttaggagagtgaagatcaacataccttgcaagattgcatcgtaggtaattttatcaaaaaggtaagtcttaaagagagtctggcccagctgtcaacacaccggtcaaggtaaaagatcccaaaaaggtcggacaggactaaacggactttgatttcttcctcaacaaactctgcaaatatgtctaatagcatcctacaaatacgaattcgactcttcagtccgaaagtataggagtttcaaacagattgtaactctcctaaaaaagaggaaattttatatttcaaacatttaaaatgcacttccctacttcctataaatagtgaacatattca

SEQ ID NO: 83345 - DNA, 736 bp, Cannabis sativa
aaaaaaaaaaagaagaagaagatttttttagttaattgtttgatatagtttttaattaccttttgccaccttaatacatttctcaagtcttttagctaaccaacagaataatttataaaatatatcaaaaacaaggtaattgttgcgattggcatctatacattaatattggtgactataataataaattcaattattgatggcatatataagggaggaatattttttttatttatcaattaaaaatactttcgtgttatattttattaaaatatacttatctttgtgagttgctcaatatattttcactttctacctaagtgtaatacataatttacattaacctaatgagtataacagaaatattatctataaaagtatgtatatatcttatagaatatgaaaataaaaataaaaataaataaactaattaaagtaggtatacattatacaattacacaactctaatagactatagaatggaattgtttgaatgttgatttagtatcttcaattatttaaaactttatgataatttatgggaacttgacacggtcttattaaatattaggtaatagcaactatattgcatgtttatttagttttacttaaaaactttatattattttattttcattaagaaaattaattattatataattttaaataataaactatgcaatatataataatcaatatgttatttttcttgattaaaattaaaaataatttaata

SEQ ID NO: 83346 - DNA, 777 bp, Cannabis sativa
atctgttttgtggctggagaagtaatatgcaatttgattttgaagattgcttctgacttttcattggtgcctcttttaactgaatgataatgtcaaattacagttacaatttgatctgctttttttataaaagatttcctttaacttcgccaatttttttaggatttgttttctttttcttattataagtgatttcttaaatatttgaccaaagaaaaatggtgaaaccatggttcttatatcatagtttatagtgtacttttacaaatatcagattttattggtttttcataaaatggaatttcaaggccacggttctctggtatttcgttcttcctcgccggagcggttcgtttcttcctcgtttcagtcacgccgataaaagaggttgaaaaatctctaaaccgtcggtgctccctctcgacggtcagaggtattgactctctctacagtcagtggtcggcgatgcactctctcttggcggtggtatctctctcgaccagactctctctcctctccagtcactcattcgaagttcgaagaacgactatggaatccttcgactattggaattcctttttctttatttttgtttttattttcctttttttttttttttgaaatgattagttattcttaattaaatagaaacttttctttatactagatgcgagtaatacgtggaccaagttcttgtggtttttgtttaagagtttagcgactgattgtaaattatgttataaacaatatgttttataaaactaattgttaagaatg

SEQ ID NO: 83347 - DNA, 646 bp, Cannabis sativa
ttttcaaattttatacttatgcctttaaaattttatttattttattatttcatttaatagttaaaaatatgataataaaaaaaaataaaccgagtcaaatcgaatctaatccaaataagccgagtcgactctaatccgttttagatatctgatccaatagacagagcggatcgttacatgatccagatcgaattgggacaaatcccaatcaatttaatttacactcttagtgtagactgttatgttttgtctaagcatgttttattttcccgattctaattggtcaccattttcatagaatcttacatgcattcatgtaaactaaactccacctaataaataattcagcccccccaaaaaaaaacctctacttgttaatatcttcattttgaggttgaattgtgttttaaagtctttgacccgctaattgttgttggtcaccaaccattatcatgtcatcacagattcttctttattatagtgctttaaaaaaaaacaaaactgaaaacataggacccataaatcacgaagaaaagtatataaagaaatgttaaccttattcaataccttttttttttgagagagagagatagagagatagagagagaaaccttattcaatactttattaaaggaaaaatattcaa

SEQ ID NO: 83348 - DNA, 822 bp, Cannabis sativa
gtgtgctgttatgcaaattgggaaatgggatcaattagcgaattatgggcgaattgtaggtgtgatggcgaacagctaaattgattgtaaaactcttagttgatgtttggttggaggtaatgaaatggaatagaaagaaaacaattttaattttattctcttgtttggttgcattttattccaatagaatgccctctctattattttggtggaatgacttccattttgaattggaaggaaagtccattccaatctaatatgagaaaaaatttaattatttttttatcaattttttgtatgtattttaaattttattttattttatttctattcctattttttcattcctttaaaccaaatgctgatggaatggaatggaaatggaaaggaagtactttcattctattcctttgtttggttacattttaaaacattgaaatatcattccaatagaattcatcattttggtggaatgactattccattttgaaatgggaggaaagactatttcaaatttcaaagtaacacgagaaaaaatgtaatgattttttatcaattttttgttatgtattttaaattttatcccatttctattcccgtttttatttttattcttatgttttcattcaaggccaccttaatgctttaggcgctactttagtttttttacacggatgtatatggtaatttttttcttaatgggcaaaaaacacttttttttcctcactaaatgctttgtcttgatgttttacttggccttttaattattattattttttttttaacaaaaatccaaaagtgatggtgaggatgaggggtagg

SEQ ID NO: 83349 - DNA, 699 bp, Cannabis sativa
accgcatgacatcattttgtatatgtataatttatttagtttgatccaactgacatattctgataaaaatgacatactgaagttaaataagctgatttagaaatgttgatctagtggttagaagtccaaattatatttttggtctagacagacattgcgtacaataagtggttcgtattgtgttacaccactgcggaaagagagtgtgtcatattgtagactattcttatatatatatattcgagtgaaaaaatcctatccatgggtggaggtggtgactttctttaagtggaggtgatgggtgttcaggacagtcaacttcaatgggggagttgtgagtggaggagtcaagcaaaaaattgggagttttgattcaatatcaggaggggtggttcttttggggtttggatttgaacattgagggtgtgtaggtgctaaaatatcattgtatatgagcgacataaaagtattttttgaaagaatgagagaaataaagaaggaaaaatgaaaatagataaagtaagagagagaaataggaaatcatgaggaaagtatttttgtaatttataaaaagatttatttttttaaagttgaataacatatatttaaatttaaatataactagaagcatcaaaactcattttttttaaaaaaatttttttgaactccacacatatattttattgccaatttgtagca

SEQ ID NO: 83350 - DNA, 1020 bp, Cannabis sativa
cgactattttgatccccctccttgagccaaaaatttttcgcacgttgcttccaaaagctttcccgttgatcaagtatagcaaacaaagatttcttcaattcatcatatcgttgcaccgagtatgcatctcgctttctttgaagtactttaagttcagatttacaagccttgattctctgcttgaaattcccagtaatactcttcccccacacccgaagcttctcagcacacgcttctattttctatttgaaattattcccttcactattctcccaacagtctttaagaatttggagacataatggttcctttagccaagcattctcaaatttaaaccggtgagagggaataaaagagtcttcaataatcggtttcaggaataaaggattatggtcagatgaggtacactcaaggttgaaaagtttagcaaaggggaatacctgactccaagccgaattgaccagagctctgtcaagtcaagcttcgatccatctctgcgtccctcaccctttctcccacgtgaaacgatgccccaccaagtcgatatccattaaggaacattcagacaaagtttgttggaacccctcaagcaaccatcggtggtaagggttgccacccttcttctcttcattactcacaatattgttcaaatccccaatcacacaccaaggtaacgtatagtcgctagccagtgaacggagaagtgcccaagtatccctgcgatttgctctgtttggttccccatacactcctgtgagtctccaggtctcgttctcccccatacaaacttcaaagtcaatgtggttttgggagtagcccaatactcggtccatatcactttctttccaaagtaaagctaaccctccccttgtccttgggcctctacaataaaattaccttcaaagcccaagtgttgtcccacccatgtcattctttttttatcacatttagtttcacaaagaaaaataaaattgggtttcttctgagatataatctctttaaggaattgaacagtccatc

SEQ ID NO: 83351 - DNA, 570 bp, Cannabis sativa
agaaaagcgggatgcccatgatgttgattttttcattagccattccccaatagatttacctgcaataatacctacagcttctctcaatttgaggaggtcgacatgagtagggctctgatcataacataattggtagatttgaaaaattatgaatggattaaaacgattgacaagttcaataccaatatcttgatttcgaatggtaatgcaccgtggtcctctgctacactgttatctaaatgattaatgaaaacaaaattacagaaatcaaagttcataataacatttaaaactaaaactgaaacaaacaaccctagtttggaagcctctgaatattagagaaagcattgaccgccacctgagcatgagaacaagaaacaattctatttatctggttatccaaagcccattgaagagccaaaatctgggtgtgggcttctgcttcaagagcagaaccagcttgaattgaaactttgaagtgttagtacaccactgactggtattccgagagatccagacgacagctacaccagccacaccatccttccaagctgcgtcaaccatgaagat

SEQ ID NO: 83352 - DNA, 850 bp, Cannabis sativa
taattacctgcctaccttcatatcttacctttctcctaccaaacatagactcaggtcactttctctaattctatggatccttacaagatactttcagaagaaatgtggaaactgggcctaatattggtgtcaagtattcgaaaatagaaggcacaaagtagcacattcttttgatttgagctatatgttagagtttgggataagctgaatgaagttcaattctaaaattaattaacaatgggaggagtagcccattcatcttatatattcatttatctttccacacattaactgtctaatacccctcaagatgttagctattttatttgctatactttttgaatcggtacttaagatttttggtggttttttttttttggctcattatcctcgaatgtttttttttttctttggctcttggtcagtttttttaaatttttagtagctctcttttattttagctctacttcgatcggatttttaatttcgtttctttttgtttttgctaacatatcagaatttggtttggttcattattatgatgatgtttcacactggtttttaagtattataaaaaaaataatcttgggtaaagcttccacgacttagagacatttttgctatttggttttcttagctctcagatttcggatcagcaatggtacttcgtcattctcatcaaacttcatcaaatgcaaagccagtgtccgtggttggaacctttggatacttggctccagagtacatgatgtatggcaaagttgacgaaaagatagatgtgtactcatatggagttgtgctccttgaactcatcactggcaaagaagctattaaaacagacagggcaact

SEQ ID NO: 83353 - DNA, 738 bp, Cannabis sativa
caaattacgttaaactattttacatttaaagtttgtattttaccgtgtttaatttaaaatttagaatttatagttgataattttgattgtatttgaatattaaagttgaaatttaaaatttagacgagtatattttttttactatacatttatctttttaaatgaattatttgaatgccaaaaattaacaatcataaaaataaaaataaaaaataaatatgggtttaaagaattatgacctacccaataattagaacacacagacatatgctacgtgtgttataatgggaatctcggaccatagagggcaaccaaataagtgaccttatacaggcactcactcactcaatggtgcaaatgcactatgttgctcgctcactcatcttatatgaaaccacaattgttattgtgccagagtttacaagacatgtgtcacaagtacatgtgcttattttagtacaaaaatattcacaaataatattattccaattacattgtctccaatcatgtaacacacaaatacatttaaaacttccactgttacactccataccaaactcaaattcacacttgtcaactaaccccaaccccatatctgttcttgaccataataaatatttgaattttcaaacataattattccaaaagaaaatgtacacttcaaaagagctattcagaagtttctagttaaaggagaagagttgatttcaatctaaataaattcacagttatgtacac

SEQ ID NO: 83354 - DNA, 1040 bp, Cannabis sativa
aacaatattgttgtgagaaaaaaataattataactgtgttgtgagaaaaattaattgtaattaaatgtgaaaaaaaaaatacattaattaggtgttctattaaattataaatttgtaacatgatctggtcgagagataaggggatcgaaagtggttttcctttatatggaataggcaaagctacccaagcataaatttatgacaagacttgcttgttggaaccgattttacactagagatcgactagttgaggtgaatcccttattatgtaacttgaaattagaaacacacaatatattttctcgtacagtgcacaagttcaaatggagctctgtaattggtatgggatgaatactcataatcatcattgttagaatgtgagaataagatgaatgaggttctatctctcaaaattaattggcaatgggaggagtagctcattcatattatatatcacaatttatttccacatattagcaatgtgggtctaactcttaataatcatcttttgaacaatttgaaaatgatgaaaaagtgtagaagaactaagaataggcaagaagtttatgtggctgttttgaatgctctagtttacaatataattaggagcctcgtaataatgttctttggaaagcttacgtgtatactgtaaaatttcttgtaaataaaattaagagtgatttattttagcttatctcattttaaaagggagaaaattagtgtaaaagatactaagtggtacaatttgagtattacttaacaatatactcatttagttgtaaaaaattgtaaaaagttgattgtttgcaataaaattctattacttacaaaaaaaattataaattttaaaatattcttaattattaagatcctaattataatgataataatacaatattattttatcataataaaaaatgtatacgaaaatatgttatacaaaaaatttattttctatatctttaattattattatatttttaaatataaatttatatatatttaataaaagatagtttgaaaatattttatagcatttt

SEQ ID NO: 83355 - DNA, 1011 bp, Cannabis sativa
aattttgttaaatcaaacatttttttatacagtttttcatttcataccaaatttgagaatatttttgttttatttattttctattttttactatatttttcttatatatttattttatcattaaaatttgttagagagttttacatttttaatgtgtgaaaaataataaaatatataagatttatgaactgctactctcattctctattatatttgagatagatccctgtgtatcttacaattctaacatagtatgagagccaaactaaactctaacgagtattccatctaaaattcaaaaattggtctaaaaagaagagccagaagagccactttgatatgaggatagtgagccaaaaagagccgatgcgagccaaattaagtgccacttgtgatcaagccgtgtaagattagtgagtaaaaaatagccatcatcttgaggatggatcgatgttagatttatatagattacttctctcattgccaattaattttgagatagaaccccatgcatcttataattctaacaaaattaaacttccaaaaggtaacctaaattttcaataatgttcatttggtacttatatttaaaatttatgcatatttgctggtatcctaattaaacataaatttaatcaataaaattttattaattttatcaaactgctctcaattttatgtaaataataaataaataaatttaaatttatagctcatatataattgaacccaatttgatcaaattaatcaaatttgggacaaaatacaaggtagaaataaatatatataaaaacatattgtaccaaatttatattttaataaaaaataagataccaaatcattgcacatctatgatataaattaataattttctaaccttgtgctgcatcaattgctatttgaagtctttctttccaacttaaaacatttccattgccaactctttctgtacacacatatgtaaacaattttgtttatgttattataatgggtcttccattgataattata

SEQ ID NO: 83356 - DNA, 1255 bp, Cannabis sativa
aaagtgaagaagaatcaacaactaatgccttcactaaaatagactcctcttctgtttcccaagatgagctcgagcagggagatagtgacgatgagtcccctgctatttctcaagaagatctcgagcaagaaagcagtgatgaataatctcccctacttcccaagacgactcaagagaggggggcagtgacaaagattctccttctatttccaacaatgatcaggaataggggagcagtagtgaagatgtgtcttatgagtcttccaaagataatgaccaagaaagcgacactaaagactcccaatgagagaggggggaccttatatcatctcataagcatttgaacacgggacaaataggttggagtttgctatgatgccacttgaatctagtgtgggtaataaggtactagaacggggagcatctgagacgatattatcaataaagttactattctctagacagttcgcttcatattgagatttactttactttgtgcaactgaatcgatcacctcttgaacagacaagatgcaaagtcatctttaggtagggaggtccatcactaaggtatggcccctacactattattcgaataggtagtatggggatcacttcagctaagctttaataaaaaataaaagtctccaactactacttctttttcttttaacttaactcacaatgatgtaattaaatttaatatctaatgaataaaagcattgagtaaagcttgttggcacttcattattattaatcaattgtagctcacaaatccgacgacactcccaagtgcttaaaaaagctcgtaaagttagtcttgaggtagctacatttatttcattagtgagttaaacactgccaacccacgaatctccgaatatgtggacaagtgctcgcacatgtaacaactcccatgatcaagaaagtctaatgggatttggtatgacaagtgaccaataaaggcatttcttcaattactcaggggcaaataagacatagtatatgggagctatgcacgctacatgagcatttataaaaatcatggtacacgagagccatgtatgtcacgtacactttggtataagtatacaggagccaggggctgcagtgaccttcaagaattttgcacaccaaatttaagcattgttatgatataacctattccaacataatcatatttattaattaataaaagatcacaaatcattttatgtttcatggttcacataattactttcatgattatatgttta

SEQ ID NO: 83357 - DNA, 586 bp, Cannabis sativa
taaagatgattcccttcaagcgatgaatgtgatcagatgaaaataattattcgaattggaattgtgttatgaaaaaaattttgaaagaaaaaaagatgtgtagttgtatttctggaacaaaaaggaaaccagcagatggttatgtaaatctgttagaaaatcagggactagacaattcaaaaattctcacatggacaaataattctgtcgaacaatctattggtacccaattagcaaagtacgagacaacaaaaaaaaagtttgagaccatcttcccagattgtatacgcatcttattttgtaaaacaatttcagttggaaactgatgttagagctattgtacaaaaaatataaacattcaagagttctattttgtaatgaaagatctttgggatcaattggcactcaccgaattagtagagctatgtgcttttgcaccgtatattactcgtagagaggaacaaagattggttgagtttaatggctcttcgtagtgattttgaggaactccatgattcttctatattgcatcgttctttgcttcctttggttgaatcaatagttactgaattgttagcaaatgaaa

SEQ ID NO: 83358 - DNA, 1003 bp, Cannabis sativa
  modified_base (473)..(474): a, c, t, g, unknown or other
aagccactttgtctccaatttaacccaacgcccggccaagagatatgcagcctgcacttccacgagctcaatctatcaaattcaagatattagcgctgccatgaccgcggtaagtctatttgttggtgttcttaggctttgttttatggcgcctgaccttccgtacttacatatttctcctgtgttgccagattgctgcagagacttgtcacctctcaaagactttaattgaccatatgtatatcatgtccaaatttgggggcatggatgaggccatgaagagtctgagagacttggtggccgagaggaaagctgtctgggaggaggcccaacaaagggaggctcatttggagcggagtcattaggaggcgttgaaggccaaggtagagttgaaggcaaaggacgatgccttgaggatgagagatgaggtcgtgactaaggtgaggcatgagcttagggaggccaaggaggcnntggaagatctgactgccaagctgaagtccctggaggagctgtattaggctgatttgaaaatgacagccaacctaaccgttgaggtgaaggagcttcgtgacttcgaggagcaggctcaaaagaaggcaaaaagagacaagctcttggcccctgttacctgccagcacttcaacaagcatttcgacgatggtgtctctatgtcctggtagactaacggtcagaaccttaagcttgacttctatcctaagcttgaagaggttctcgtccgcttctgggagaagaagaagagacttgatgccttgttggagcagcccaggggtcatcgtcttccgccttcgattgattaaaccgactttttactaccactcattatcattatttttctttttacatatttaacccttctcccctcttcaagacaatttacttatatatatattttttaaggggagacacttaaggctcgtccccaggcccttatcttttatttttgagcttttctttaggatccgagcactttatattcaca

SEQ ID NO: 83359 - DNA, 950 bp, Cannabis sativa
ttttggttttaaaaaaaataaaaatctttattattcgttatgataatttattgacaagattcctaataaaaattaataaattgaaagtactctaattattttgatagattttagggttaatagtgttgactgtgaatttagccaactgacacaaagtctgactagaatttgatcgttacttatgactgtcacgtgtggaataataaatgtaagagacatacacatttatagaggtcctatcctttttgtttaggtaatgacatattcccattttagtcgtattcactcttgagataataccaagcagatttcaggctgaaatcttgtaatttctaagtaggctttcatcagtattacgatgtgttttgcatgtgagaagtatgagaaaagagagaggacttattgctatagtgcttctaagagtgattgcatgtatctttttcacgtagattatgaccatttatatagtattagggtttacaagctctacatagagatatccataaaaaataaggaagttacaacgtatatttgaaattcaaagcaaataataattaattcctaaggaatagggttgttatttgttgacaaagagtccctatctttgtgggcagtttgaactgctctgaagtcgtaggaatgatgagagcgagttggaaggcttgtgagaataacacaagtgctggtgtgtttctgtgcacttggcccgccagctttgttgaaggttgctcggtgcttggaagctggcactcctggccgaccagctataggtccgactaggaccttgctggcaaggttgtacatctcatttttcttgtgtgtatcgtgcagcatggagtctcaaaggttgagaggctgcacgacaataatcctggcagattagtgatgacctgtcttcaacgtattttctgctttttgccatgtaaaggagctacgtcaggtggacaaat

SEQ ID NO: 83360 - DNA, 831 bp, Cannabis sativa
attcttattccattccattaccattcctattcctattctattgctttcattacctccaaccaaacgggccctaagagaaaaggggtttggatatttttagatcgttttactaaccttgaatgagttatatattattgttctacattattgttcaaagaaagatttatataataaaacaaaaattaaaaaaaaaatatgtatgaaaatacatcaatacagacaaatattatttttatactttgaactgtttattatataatttatttataattatcataaaaaaaagattttaaattttaattttttttattattattttatagtttatgacattaatttctcgttattttttaattattttcttaatttttgcgtaaaaaaatatatttttgtagtttatttatagttatataaaattgtcgtgacattaatttttcattatttttttagttgttttcgtaatttttactaaaaaaatatattttcgtagttttaaattttacaagtatatttttataaataaaaaatttcgatcctaaaattataaataaaatatgaaaaatgatatttttgaaagttcccttgtttaaacacttgcttcattgaaaatacctttcaaatctctatcaaggtttctaccttgtatttattatctttttagagatagtattattgtattagatttaaaaagtctagtttctaaaagttcctctatggtaatgccacattataatttactagtagtagagggcacgtgcgttgcacgtgcttataaataattagtgaaaaaagtgcacaaaatataagtgcaatattatagattaaatagtc

SEQ ID NO: 83361 - DNA, 519 bp, Cannabis sativa
tgggttattgtgtttggtggaccttggatgagatttgatgaatataacctcaaaagtggattaacaggataaaatgttggtgatcacatgaagaattacctctcagaaatgcaaaaagtcattgtattttctaaaaatccaacattcaggttaaaacttaaaactatgtgaaatagataaacaccgatcatagaaaattaaagacaaattctatctgatcaagactcaatggctaccaagatttaaattaagccacgacataactttattttattttaagtgacactttgtatttatattttgaatgtgataactagtaatgtagtattaaaaattatttataattaatgatataaattgcatatataatttttgtttttattttctgagctcaggccgccgtctctctttgtctttatatagatccgcccatgttaagcccttttgcaaagacacctctggccaactttgaggataactccgtcctaaatctgcgaggattatgcactattagtttaa

SEQ ID NO: 83362 - DNA, 899 bp, Cannabis sativa
  modified_base (461)..(472): a, c, t, g, unknown or other
ttgctcgatcctccatggcagcccgacttccagttcagccaggtgaacgaccagtggacggatgcaactaggaaatccaaacgtcctctctctctctctctctcgatcctccatggcaacactccgagcatgaaagttctcatcctctccctctcgaattctctctgtcgatcctagaaggcagcactttcttgttctctccttctcgatcctcgacgacagctgcctcaaggccagatggccattgtcttccttgaagaccatcgacgatctcgtcttcccaaaaaaatggagaccaaaatctctgtggaaaggaagaaaacattgggctcagttttcaggaagcgtaaggggtgattcttgtggaagtaactgccacatccattgggaccggcttgcatccctacgatcaaccacatccattcgtgagggtggttgaagaagaagaagacgaagaagannnnnnnnnnnnaggaggaggaggaggaggaggggcggcgggtaaggcagagagagagagagagaacgagaagatcaaagaaagagggagggaattagggttttctttttaatttttatttttttttttaatttttaaagaaaaaaaaaattaatttttttattattaaaataattaatttttttattttttaaatatttatttacgtagaccaataaaattgtgtcacgtgtacatggtgtacacgtggatattccaccatggcagttaacagccaaaaatggatggaaagagctaaatgctaagagaacttgggtttgggactaaaattttagattagggggttagttgccaaaacctgaccactttaagagattatgccgcaaataattctttactttattagttaataaaaaaattaaaaaattaaaataatttt

SEQ ID NO: 83363 - DNA, 824 bp, Cannabis sativa
tgacaatggttattacttgggattaccttattcaattagtaagaataagaatgatatacttggttttcttaaagacagactaaggaaaagaatacaaggttgggaaggtcgtatgctgtctcgtgtaggcaaggaagttttgctaaaatcagtttcacaagcgctccctaattatgcaatgaattttttttctgatacttgtaaggagtttgaatgactcatggctaaattttggtggaatacggactcctcttagaagactggtattagctggatgagttgggatcatatgtgtcgtcataagcatgtttgaggattgagatttagaagtttgagagattttaatatggctcatttagggaaacaaggctggaggcttttagtgaatgaactctcactagtggatcaagtttttaaagctaaatattatgctcacgggtcttttctttttgttgaactgggggataacccaagcttcatttggagaagtatttttgaagcaaaaaaaactaatcctagcaggtgcttttcggtccattggtacgaatgaacatgtgtctattctaggagatccatggctcccacataacactagtagttttgttacttcaatgcatcatgcattagagaataagactatcaacaacctgtttagtttagaagctcaagcttaggatgaggaaatcattaaggatctttttataaaagagaccaagaattaattttttctatccaactaagtgactcagccacaactgatttttggtgttggaaattcgacaagctaggacaatacacaattaagagtgcgtataagcacttgc

SEQ ID NO: 83364 - DNA, 546 bp, Cannabis sativa
acctagcaaccacatcgcatctattaacaatgctgacattttccaggcaggaattgatcaggagaatctttagcgagctctttgcatgatcaatcaacaaaggaatctaatttacaagctacatgggatgtcacctttcacagagtaagtgcaacaagcctaactcccaaagggtttttgactctgtaagtcactcaagtataaaggttcgactaaccctatcgattacttgataaatttaacactatcatgaaagttaaccaggtgccacaagtggcaaagtgtcgtattctcgctataaaattgtaggataacatgcacgattggttcaaccaatttctagaagcataaatctaaacatgggaaacttttgtggacttatttctaacacatttttaagcgaccatgacatatatataaaccaccctatacgactttagctaaaataaaacaaaagcaaggtgagactttacagaactattttaaacgctttaacactgaagcaactaaagtcgagaaggcctcgaagtctttgttgatttgcat

SEQ ID NO: 83365 - DNA, 963 bp, Cannabis sativa
aaaagagagatctagaactttatgctttgatttttttccaaaatctaatcagaacatagttgaattaagacttaaagtttcagctttatttttttgcacaatttattctattaaatagattatctttttctgaaatttgaccaatttatatacattcaggtgttgaaacctaaaattaaagaaaacaagcataattctattctaaaaaatgataataaagaagaaaattaactctaaaaattacataaataataggctaaaaatatcctaacaaacaccctttgaaaattaaagaaattcatttctttattatattttctttttttttgctcaaaaaggcttgcagaatattaaaattaccaaaattgaggatcttcaaatatttttcctaaaaaataaataaaaaaaaatcaaacataactctgaataataaaataataaaaatactaaaacacaccctaaattgaactctaaaaatgcataaaaataaacttaacaaattttcccaaaattaaccattactcgcccttgagtaaagaccaacttaaagtaacgaaaaagaaaaataacaacaataacacacacaagtaagccaccattattatatacactacactgcatttcatgaaatcttaattgtagtttttaatcagattttcaactcaacttcctcaaagtccaactttaaagtttaaagggaaataaataataggtttcataaatgatcacaatactttgaattctaccatatatgctcaactcataccaaaaaaaaaaaaaagacaatctaaattttcaatatgattgcatcatttaaccttcttcattaatgtcaacaacaaatgctttgaaataaaaaaaatacacaaaaataataatagaaaattacaaaaatacggttgtataaaattttaaatattttcatgattttcatgattttatttacaaaaaatacgatttttt

SEQ ID NO: 83366 - DNA, 1301 bp, Cannabis sativa
ttatgagaagatggggctccagttgacagatctagcaccctgatgtacgagttctttagccaaggccttgcgcccttgggatacatctaattgcctttgacagttggggaaagtcccacaacaagaatagtgatggctcagttcatagtcattgatgtaccatcaatgatcaatgttatgattggttggctagccctatacgacctaaaagttgtgacattaatttaccacctatgcctaaattttccatcaaggtatggtgtagggtgcctaaggggagatcaacagattgcccgacactgctacaacttggctttgtccaaagctaaaaaaaaaaatgcctgccaagagctctaacgaagagtctagccaagggcaatgaagttcagcccaaagcgaggatgacctcatagtcgagtatcgtgatctggatgtggagatgttttatgaatgctacatccacaatcctaaggatgactttacttatatagaggctcctcttcgcgagagtatgattgcatggggcaaggagttgtttgcagctaaagcagccaaggagggtacttcttcctcgctagctagccagattaataaggtcagccaaattattatcgaggcttctatcagctagttttattgattctgctctagagactcatgtcatcccatctaacacaaccttgaacctgccaactctagtcattacccctgaagacatttgaggccttcatttttattactttttcatgcttttatttttcactttttgttttttgttcttgtatggccctaaggccttttacatttgaactagtgaccctctaggcggtctttaatcctggcattatcttcttttggttttgaacatatagctaactgggcagcctttaatcccaaacttatgcattttatgttcaccttgaagcttgccatgcccacatacttacctgtccatttctcacttaaaaagctttagatttttttttaagtatttctgtgctttttcaatgatgtgagtgtgggtatagcaaaacttaccgaggtagcatctttcaatgcagtggacatcaagtagtctaaggaattgccgtccaactcacgaagctagtcaccaatagcatgaagacacctttcaagatagttttgggtaaattcttttgccctatgcactgtaccaaaagaagttgcctgaccctatctttggttgcctttacagggcatctttagaggagaagtagagctcaaagaaggatcaacaatcacgggttggttgatcggaggtggacctaaaggtggcagag

SEQ ID NO: 83367 - DNA, 1096 bp, Cannabis sativa
atttcatgtctcatgaaactaaattattgggtgtaatgtcaacatttccttaacccatgaaagtattactcaggtgtgtattttttttgaatgcccatgtaaacatactagggtgtatatgccctccaagtgataaaaaagttcatattggtcactttctataccaaatctcattggactttctttatcatgagtcttgaggagctgttacatgttcaacactcatctacttatccagagatttgtgggttggcagtgcttaactcattaaagaaataactgaagttacctcaagaccaactctataagctttattcagctcttgagagtatcgtgtgtctgtgagctatacttgattaataacaatgaagtaccaaaaaaactatttcaacatttttattcatcaaaaatcaaatacaattacatagttatagctaaattgaaaaaaagaaaaaaagaaatagcattcataaattcgtatttttattagaaataactgacttgatccctgctacattgatgccctattcgactaacagtgtagagaccataacttcgcgatggacctctcgacctatagatgaattcttcacaccattttggttcaagagacgatcgattcacttgtaggaggtaaagtgaatctcgctgtgaagcgagtcatttgaagacaactgctttattgataatattgtctcaaatgctcccattcatagaatcaagtttggaatgttatagatatcattaatgcccatgtcgagtaatttaatcaatagagtgtgcaaatacttcccactaaaacctttgaatctctattaaaactaacctcgatcatcaagtttaaaatttttcgctaccataagttgaattagtgcaaccctctctactaatatagtctagctttagacccaagatcaaaaagattttattaggcttataatgtgagacttaggttagggtcagataaaagttgatattgctatagatcggaagagcgtcgtgtagggaaagagtgtagatctcggtggtcgccgtatcattaaaaaaaaacaaaattttcagtgcaaaaacaactgcggccaattctaaatcatga

SEQ ID NO: 83368 - DNA, 1252 bp, Cannabis sativa
  modified_base (423)..(429): a, c, t, g, unknown or other
  modified_base (843)..(867): a, c, t, g, unknown or other
tttagtcacaataaattataacttttgtaactagtacatttagttatggaccatttaatcacaacatagaaatagtaacttataattaatctcaacttttttacttttaatcataaattttattgtgattaaaaaataatatttttctatagtgatggggtatagggtagagttagtatagaattctgtagtgaacactaagctttacttgagttatatccttgcgtgagagtgaaagagtaaggttggagtaatgtaaaaataaaaatacaaacacattttaaaaagtataaaatattaataattaaaaaaaaataactaatatacaaacacttagagtaatgtaaatatgtattaaatttatttaactttttaatttaatttttatctatgtttattatatataatttatatttaatttannnnnnnaataataaaataatatatatgaaaaaaagtaaattaaattatatttttaataataattatgttaaaacacaaaattttaaaactgaaagaaaaaacataggaagtccttatggagtcagttatttcataataatcgacgacgtatggtccagggtgtataaaaattaaaatataagagagttttgccactaaaaaaaataaaggggtcaagtgtataaaaattaaaatataaagggatttcgccgcaaatttctctattataaaagtattagttgcaaaattacaatttgttgtgactaaatgtgtttttagtcacaatgcttgttgtgagtaaaactaaattagtgacaacttgtatctaaagattatgttttagtcacgtaaattttttttgtgactaaaagtcacatttannnnnnnnnnnnnnnnnnnnnnnnnaaaaaattatcactaaaagtaatagtttttttatagtaatttttcaacataagtgagtaataatgttgccaaaagaaaactttaattgtcacaaattttatcttatcattaatatatccaaaacaaccgcaaagtaaaatttacaagttgggggggattgcactcattttggaacctttagtagtggctgtcaatcaatttaattaattaaaaatttgaacatattcctaatacatttgatatactggttgagtcttaaataggctaacatttggcagtccataaatatcataatattgttaattttccattctcagctatatacacagtaattttcttaattacttttaaatatataggaaacaaaagcatatattaattgttt

SEQ ID NO: 83369 - DNA, 1118 bp, Cannabis sativa
aaaaatctcaggttagtgctaattcaaaagttgagtgtacctttttttttttaaaaaaaagtttagtatacttattatctcatcaaaatactgtttatgagtgtacttttaatatgtattacctatgaatgagcattattagaaaaatttaagattttatgtttaattgtgctatctaattcaaaaaaaattcccttaattttgcattatatggttgaagttgttctatcggactaagagagatataaaaaagagtttagctttgcattatatgtgagtttagcgaaaaagataaaaacaatattaaatataaatatatttttgatattgtgtaaaaaagaagagatttttttaattaaatatatagtaaaattaagcacagaaatcttttgattagttgtaatttttcattaattttttgactgtgtaattttacggtctataatgtggttaagtaagcttttgctagtaatgtaactggtatggtcaattcgtcctccataccagataatttattatgtaatgaccacgagatctaattttatttagttctaatatattttcacattttattcaaaagaaagggtagaagggaagcggtggaaggagaaccaaaatcttttgtttggcaagaaagaaaatgagagggaaaggaaagatggaggaaaatgctatccctccaaatcctcaacaatcaatccttctaaaaagtgaaggattttataataagaaaaatcatttatacaaaattacatatatatccttccataaaaataaaatatatattatataataaataatctagtaattttacatttagatcttaaatatttttttattattttttttctaatactagtaaacaacatcaatgaaagtaacaattcattccatccatcaccctcctctttaaactctctatctttccaacattatttccttcttaccaaacatagtgttaatgtaattcgtgagaatacaaatcattaaatatatattttttttcttgtggaatttattaatttttttttggtaatatttatttacacaataattgtaaattaggtcaaagacaatccttcaaatgacttcaaaagcatgtatcgtcacatttctaa

SEQ ID NO: 83370 - DNA, 1360 bp, Cannabis sativa
cgataaacaaggatcggtggttctcgacctttaaggctctacttcggtgggtcattgacgatgacaacacgaaagaaccacaaggcacttatgcttttgaatttgggacttctagggtttcgatgcaagagagatgggaaaagaagaggtggcactataagaacttagggcttcagtgggagggcttccggtggtggcgacgatgataggaaggaaatttaggactgggcggttctcttcatatctaaagagagatattttttaattgaaatgggtagaatgaatatgctaaaataaactaaggatagattagtatcaaattattttgagaaatatttggggtaaagttgtaaagaaaatttaaaaaatttcttattttatatatttttttatttgataatttgaaacataaattaaatttagtagttataaacataggctgatgatattaagactcgtctcacaatcaactatggcaaaaagtggagctagagtcaaattgcttggtagcagtcaaagctatttgaaattcattacttatgttttctttttttagggttggggttattataaaagattgtcataaacttcttacgtctttaaacaatgctaatatggttgcttagaacatcttgttcttttctagatcgagtgctcaacagagataatgttcctactaaggtacaaccttatcttttagctgatttagcaaaacatttcttttaaaaaagagactcatctctcaaaaagaggtttcaagttagagtataatgcttttttaataaataataataaaaaaagaagcatagctatatttatttaaggctaattaggatttttgccctctgaattttgacatgtactaaatcatgttcgctgaacttttaaggttgttaaagatgcccctgaactattgagattgttagatttacgaactttttttaattttagtaaaacagtctatgaaagttcaggaagcatgatttagtacatatcaaagttcgagagacatgatttagtaaatatcaaagtctgtgaagcatgatttaatacataaacaatcattaaaatagtaaaattgaataaaattagatagaactttttaaaaattccaacaaaacaagcaaaaaattttgtaacattggatatgattttttcttcaaaatttattgcacgtgtaacatgttgattctaactccttcgcatttacgtagaggatgtaaaaagttggttgtatagattttcaaaagtgtccctaatttatgtacattaaacaaccaatgtaattgcacatagattagttgtgaatgctctgaaatggacaaacaacttgcttggctaaattgactttctatttctt

SEQ ID NO: 83371 - DNA, 1011 bp, Cannabis sativa
ctttgtattccttgtaccaacaagtgtataaactgaaatcaagaaaaatctatagtatatggaattggaaagcacaattttttacaatctatgcctggaacgtttctataattaacataatatatacgtatgatgtgcatgggagtagttaataataaacgaattaagtagaatattgctttggatcttgatcatataataatattattcaatacatatatatggggaaaagggatcgaaacatacatactcattcaacctagtgagttgcatatcatatcaacgctactctatgcatgcatatcctcatcgtccaattcgctgaactttgagaaaacacaaacagtaagtagtttcattacccaaggtgaccaattaacatgtgaaatatataaaatagacaaaaataacttgtatagatattatggtttatgttgtgagattctagagggaatgtatatggttactgttagatctttacagtgtactgtcaatgaagttattcagtagtaggaaaagtgatcatggaatgggttttcatgatgtaatattctataaaataataatttaaggagtcccaatcataatatgactcatgaggagttatacctagggacttataaaattcatatataaaatggagaaaaaattacaaaattattgggacagatttttatatttttactgtattaagtttataaaaaatactatgttaaaattttaaaattataaaaatactgtatataaataaaataaataaataaataactagaaaacaaaattagaataacttaacaaacaacaagagaataactataaaacaacaaaaaaataactaaaaaaaaaaatatattgatctaatcataataagcaaaataatattaatcattatgatagttttagttagatccaattacatgaaccaccagtgaaggctcatttatcttatttaaataattgtattaggctaattaattatattagtttaactgattagcaacataattaatt

SEQ ID NO: 83372 - DNA, 835 bp, Cannabis sativa
atttagcaaaggtagtgttttaatataatacatttcaatgtcacaaaattaaacattattctagtatagttacaaaaatattattgaaaatatgaaataatatttatgatgtgcccatattataaattagattaatgttattgtattcattataattataatatcatctttgtaaatttttaaaaaattctgaataatttaccgtgtccaaaatagatttgacgttttttaaacacgcgtggtgaattaaaatatcagaaattttgttttcagtactgtaaattattcaaaaaaaaattaaaaatttacaaagataatactgtaattataacaaatacctctataaaataatattctaatatataattttggatgcaaaaattaattaaaaagaaatcgtaatagaaggtaataacactcatttataaattattggatagtgaatatttttagagtcattatatatataagtatgtttaatatttatataaataaattgtaatttttttcttctataatggtgtacatattaggtgaagcaatggggatgaccaatttcgtaaacccaattgatttggaaaagcctctgcatgaggtttttatattcttcttctcttttaagagtatttagaaactgaattttacttattttatttttttccctcactgaatttcaacttctaagcacaacttaaattatttaactaattttttttttattaatttcaatttgttaatcgaatggctacttgattacatatttcatcatgaaattaattaataaaataataaattatattaattgatttgatatgtgtattattgcagaaaatta

SEQ ID NO: 83373 - DNA, 565 bp, Cannabis sativa
tataacgactaacaagggcactacgagatattgtggagccaatgcctgagatgaagatttgatggaactacaggatttgacatcttggtctcggaatggagttccaaaatttttcggtcaaatgtgtaaaagacttcgctcatctaaaaaatgagaatgtactcagcagttagctcccatatcaaaccctaaacaaaaaagggaatggaggtctcctaactgctgagaagaggcccactccgaatgctagcatgttcataaattgggaattttctgtgctaattgtaccatgcacaagaagaaatgatacaaggagcgaagggagagagaaatggtgagttctataaaccctaggcatggaagccccaacctaaagaagtaaactgaagaaggctggggataatacccaaataatagccatattgtataaatattgtatttatgcaaaaatatcataaaaaacaataataaaataaatgcatatggcaagcaacttacaaagagaagaagcttgggtggttacaagtattggtgcgcgacacgataaaactgagcttgacactat

SEQ ID NO: 83374 - DNA, 858 bp, Cannabis sativa
cgaggagggtccacaatctcaaaatgatctggaataggtgcaggaggaggggaggagcattttcaggttgtgaagtatcagcatctaatgggagaagcaatttcaagttgcaaagtgctagtatctaattcttgaaacttatcaaaaggacgcatgcgagagtaatgaagaggaaaatgaattgtagaattagtggatgattcagactcaaactcagagaatgggtcaatgtgaataagatctgattttgtcaaattatgaggattaccaagaatagaaaaggataactgtcaacttatattccacatgtgagttaaatgaaacgtggagattgtccacgtttcatgagcagtcatatttgaatcaatcctaaaaaggataactgctaacctatattcctataaataggggcgaattccatagaaaaaaaatagagagcattttggagattgaatgattattcaaaattagatattatattatgtactctaaaaatatccctaataataagtactcatgaagtatgtagattttaactacaaaattacgtaaaattatctgaagttattctatcctttattacttattaatttatgtagataatgtattactaaaaaattatttatttttggttaatcaaaattatgctcacatatacatatacataactaataaattatgctcacatataaacaactaagagtaataactctaacaaatgctcatttctaagtatctatacaattatatcacatataggcacccaatggtaaactataagtataagattcacttttcttactcggattccaaactaagtggagaaattcttagtgatagtcgaccacgttaaagtag

SEQ ID NO: 83375 - DNA, 913 bp, Cannabis sativa
ctcaattttatgaattaagtgccattccttttatcaagttattccctttaactcatgaattgagggactctctcaaggaaagcatttgactctctagtctctaacataaccacctagagggtcactagccataaataaatggctccaaccagatattttcaatgttaatcattagcatacattttcgaggaatttattttcgatgatatataaagaaatttgttaagtgcagtcagcaataaacacagttaagcatgaaacaaaggatgtaacataacgagctaaagctgcaactgcttgttacatgccaaaaaaaagagagagagaacgctattaaaggtacgcaagacgaaggacataaacattgcatactgcaggtccagatgcttttctgggggatttattttctacattatttgatatgaaaagctgccaaatggaatcaacaataaacaataaaaatccacacaatcattcagagaaagccatgcataagatcctcaaatattaaagacaaaactatcacagcctaattattggtttgacctaagaagctgctctgatcactgggaaacatgtgggaatagcagaacattcagaacatattagaagctattcttcatgccgccaccagaatcattgactccctatctattataattcctttgattagatcgctcacgggctaaaagcaacctttaccatcacccgagactgctaacaaggattactactggatcttttatttctttctactagttcttacaaaaaacaatttgcaggaattactttctatttttataaggaacaacatgtttgcaagaatcaaaatgtaaaagcaatcacatcatatgtgagaagaaaatgactggcttgaacttaacaaaacaatttatgtatgaatgttatcaat

SEQ ID NO: 83376 - DNA, 1142 bp, Cannabis sativa
ggggcaaggagatttaaatctctcaaatgtatttcctttgactcgagtttttcttgtaaaaggattaaaagcaaatctaattagcattaatcagctttgtgaagataattatgatgttagtttcactaagtcccagtatttagttacatctaatgggaaatcagtcctcacatgcaacagaacggttgatcactgttatgttctgactagttatgtgaaattccatagagtgtttctggacaaaccagatttatagaactacagacttggtcacctaaactacagaaatctaaagaaaattgtgaccataaaagcagctcatggagtccctgaatttcgtttgggaaaggtcgattgtgtggtccctatcaacaaggaaaataaaacaagtcctctcaccctcctatcaatgctctacttacctttagagttataaaactgatgcatattaatttaatgagtcccatgtaaattgctagtattgctggaaaaaggtatgtgatggtgtatgtggatgatttctccaaatttacttgggtgaactttctaaaagaaaagttagatacattcggtgccttctctgctctttgcttgaaactacagactgagaaagatgttacaattggcaaagtatatcgtgttagaagtgatcatggcaaggaatttgaaaatgacattttggcacatttctgtgatgaaatagggatttgtcatgagttctatgctcccaatactccccaacaaaatgggatagtggaacagaaaaataggacacttcaggagatggctcgggttatgctttgtgctaaagttgtttctactcatttttgggctgaggcagtgaatacagcttgttgtatctgcaatcgtgtccattagagacctggaactactcaaactctttatgaactatggaaagggaagacccctaacttgagtcatttgcacatctttggctacggttgctacattttaaatgatcgagatcatctaggaaaattcgatgttcaaagtgacgaaggaagttttctcaaatattttgtcaacagtcgtgcctatcgtgtgtataacaaaagaacttacacaatgatggggtcaatgaatgtaaagtttgatgattttgaagtttcagacactgtccc

SEQ ID NO: 83377 - DNA, 714 bp, Cannabis sativa
acgataactcatgatgaacaccaagaacagcaaaagcagagtgaatagagggaaattcacctcttcaatcagtctgaacatgcttaatggaacactcaaattgggtggtgactattgttttgaaagtgtaaaaggcttcgatggcctatatttggaggacaggagatatatcgaagtaaaataggaaaaaacatctataaacaatataaactaacgaacaccaaaaatagaagacacaagaaaagaaaaggaccctataaatcatcatgtattaattcaaaaggctttgtagcctgagatacagtggtaggaaatagtattcatgaattaaatttggctataatataaatatcacattttttatttacttatttttttgtcactcatttgtcaataaaatattgagtaatttgtagcgtaaatacttaagtttataactctcgattgcatataaaaaaaattaagcttaattttttacagtaataaataattaagttacatttttagaacttctataagtacctgacaaatgtcaagttattatccacgttttatttttttattgctatatttgaattaatttttaaataaaaatttgatgacctaaaccaattagaggcggccacgtggttattggcttgacacttaatggttaattacttatagaaatataacttaagtatttttaccatcaaaaatcaaacttaaatattt

SEQ ID NO: 83378 - DNA, 1151 bp, Cannabis sativa
ttcacaagtcacaacaacaaaattagcaccaataacagttataataattatttattttattatatattgaaaaaattattaaccaaaattttgaaaaaaaattacaaaatactttaacacgttcgtgtttactatttaaatttttttatttatggttgtctttttacttgttttaaagttatcgtgaggttaatttttttttttatttttcgttgagtaaaatgtatttttataataactttaaaactttaaaaatttatttttataaattaaatttttagactataaagttataaataaacataagagaaaaagtatttttaaaattctaatatatttatatatgtaaaaaaatcctttttatacgaggatttatatattatagttatattatgtatatgttgacataattttaatggctagtcaattgcacacttaagagtactcacattaggtaaattaaatttgagctattatagtttattctctaaaatatatatataaaaataagtaaaataagtaaaatatgtctatcatcaaatgagctataatacatttttttagatcaataaatagtgtattcattgaactataaatattatattagttttattaaagcgttttttttaatatatatgtgtgatattattatattaatttattttatttttaaaaaataatatactatattaaaaatataatatttaaatgatataaataaaaaaaaataaagaaattaatatatgatgtaatataaaaatatgagataaaataaaaaaaataaaattttaataatatatttaaagaatagagtagagaagtttacggaatgttttaaatgatttatgaatgtattttttttaagatgaataatgaataggtttggaccaacatttttaaatctcacattttgactcaaagtcttcaattagaatcctaaattgtcaatataatgatgccatggtatttataggaatatttctaagttgtcatcttttgcacaattttttttgggcgaaaataataataataatgaaaattattctctaatttaatttataagatgcaaagaaacaaaaagaagtatagaatatgataatatacactaactaacgcccatatatgacgaattttaatgctgtttcttacgt

SEQ ID NO: 83379 - DNA, 985 bp, Cannabis sativa
aataaaattaatttaccctaaatataatgttttgttgcatattttgtccaaatatataaatactctattaaagttgttagctttgtgcgcctgatattttatattattattactttatggactgattttgtcatcatcatctcaaaagcaccaaaatataattggtaagattttaatgctccatataccaaccaaactgaaatgtgaatgtagaatacatgatttttataactatctttacaattgaaaattgagctaatattcaaatataatttattttgtcaaatacccataaagcttgctcaaatcacatgttgaattatacactcttattcaggaatggagctaacttttaaatattgggactttccgttatttcaaacttaccactaattattatattttaatgatacacacaataaaagattattttaaaataataataataataaatggtgtttacgtgttaacaaccagtgtccttaaaataaaaatgtcatatcgacattgatacaattaaatattaaatctcatataaattaaaatactgctattggacaccagtagtattctacgattagttagtgatatttttttaaaaattattttcttaattatatgagacatgatatttaattatactagtagcagtataacaccaagaaaaagcaccagtaatacttttttgtaattctctataactttatataataatgtttatgaaatatcgctgatcaatcgcaaggcacttatatatatgaatttttttttttttcaattgaacttaatttaagttttaattctacatttattttgtaagaaaatatatagcattaataaactagattatatctatcaccattattttgtaattatttaagtaaatattcaatttcaatatatttacatagtataactcaaataataggataaataatatttagaaagctataaatcactaactaattttataattagtcaatgt

SEQ ID NO: 83380 - DNA, 1256 bp, Cannabis sativa
tgacaggcaggaatacttaccacttgaattcagctagcacttcttcaattaacaccagaaaaatcccaagtattggctggttcttgtggtgatcgagcaaggaagaaagagaaacaaaaattcttgatttttttctttatgttttctaaaacgaataaagtttaactcaatattcatcaaaagaataacatgggtagcagtcaagctccaaaacaacaacctatacccatattccaaataaccaaaatacctttgatgcttaaacttaagctaatacaagcttaggggtaaaatggtcaaaaatcataacaccgctcaaactcagtattctactcatctccaatgtttatccgactaagaaaaagattctagacttacccaaatgactcaaatggccatccatcgcattttccgtcgtcgccgagcaaaaatcataaaaaaattacataatttacatacaacacaaatattacctttagagtttaataaaatctccaaaattgagaagttataactctaatgcccacttttaataatggaacccacaattaaataaattcatgaataactataaaaatattaatgattaaccctaattacatttactaaatcatattctaaaaatgcggtcattacatcatcaaacatacttttaataattcgaaaatcaaaaaaaaaaagaatgcatttcaatttctatgtacgataatttaaaataaaaattatataaaacacaaactaaaactctatattttataatagtgtacgatagtcttccacgagtttcggagctgcgaaacagattggaagttcagtcctttcatgggaaaggtccagtcgacgaactccggcgacatttttcttgattttgcttcgaattctctggttttctctggattgggttgcgatttcctggcttggtggggtgttatcctgcgattttctgggttcttcaaccaggttctttacagttttttctgggtttttactgggcagttcttgcgggtaagggtgcagtcgatcgacattgttgtgttctcccagttttctggtgttatcatctttttttccctgggtattgctgcgattttctggctgttttgcagtgtgttgattttgttctcattgtgttttctctgtttgtcgcaatggatttggaattggttaataggcttgctgaagtcttggtattagatgaaggtgatggtcctgtccttgctttgaatcaggccggtgtggaagaggggaaaaagaga

SEQ ID NO: 83381 - DNA, 1223 bp, Cannabis sativa
gtatatacgtcggttttataaaccgacgtaaattctttaagtgacacttaaaaaccgacgtgaattatactttttgtagtagtgtaattagtttgtttacatgtttgacacacaaaattgattggaatgttgaaccaattaacgaaagttccttttattaaaatatatcatagaatgttaattagttaagaaataattatttgtaattaaaaggtaattgtatgatgtagtagatacgtaactttttctttttccttttggaatgaaataattacacttaatacaatagaactacgttcattatacgaaggagaaatttctccattcggtataaagaaaatggtcagagatttaattcattttgttttttaatggaaagatttaatttgtactaaataggaaaactacataactttttaaaaattaatgtttgttaattattattacaattttaggaagataaagaaatatcatgtataagattatttcggaaacatgaaagttgaaaccgaaacacatcattttaccaagtatatggagaaccaattaacttaactaactttattattttatgtttttgtaaaaattaatatgtttggtatgtattgtaatataataaattaaaataatatgtatgtaagattgaatctctaaatgctactactaatctacagcttaattagtgctaacatttggctcacttagctccactctttagtatggttagttaattaatataagcaaggaccggttgcctagcttataatatattaaaaaagttccacttataaacctttgatagcttttgtttatactaagccacataataaagcccaaactatgtatagaattttcttttcgatttggactcttcagtgggtttatatttatatatcttcgattctgaaattaaattctgcctaattgagatattataaataatattattattctgagctttatgcttaatttgaaaatatcacatatcttataacattgtcctgaattgattacaataaacattaaacttgaaaagtactgagatttgtataaatctttagaaatatcgttaataatattagaatttaaaatactgtatatattgaaatatagttttttttttgttcacttttgttttcctcaagttgcacttttgctaatatttatttttataaatttatatcagacaatttatatcgttagtaaagcacttttttcacacc

SEQ ID NO: 83382 - DNA, 700 bp, Cannabis sativa
atgttttatctgcgaatccattctacacacaaacacacacacttgcttaatacaacatcttaaatctttccatctaattcacatccatcatatccttcaatataacaaaactacatgataatcatattcataaaagtattttagggtacaaacatgccttaaatactagagattaacactatgcattgaaaaaagaaaaaagtaaagcattcactgaatcattctcagcccaatgaacaagaaaattgctatgatgatagaacaaattatttcagcatataaatttacacttattaactaatgatatcaggaaagtatcaaataagaaaaagaataaacactgaaattgagatgtgcttttttatacaagggtttcacattaacagtatgtaaattttgttcttcataatcttaaatgacacctaatgcgattagttctactaagtttccaatgttgaaataaagcaatagagattcatttttgcaaacaagataattaatagtcataagttcatgaaaaacgtcctaatccagcgtgaaaatcttggaaaacctgataatcccatctgagaataaatttcatacaactacccaattctaattcgaaaaagagaacccaaaaaaacagctaagaaatcccaaaacacaagtgtaagaaatctgatagggtaaagccatttcaaaaattgaaatggtgaaa

SEQ ID NO: 83383 - DNA, 620 bp, Cannabis sativa
aattttttatatggcattctacattgtagttaattaaaatatgactcaattttttttgagaaatttaagataattaacaatttgttgtatgtgtacctcttttatttgataagtgtgtgtaagagactttttgaatatactttttatattataaattattctaaaatttttaaaattttaaatgatgttttaaataactataacatacactattaaatatataattaaaattataactatttgaatacaaaaacatgaaagggttggattgatacacgtttaaggagtggaccataaaagcaccctaattcttttttcagtaaaaatagatttctagaaaatctatagtatatgccaaaaggggtgtttcaatactccctatctattttgccatctagaaaaacttttcaactaattcttttacattatcatgtatgttatagccattaaagacagcttgtaaatttttaaatcttttttaatagtttacaatgttaaaaaaaaagttcaaatatttttttactcgtgcgattgtttgaactatatttttggcaatataaatttgtttgaggcaagggatgttgatttgataatgcaggttcctctaagtgataatgtta

SEQ ID NO: 83384 - DNA, 696 bp, Cannabis sativa
aatactgaatttatggctcgcattctagaagataatatatatcttacgcatcaataattattatattttcattgattatattttgtttattttcaaatctcttatataggtggttgcttagttagtttaataaatagtttgaaacttcataatcataagaaagacttattagattttaaaattaaggagtgcagatatatttcttggctacttcgatagtaaagggtgttgatgataattttttttttatcattggccataaaaaatataatgagaaaggaagattaggggcttttatatattttccagtccagaaaaaaagcatcatgtttgttgaattaatgggctcacgtgagtctcaaaggaaaaaggaaaaaaaaaaaaaaactcttttatgaattatgtggatggcctgaattattattatgtattttttttttttcataagaatttgtatgtgggaaagtaaaatataataagttattaattctatatgagatactccactataactaaataaattgctaccattaaattcaaaattaaaggatataaaaatgtcctcatttgtgagaaaagtgatgctctaacttaacgaatatcctatatatatgtattatatatatatatatactagattaaagttacgtacaatgtacgtatatttaattatattttagttaacttttaattatt

SEQ ID NO: 83385 - DNA, 982 bp, Cannabis sativa
actttgatcactgtttggtcactagtgctaatttagagggtttaggcactcttctacctaaacaatttaggtattctcccttctagattcaagctcattctatcccttttgggatgaaatcttacaagcttgtcaagatgattggtgacgaggttggagactttcttgaggtgaattaaaccactatctttcaagtttttgggttgtttcttagagctttggttgatgtctctaaattatcactaagggtatcttggttcactttgaaagcattcataacgaaaaatggttgaattttaagtatgagaacatgcgtattatatattttcattgtggaatgtttgaccacactctcactaagtgtgttccatatctgaaaaaatgtgatgagcttacttatcctcctcctcttcattataggatctcccttaaagctcatgcttaatccaatttcaagaaaacccttttgatctccctaactcaattccttttgaggaaatatatttgcctgttgtgaacattgaccaaagattacctattatagttaatcaatttcttaccacaagggacaatggagctggcccttctatctctatttctgctagtagaggtactgaaggaagctcttagtgttttatgtaagggcttagttcctctattgatgcgagtcgtgctttgagtatgcaaactgttactcatagccttgttgccagttttttcaagtatggtgaggttcctgttagggttaattgtgagaatcttgaagctgtttctcttactgtggttgtggttgtggttgtggctatccattcttgtagtggtgataatcctgtcaacattaatcacattgctaggacttctgagaagtctgaaggcaaagttgtttctggggctaagagggtttcttttattcctcaatctattgttgtaatgaccgctttagtaatttgaattagtaaagacaattagcactaatttttat

SEQ ID NO: 83386 - DNA, 850 bp, Cannabis sativa
  modified_base (734)..(741): a, c, t, g, unknown or other
gcgagcaaatgtgagcaagttccaaacgggcataccctggttgatgttgctgctgctggcatttgctggaacttcctgaggctgagccgccgtctgtgtctccgtcttcgtctccgtctccgtctccgtctccatctccatctccatcgctgtctccgccagctcagcgttacttcgatgatccatcgtagcagcacctggccttttatttgctttttttatttctaggatatttatagaaagaaattggatgattctagcaaatttgagtagtattcatagaaactagaaagttagaaccattcgatttctatcacacccacttctttatgaaagggaaatttatgtttcgtggcactcctataatatatgttctttacaaaaagctattttattattattattattattattttatgattttagaataaaaatatcatttaaatactaatttatatatttttgtttatgtagaaattggatagaagctcgatgtccatctcgataggacattaattaaaattaatttcttgattaaaaaattgatttttatccataaaactccatgaaatttgataggaacttgatggtgttcaatggatgatcaataacattcttgcaagaggtataattttttacttaagtgtccatttgaggtgaatttttgttaaatttagatatttttttttttaagatgtacaagttcgagataaatatatctattctatataaannnnnnnnatataacagaattcttggttttttgagaaattcatgggtggctttttatttatattaaaaataaattaatttattaataaaaataaaatggtttattaattttaaaaat

SEQ ID NO: 83387 - DNA, 2581 bp, Cannabis sativa
  modified_base (1634)..(1637): a, c, t, g, unknown or other
ataagtttcggtagtgttttgatgagtgcaaaatttggaaatcgtacttttactcccctgcccaaccgatctaccggttgtgaactggttaaccagttatggtggaagcagttgaccatttccaaactgggttaccgtttctaggcagtctcgagaaattgggaatcgtatttttgccgtaacttttcactcatgtgtccgttttagacgttctatatactgtttcgaagcttgcaacgagctctacgatatggtgtatgttttagagccaaaatacaagttttattttattgtatttatactttggggtttggtaggaaaccctaggtcttcctttgtagctattaaacattattttgagataaatacttattggtttatcattgttatgatatagggcccgggatcatcgatcgttccccaagtaagtcaaccaacatacctgaatcagaacttgaggtaagaaaagtataatgtaccacatggcatgacatgttttgtaattgtcgattccctgattaggaaatgacaatgtgatgacaccatggatgtgatatataggctcaccaattaagtgatgcgatatactagcggtgtaccttattatgtacgggcgacagtgatatgtgagtaccaggctatggtatgggctcgtctgattaggcgatgcaatatattggtgtcaggtgtggcacgggctcacctgattaggtggcacaatgatattatatatgatgttaaattatgacacgtgcttgcctgattaggcaatgcaatatatgagcatatctatttctatgcatatgactagttatattgtcttctattgaatgttatggtttaatcattttataataatgtataattatttatttaatgtatcattctttattacttttcttactgagtctaggtaactcacgagtgttctgtagtgcaggtaagggtaagaaaaagttaaaggagccataagatgacaatcttctccagcaatatacatattgaccccaccggcatgtgtgttgagttgtcaagagttgttttgggctatatctgctatgtattttgattttgtgttttgaattgttgtcgtatatagtcttttgtaaactttttataatagggatccctggaacacgtttttaatgccgttatgatgtccctttttagtatttcattttagttaagtttttaatgtcatcatagttttaataattaattaatctattagtattaaactagtttataaactcacacacatggcatttctatggaatagggcgttacaattgaaaagagaggctcctctctaatttttgagttctcttcttcttcatcatcaaaatttcgtccctatagtgatagagtaccatgctcactcataacaagtcaagtactcaatcataatgtggaagattgttaagaatctaacacctgaaggagatctaagctcatatcttgttattactctgtgacagaaatgaaccagggttagagatctgagtggaaggagccatattatttcgctgccaccaatgtaagattttctaaactttatatgtgtttattttcattgtcttaggaattcacatttagggtgttagattatagaatataatcaacatacatgttannnnatctagatcttggtaaaataacttccagcagttggtcacttagggcctaggtgaccaagtagcaaataggtgataatgagactctgagcaaggtctccaaaatgatgttgagacaatatttcctttcctgggtctgaagaaaaattaatacgattagcctcaatttttcgaggggtaacacagtgcgacaattttgttatattgtattatgttgatgcttgttttcatcaacagctctaagaagattgtaaacgaggaagatgaacacatgtatctgttaatcaatgtaaatcagtttatcaaaataaatataataaagatgaatacgaagatattgtagtggttcacccccttttatcggtaataggctagtccacttaggtttttattggtctcaatgcttgaggagagttctccaagagtttagtcctcaagtgaacttttagagtgagagagtgagagtttgtgataatgagttaaagtcatttacaattgatatcacctttatataggttttcatataggactctcttagggtttaaaaaatcttaacccaagacgcaccttcccctaattatggtcgggttaggtttaaaatacaaaatgataacaaaatcatatttcaatataaatatctaataaaataaaaattattgaagatactttaatccacacgtgctagcttattttcatcacgagaagcacatacatgttgatcaagagcacatgctgaactcatgattctagcgagtcgtgagaagtacgtgctaaagtgaagagcatcccacttggggccaagatgacatgagggtcgggatgatgcttgttcccttccctccgagggtcgagatgcatgttgaggttgtaaggccaagatgatgctagttgggtcgaggtgatggttgttggcttctccctagggttgagatagcatattgaggttg

SEQ ID NO: 83388 - DNA, 1931 bp, Cannabis sativa
  modified_base (1867)..(1874): a, c, t, g, unknown or other
atcggaatggtattccaatggttttaactgcaaccaaacaaaagaatggaatgtaaattgttttctttctattctattccatttcattacctccaaccaatcttaatcatcaccataaacatggtggagaattaatttgatgtttttgattttataattgatggtgaaattatttatccgatctctagaggacttaattaggatcaaaaaaaatgtgtattactttaatttattattttaatgataataataatttagtattagtggcaaacaagggccatcatcatttgacaactttcaattaataatattaataaatgaatgttgatgatcaacttggttaaattatttatcacattgtatattataggatatatatgtctaacaaaattattattttcatatttttattttaaattaagaaacttttgttctattcaacttaatttactagcattaaacttagccaaggtgcaagcatctattgcataatattatcttaaagtataaataataaagttttgtaattatattatatttattctatatcataattatttgtttccctatatatacatgcaccgatcattaaatatattaagcaaaacaaataaagaaatggcaaaggaggccaccaaatatttttccaatgaagaagacaataatagtgatgaatcattggaatcgatcatatctcagctacctaaagccaatagtttgtcaaaatatggtgtaaccttataccaaaattgttggttccaatccaatatgattctcaacatcatctctttccaaaaacaattcaaagccgaagatgaagatataatcgtggcttcatttcccaaatcaggcacaacttggctcatttctcttctattttccattcttaaccgcaaccaacactatgatcaacaccccttgctctccacaaaccctcacgatctcgtgccttcattagagtactcgatttattcagatcccaaattctatgacttgagtactatgtcaagccctcgtttggtctccacacatatgccctacacatctctttctgattctatcaagtatcattctaagtctcgtattgtctatattagtcgaaaccctcttgatgtcatcgtatcatattggtatttcgtaaacaatctttcagagcgtaatcacgacatcaataagtgcactattgaagattttgtggacatattttgtagtggaaagaataattttgggccttattgggatcatgttttagggttttggagagcgagtttagagaatcccgaaaaagtgttgtttttgaagtacgaggagatgaaggaggatactattggtcaagctaaaaggattgcaaagttcattggccttcctttcactcaagaggaagaaaatagtaatggagttatggaccaaatattggagatgtgtagttttaataaactaaaagatttaaatgtgaataaacaaggcaaatttaagcctcacttagataataaattcttctttagaaaaggagaaacaggtgattggatcaatcatcttagtccatctatggtggagcgtgtgagaaaaataactcaacaaaaatggagtggttctggtttaccattaatttagatttaatttcaagtttattttattattaattgtgtcttatgtattattacctgagttatgtgtgtgctttgtattatcatttatgcagtaatttgctttgtacaattacttatataatatatatagtgcttttgctttgatgtacaatgtacccaaccgtccaataaatatcactacaaaaaattgtagctaattataaattattattattgtaaataaaaggttcgttactaaaaatattagtcacaaaaannnnnnnntgttgtgactaaatatgtttttagtcacaatatacattgtgactaaaactaaattag

SEQ ID NO: 83389 - DNA, 1273 bp, Cannabis sativa
atttcttttgaaaacatggggttctatctgagcttaaattatttagaattgttcaaataggttaatgggattaagaagcttcatggaaggtatttttatatttttacatcgaacagagaactcaaatcattttttttttcttctattaagtttcaaaattgctcagaaattgaattgaaaccctattttgggccattcaaattcaattttaattgaagaaacttcagtcagaataatctgaagaaggaacatgtgtgcattatgctttataaaaggaatacagaaacatgtgtgcattatgtgtgcttagggtattcactttttatatatatcttctttggtgaataattttaatctattgacatttaattttgaaaaacattcatttgtattctattgattttgtgatttgggttttattttcatatgatagaagattttattacgattcttttcaagttagggatggtcgacattctaaattaatttcatgagtagatagatagaattccacataccagatgagattaaaactgaatttgtctttgaaggagcactaagaacaactttgccttcctccagaatgacgattcaattgcatgattcctcctccactaaataccaggtcggtcatctataagtgttttgctcttaagtttttcattactttttttttagttctttttggttctaagatggagtaaatagctaatgtatgatacttctcttggtattttagaaactaattgagtggccaaatagcagatattaagtatggaaggtaaacaaaatgcttgtgctctctgttgactttattttttatgatagatgaattcaattgatctttttattgagtattggagtctagcatatttctttattagtattttaaggaagtatatgagaaatttaagtatgtacttatgaatttttatttgtttttgttagcacatttaatttggaaatgtattatactttcaaaggcctgaaaggaggaggtttgatagagctcatctacatgtctatagtcgtatttttgtaatgaaattaagatatttgacaaggttagtttattttcactaaattttatttattacgtttcaattcttatagcatttttttttcaattttacattcacatagaccaaacataaaagatttacttttgttaaaaaatattttcacccataagaaattttactgaagggttgcttcttgaggaccgtgaccctcttacaacaccctacgtctgcttatatgcagctagctcctt

SEQ ID NO: 83390 - DNA, 795 bp, Cannabis sativa
gatatataccaaatcatgtctctcgaaattttacatatagtaaattatgtccttgaactttcatctatgttagattttttttattaaaatggacaaaaatctttatattcaacaatctccatggttcaaataacatttttaacgattttaaaaattcaaaagacatgatgtggtacgtgtgaaagttcagaagtaaaaaattagcctatttataatgagaagagttgttctatatgatacagtggctttggtgtaaaacatactagtggttataacttatatgagtaatttgcaaaacctgagtcttgttgaggaggtcaaaatagtaaatgattgtacgtgtaggaaaaaaaactgatttgtataaaaagccattgtacgaaagatcatggtcccaagtataaatcatatcagatcagttatgcaggcagataagggcaatttggtcattaagctaatataattatttttggtatatatgtataaataagtgacattccactactagttattacaaaattcagtaaaccaaggtcatgccttgcccctaaacgacagccgtacacgatcagctttattaaaagatcctaaaatttcaagatgatcaattttcatttattttttaaataaacaacagccgtactatatatatatatgatttattaatttgttcattatttttctgtccttttttttttcaatatattatttatgttctttttctttcaagatattagttttctgttaattaattatccctaataacaattttttaattctaatttatcacaacaa

SEQ ID NO: 83391 - DNA, 731 bp, Cannabis sativa
atttttgaaattaaaaatccttaataagccaaaaatatttggtgaataatcttaatacatttcttatttttacactcacataactatatataggtgtgaattttttttaactttttaaatcaaaaataaaaataaaaaatacaatttttgatttttatcttttgtttttgaaaattaaaatgtatttgataatattttttaattttaaaataaaaatacttttggtaactttattttttaatttttattgttttgttcaagtgagtagataaaaagtgaaattagaaaaagtgaagtgagataagattcaaaatcaatttatgagcccattcgtcaggcccaaacagagcaatgggcactactataaataacacttctgatgtcaaacttaaactgacacttatacatatagtatcgtaacatagaaccgacacatattctactgagacataaagtcaaagtttaaatgtcggttgtaaattgagactaatgaattttggtgtcgtcttaaaaccgacgctcaaaatgtacgtatatggttctccctttagtgttgttttagaactaaaactaattggtataagtatcggttctaaacggacactaaaaggagtatttttgaaagaaaaaaaatattaaagataggtttttgtaattccaaaattactaaatttttaaacctatcaaactcattaacatcccattaatttttataaaaccattaagaaaaa

SEQ ID NO: 83392 - DNA, 1647 bp, Cannabis sativa
ttgattttctaagtatagaaaatcaaatttcccaattaaaatcccttcagtgcaacttaaaaaaaatgaaaaaaaaacacaatataactattaaaattttactcaacgtgataatttatagtttatttgattcactaaaaaaaacaatatacaattactaagctaggacgcgagatcttctttacacagagaatgagtgaagagggtagaaaactatggttaattattcaaaattataattgtaattatcattaaatttttatccaaattattattttgttaagtatttataaaaaaacatatttcctaatttaatttctaaatttaggacaatttaatttaatttctaaataaaactttggagggggtggtgtttgcaatttactcaatttgtaaatcaaacttcaaaatttcccatttccatctcttcaaattcccgtacccttccctctctcctgttaccatttctttctcactacactcactctcgcatcgtcacacctcaaaacgatgccgcttttcctctccgacgaggagttctctcgtctccgccatgacgtcgattcggtggcggaaaaggctgactccgtcatccgtgacctacggaaagagctcgatactgtgagggctcaggctgatgcctcctccattaccgcagagcagacctgttctctcctcgagcagaaatacctatctctctcctccgacttctctcagcttcagtcccacaatgaccagctacaatcctctctcgaccaacgcctctctgaactcgcccaagtccaggcccagaagcaccagctccacttgcaagccgtaagtagattagggttttattctcttcacttattatgctatgcatgttcttatagaggtgatttggtttgtttttgggttgcagattgaaaaagatggggaaattgagaggctaaagactgatgtttcagagctgcataagtctaaaaggcagttactcgagttggtggaactaaaagattcagagattagtgagaagaacgccaacatcaagagctatcttgataagattgtaagtattttcttgggttacgtttgaggttattaacgtgtttggttttggttgagtgacgatttcttgtcttgtttgatgatcttgaaggttaatttgactgacattgcctctgaaaaggaggctcgagtaagcgaaagcgaagctgaattagcacgatcccaggcggcgtgtgcccgtttgtctcaggttaaaacatttataatttctggttacattagctcaaataactctggcgatataaactgctgcaatgatcacttggttttagctgtttttcatgcatattttcaaccatacgatcctcatttaggtttttaaccatacttcctatcaaggaattttaactggtgtgcaattggtttagttgtgaattcttgagaactagccttaatccctgttaaacttaagtagtaattgattttggaagtaatgatttgaattggattgattatttctcgttgtattagatctctacgggtgttttcgatggtgcattatcttccaagtttctgtctttggattttctaaattaggattggttagtgttacttcgaattttggattgctcaacttgatttcagtgttctatctaaaac

SEQ ID NO: 83393 - DNA, 896 bp, Cannabis sativa
  modified_base (69)..(71): a, c, t, g, unknown or other
acaaagacagtaaaaacataaaaattttaaatccctccccccaaactaaagattcacattgtccccaannngatataatattcaaggtgagaaggacttactgaacccccattagaagggatttggcggtggtgactaatcgtatggataaaagcgaggagggtatgccaagtagttggggtccttgactccagggcgccacgagtcaatcagatgattgaactgcctcacttgattttcatcaaattcactgctttgcaccatgtaactttggatatgattgttttgctggataatgtagttgagttgagcatggatatattgcatcctcgcatcaagaggagtgggaaccacttgaggcttatcttcattttgattttcttcttcagggacaggagcttctggttgttgatttcgacgaggaggtggcggttgaccatatggatgtggtggcttaaggttgcgcaccaatgtccaatcaatcttcctttgtgtgtgtacttgattatcgtaaggaaattgtggcacaccattagcgacacacaattcaattataacccctgctaggccaattccggcatgtgtagatcctgagaccatgttatcaaagctttgcagaattatacccccaactggcacagtaatccccttcataattgcataaacaaccatgagcctatccaatagaacatccgaaaaatgattactaggcataagcctagcactcacaaaaaacatccaagcacgagccacttggttcaattcacaacgatagagcaattggggttcctcatccaactcagcaatgttaaccccggaaagccaactgtttctgccaagtgcacagggtcaaaatttttgttcatgaacatttggtagtgtggttcattcgccgt

SEQ ID NO: 83394 - DNA, 550 bp, Cannabis sativa
aaaaaaaaattaccctaaagaactaaattcataaaagcatcctaaaaacataaagggtgcattaatacaaatatttttggaatggattctaaaattttgcaatatcataatatatgtatagtagtgtagtacaaatcttcaattattacaaaaacacaagggtaatatggtcatttcccctaacaagtcccaaatgagaataagggtccctccctactccctacactacactcttctctgtcactcagtttcatatttttcctattttgctaaagacaaactccattttcgtcacctttctctctctctcaaaacctaacaaaacaccccaaagatctaatctttctcacaaatctcacaaaccccatttcagattcaaggaaagtttcaatctttcgtccaaaaatgtcgaaaaaaactcactaagaaaaaaaaaaacacaaacatcaatggagtccgatcaaagagagagaccccatctcacaacaaccagtaccggcggcggcggcggaacaagcgagcttttcatctgtttcacttctcgactctc

SEQ ID NO: 83395 - DNA, 1332 bp, Cannabis sativa
gccacattttcttcaaaccgaaattgactccttcttttatttcgactgatcggggctgaaaggatggtaaaagtagctgtgatagcacgttggtctgcttgaaaaaagtcaagatgattaacttgaggtgtactgaaaaaagtttcccaatggttgttgacaaaacaccaatcaagacgctctttaatcatatgtaaggcaattcggctcttggaccaaagcacgcctgaaagcttccatttgtgattcatttcggagtgcaccacctgatttttgggagttagacaaaatttcattgaagttcccaatgactaaccatggtagaagaggatccacatccgcaaaacgttagaaacgggtccatgatgatgattggttgcaagcttcaggagcgccatagaaacatgtaaggtgaaaatatgggatgtcttccatcttcatgtaacaataaaaaaaactagtgccaaagtttaaaagagatatatccacatcatccttccaaaggagcattaggccaccactaaggcctattcaaggtgattctaaaccgttaccatagtgtaaagactgacgtacacgagtaatagagttgacaggtagtttggtttccataagaaataaaacttagggcgattgttattgaacaagcaatcgtagatgtctgaacgcactcgggttccccaaaccccgtgcattctagctcaagattttcatgatgaattgcggggtcgccttgcaacctctgcactagagtcattggagaagctggaatcctcaaagtcagaaaccaacgtctcaatatcatcctctcttgacaatggagaagatgacgaatcttgggcattacggcttcttttcagtattttcctcatggatagcaagatcattttgtcttttgaaggtggcggttggtggctgattttctttgaaagtggacaaagctgtagcagtgtatgtggggagtggagttatggactgtgtttgagaaatagaggaaagataagtgtttatggggatgggtgttaacattggaggataagtggcgaaggtgttgctatcgagggcaggcatataaatatgagtaagatcaatgacagagacttttggtgaagaaagaggttcagagttgggtttgattgctgttggggatgaggaattactggtgtgtgattgcagctccttatttttggagtttttggtctcaagaaatggaggctggctatcgagattgttgggaagagtggtagttttgttgaaaacgttgctggtgtgtttgggttgatgttggttgaacacgtttgtggttttacatgaggttgatgagtaagtgga

SEQ ID NO: 83396 - DNA, 665 bp, Cannabis sativa
ccatagagaactcggttgaaaaaacactggctactctctctctctctctctctctcaacatgctagtgggcataacctctactaataccatgaccttaaaagggatgatcgaccaacacggagtgacgctgcttatcaacaagggccacttataacttcatttagtccactattgttacagctgcaaaacttcctattacgacaactacaccttatggtatcatattgggcacaagggaaaaggtgcaaacagtgtggtcaagttgaattggatttgtgagcaattagagtggtggctaatttcataccattggatcttggaggagcatatgtgattctaggagtcaaatggctcgagactttgggtaacattcaattgaactaggataccaaggttatgaagtttgaagcaggtagaacttgggtcacttaggaaggagatttgagtctttgtaagtctcaaatttccctcaaaagcgatgattcacacagtccatcatgaaaatgagggattttgagttgaatttgatcatctaaccgtaattgaaattgagttacaagagaacattccacctgtcattgaggctctcttaaagaagtatgatcccattttttacataccctcgggattaacaccacaacgtgatacggagcacaccattgtt

SEQ ID NO: 83397 - DNA, 594 bp, Cannabis sativa
  modified_base (264)..(266): a, c, t, g, unknown or other
taaatgggttttaggttgatgagagtggaggtccttctcagctagctctcatatatatatatagattggattgtatggtaaagttggtttgaggggaatttgagatcatatatatatatatatatatatataaattaggaaatgtgtaaattgtaataggaataggaatgagaaggaaaggaagagttgagtgcttaaagtcgcttcgtccgaaattttgtatgcactgggctccactgtatacattattattattattattannnttattattattatcattattgttatattctaggatttttatttttttatttaagaaaaaaaaaaagctaattagatttttttatcttttccagattaaatgtggactagataggggtttttttttctgaaaaaaaataattttgtactgtttaataattttaaactaattgtttaggttgtattttgacccctatttatttaggttttattttgtatagtttaatgtaattttaaaccaattgtaagaagaaaaaaaaaacaaatctaatagtactagatataagaattgttaattatttatacagtttgatcaatccgaacagttta

SEQ ID NO: 83398 - DNA, 1469 bp, Cannabis sativa
cagtctggagcttgcaaatccattcaaatttccgaacgagccattggtggcaggaggaggtggcccagcagctgttgctatgttagttcccacaatctctatcttcattggcttcccatcgagttgcacattgttgtatcttttgaccgctgccacagcatctccccttcgtgagaaaactacttccgcagttccctaagaaaaagagctttttttttttctaagctacagtagcatagaatgaatcatcggaaaggatctaattatgccaaactttggtaccttcgatctaccgcttcggtcgtaatggattgaataacgtttcagatcaccaacttcagaaaaaagctcctgcacacatagtaaaactgatgcctcatgttggttagtatgttaagtccatcctccaatggctatatgcaatactatgtcactcaaaatggtttcaactttctttttcattttttttttcaaaataggtagcctaaagattttcgagagcgtgttcacttgatttaattctaagtttctaataccaaggcaagttaaaaaagattatgctaatctatttataaatgatgtgtacttatttggtacaaaatttagtgctttgtgctttcaatatatctggtaccttctatgttttgatattttgaattgtacattttggtatcttaaattcaatttaatcaataaaaaaattattaatataatcaatggtcttcaattagttgagttttaaaattaaaattaattatttaattagtttttttaaagctaattatttacttatgttagtaagagcaatttggtcaaagttaataatatttttttttgaatttaaacaaaatatgataaaatagcattattgaaaatactgataacaaacctctctatatatatatatatttatgtgggagtccaatttataaacagaagtaaattttaccctttttttttttttttaaaaaaaaaaacaatttaacatatataccaataaatgatgagccgatcatcatgcctagaaccaaaacatagttgcattttacggatgccgaatcgaagattgagggcagtagtcagaatcaagtatgacttgactaaacgcatgattagattttatgatctaatagaaataaaatatctttaactctttaccttccgaaagagaagcagagatgtgggtgttctacctgatctccctgccgttgacggtggggatagtaattttgacgcttaaatacttctatggacttgaggtacctcgctagggtttcgtcgatggacgaagaagagaagaaagaggtttgaattgaaaggggaaaagctatttttgagattaatccccgttgttttcttttaaaatggtgtgtgattctcgaatatttaatatctgttcaaatgttaataggatttgttttattattattttattaaacaaaaattaaaagttacccatgaatttctca

SEQ ID NO: 83399 - DNA, 774 bp, Cannabis sativa
ttagatgatgaagatccccctctttcacttactctagatctcttaggaccaatctctcaaaaatttctaacactcaaaaatttatgaaaatttcagcagcacttccccttaaaaattcacttcccgggtaacaacccaatcacaaatagaatagctctcaatcacaaacaactttttcaatcaatataatgagcacaatcccacaaatgacaataaaatttcaaaattctccaacaatccaaaattattcaataataattgcatagagagtctaagaaattgttacctcaatgaaatccccctctactctacctccgttgaaggaaaccttgaagttcttgaggtaaaagatgatgaatagtgattttggaaatttgggtgagattttagggatttggggttgattttgaaaggaaaagagtgtttgatgagaggaaaagtggtttagaatgatttgtgatgaaggattggggaaagatttgaagaaaaaggggtgtaggatgagattagatgaagagaagtagtttttgagagagttttcggaggtgaggttgttatggtttagaaaaggatatgcttttgaatgtgatgattgttggcctttttaaacacgtctgacacatcttgccgcggccacaagtgggctcgccgcggcgagatagtggtgaaaaacatcctctctgcccaggacttatggccgcggtgatggtgatgctcgccgcggcgagatgtccctcgaaaaatggctttttgtagtccaccttatggccgcgg

SEQ ID NO: 83400 - DNA, 766 bp, Cannabis sativa
atatatatatatatatatccacccaacccaagattcatatataataataataataataataataaatatgtgaaagtacgtactgttaataatgagcacatgcacgtacataattaggtaccatgtgggattgacaacaatctagctcagacatgatctgtgatctgctcgattctatatcttaatttatcaatgtaaactcatctcaaattaaattactaaaccaaacaactaatgctggctggcactttgttttttcacctacctgaataataatattatacatagacagaaatgatcttaagggtacttttcaccaccacaatatatatataatacttttttggtacgtagtttaagctgtttgatattgtgataaattttagaaaatagtatcaatgaccaattacaagataacctaaaggtttaggtgttagtcaccattactgtctagtaacaatatatgctctttaaaacaccaattctaaaaaatgatagctacctacccacaacatttattaattaataaatatattattacgttcgatcactttaactacaaagcccatattaaattaatataattggttaaatgcatgtatatatatatattatgttattagctgagtgattaattatagatcgattctttggttaataatatttgacattaaagaaagatatgccattgattcgatcttgatggccacggatggcgccgtatacacagtggtggtaattaatagctagctagggtttaattaat

SEQ ID NO: 83401 - DNA, 818 bp, Cannabis sativa
tattctccaaaagataggagcggaaatttattagattagactttacaattacaaccatggatttcaagcatacaaggaagacaggaatttacaaccagctccagctgaaaggaagatgaaatgcacgagacaagtgctcaaaaagttctgtaataagaaccaaccttgaaatgccttcacatttattttttatttttacttgaaagaaacaaaattataatgattgccaagtcgatacaaggagaaggtggtatgaatgacacttaaagattgtaagttaacaaattacaaaaaattattccaacccctaactaaatcagagaacaacacccccttcaactattcatcattacatttatcacatctttataataggaataactgaaatggtattgcattgcactcatattatttaaaggtattgagttaaatacattattaaaatccataaaataaaaattgaacaggaagacgcattccgaaaaagccccaatattttaagttcaatttaaggtatccctagcatctccactttataaataagaatcaatggggtaaagcaactaaacaggtaaaacaaaccgaaagtcttatcaagtgcttaagcaaaagcacggatctatctaagtctaattgtgtatttcagcagttggttctgatttacaaattactaattcatccactaagccatcatcagaattggataaggatccaacttgaacacatctacatagactgtagatcatctcatcataatttacaagagaaacatcaaactctgtactgagaacttgttaagaacaaaaaaaaaaaaaaaa

SEQ ID NO: 83402 - DNA, 515 bp, Cannabis sativa
aattaattaatcatttggttactattattattaactgccaacctcttataaatctccatcaacaatctactatccacaaattcttgattacttccacaacaaaccatagcaatttcctttcttttcgccactttcttacccgaaaaagctccggcgccgcccatatttccggccaaccgaattattaggtccacataagtctcatgaaacttggccaaaagtttcaccggagaaacaacaattttcctcagctcaaccatcaacttcctcggccgccgccgccgctgccgctgcccgcttcctcggccgccgccaagcctagtgatgagaagctttctctttgttggtttttggtggtatttcttcgtcttgaaatatttcttcaagttttcataatatgttgttggaacaatttccatttatgcccctagcttctaagagagagtttttgagttttgagttttgatgggatcatgagtgttgtgaaagggtttatatatatgtcaaatatgtgt

SEQ ID NO: 83403 - DNA, 1043 bp, Cannabis sativa
aatgtgcaaggacgagaaagtacacatcccttgtcatttagtggtccttcaaattgcagagtttataccacgtgtttatcatgattctggaatcaaccagttcttcttagtcttctgaatatatatgttatcagaggtgaacttttggcattttcaatgcaactagggaagagaagaaaaataatagaaaaatttataccatgaagctcaatgacattatttttattttttttttattatttttctggaatgtggtacttgattaataaaggtggggttttgaatagttttgttttttttttttttaatttacaaatttaaaagtaaaagtttatcttttaaaataataattttggtttttaattttaaataaaaaaaataaaaatattttttgtaactgtttttttatttcaaaaataaaaattatgaacaaaaagataaaaaaatattgactatcatttatttttattttaaatatgtataacaaaatagtgagagaaaatattaaataaaaaatattcattagtatctttaaataattttaagtaatttaaaatttgagtatacattattaatttattttgtaagataacataaaactcacaaagtcacacataatacaataaaaaaacttttctaaaattttcatatgtagttgagatggagtgctaaaatcattcaccaactacacgatatcgttcattatgtctaatcacaaataagaacatagaaacgtgttcctcatcgatagcgagaattcttcaataattttttttttcttttagaacaatactaaatagcttgaagaagtccttatccattttgaataaaatcgtaacacaccctactctcataaccagagaagtttttcatgacatattcatgacctaaaagtgccgaattaagaatccttagtcagatataattgatattacactctatacaagcaaacaatactaataaatctcataattcatcatatgaatcgttaagaagtagattaattttgttgagcaatgcaacatttagagatattattttat

SEQ ID NO: 83404 - DNA, 1368 bp, Cannabis sativa
ttgcgtcaacaactcgcatctttatctcggcaagagaagaaattaaaattgccagttaagaaacattcattaaggatccaatctcccacaataaagaataactttgttgctctgcaaaagaagatatgcaagcatgccagattcaagcgaaaagtgactactatctatagtagatacaaatatgatttaacaaagaaaattactttgatcctagaaatagtaatatttttcgcaaaatctatgaaattggagaagattctacgtcacacccaattgcttcaatcaaatagtattattaacattatcaatacaacaacttttattcatatataacaatcaaaatatttcattatagtagtaacataacaatgtgtttctactatgttttagttgccaatctttacaatcaaataaaggaattaatacccacacttcatcaagtgccgaaaagtaccttcttccaataggtatattcacatcaaaatttgttattgttcgttaatgttcatctttctaaatttacaactactaatttattttataatttttaaataacaataaatgtccaacagataatacagaagatagtggagaagtaaaaacacattgcccctctgtcaatgaaaacatacaaagctccataagtatttcattaaatagttttaacccaaaaataggtattttatgtgaaactacatgtttccacaattatgaaactaatataactatgaaggcttatttaacaatttaaatatctataaaataggtagtattccttataattatgattacgaaattgatagaattaacaactatgtccttcaaaatatccaaagccatgagaatcacggtattgtaatgattttattaaattacaatattcactttataaaattcaatattttatttctaataatagttgtatttattctttaaacatctaattggacaacaacatggaattttggacctcctactcacacatgcaaatattgtgatgccattctatggtatgaagaacgaactaagaaatttcaaaagatttgaaatccccaattctcattatgttgtatggaaggatgcgtacaaataccattgttgaaagaagcacccccttttctcaaatatgtccttcaagacgactctggacaaaaaagagtcaaattcaggaaaaacataaggatttacaactcgatgtttgcattcacatcaatgggaggccgaattggtaggtcaatcaatcaatcaaaatgcccttatgttttttggatgaacgaccaaaattatcatcacattggttcattatttccagaagaagggaaaagaccacaatttgctcagctttatatatgatactgacaatgagat

SEQ ID NO: 83405 - DNA, 550 bp, Cannabis sativa
gtgcaaagctttcacctttaaatatggtcgcgtaacactccttttgcgtataggaaactaaggccgggtcaagtggacttctatatatcctatagtcttgacttattcccagtactatgaggcttttccgtgataagatcgtagtggaagattttaattaggggaattatgaggctaattcctttctttaaattccacgtgccacatgctcagaaacatggataacatttatccccaaccttttgggactctctgagatccgagagcttgcattattcttccatttcctagggataagtttctgacatgcggtaaccgttgggatcgcaaatggatctcgtgagttgtcaccaagtagatggccataaagtgaaggtaccacaggttgggcatgcatgtggtgcctttaatgtaattgctgacaacacgcgcacattggaggaatgtttcttaggaggaatggcaatgatggaagaacgattaaaatgatccctcctttaatgcgtacagtactcaaggtgtgcgatgatgaataataaacgccagggtg

SEQ ID NO: 83406 - DNA, 551 bp, Cannabis sativa
ttttatggacctttattttatttatatttttgcggattttttttacacgttttcacttattttttttccagaaaaaaatattactataagatctttggcgcaaaaaggagttgatctgtatcatcttgacttgtatctgaatttctttatttttttaagaatactgagtcgggctcttctcctactcgtatcgaatagaaccctgtagcagcaatgttaaaacaacattgttcttaaataatagaaaactaatacttcgtattgttgttaaaaaaaatcacgttgctttcccatagtagcaatgtcaaaacaatggtttttcgaaaacaacactcagtatttttgtaaaaatttaataaaatccttaaaaatatatataaaaaatagtacatccgtgaaaatgtaaaatttttgccatttctataaatgaaataatccattttaatagggccaagatgcaaaatggcccgaaatctaacaattaagttaataaatgtccctttttaaaaaaaaattaacaaaatgtccttttagttaaaaatttgatgata

SEQ ID NO: 83407 - DNA, 1102 bp, Cannabis sativa
tgaaaaaatggtctcaatcaaatcgaataaactaaaaattaaaatccaaaagtttttataaaaaattcaaaccgtcccataaatgtattaagagaggttaaatattaatctaacccactcaaataatcccaataaactcaataaatagatttacatagtttttaataaaattatccataatattatatataaattatgtttaataattaaagtattttactttaaaagtttgtattttatagtatttaatttgaaatttagaatttataattgataattttagttgtatttaaatattgaagttaaaatttaaaatttatgagtatattctttttattctattttctgaaaaatattgtttaatactttaatgtttattcaatttatatttgtttttttaatattaatttaaactataactattttaatcttgaaaggcttttactatatatttatttttttttcgaatcaattatttaaataccaaaagctaacaataataataaaaaaaaattaaagtcagtttaaacaggttgacccaactaaaccgacaaaaatcattggacgaattactttttttattttttattggacaattacgattaaatagttgtaacctatttatattagattgataaatgaccctaaatttggaaactaagttagtaaatgttctatttttaaaaaaattaagaaaatggccaaatataataaattagctaataagaattataaaaatacatttatcacatatttttttacaaaaatatatataataataaaattaagttatataatttttttagtattacatattattatattttaacagaaaagaataaatatattagatcattaaatatatacaacaatatttgatatatcgtagtactgaaaattaatataccgtagtaataaaattatatactgatagacctccaataacttttgtttatgcccgtaggagcaggggaattaagaaaggggaggttccaggggattaatgttgtgctggcagtttatttgctgagtggattttattatgttattaagaataaaggttaggggagagagtattgttgagtcaggaagattttaaaca

SEQ ID NO: 83408 - DNA, 3803 bp, Cannabis sativa
ttctttccacacattagcaatgtagaactctctctaacatcattcaattttcattttaggaaataatccataataacgaataatgttttattaattgctaattcatcattcattgatttattttaagtattttgaatttttttgagtaattattttcaaaaaatataatagctgatgaattaaataaataggtaaattaatgatatataagattatttataatgaaagatgttaaaattgagccatatttgacacaaaaaaattaataaataatatattttgctcaatttttacatttatactccaatacataaatataaaattaaatctgccattaatgacttaatgttctttcaatattcttcttcctaacaattaagcccaacatttttccaaaaaaaaaaaaatatttaagcccaacaaatttccatactgaactaaaactgcttactcagaaattcacattaaaagatgtgaagaaagctgtctttagcatccctagaaacaagtcccccggacctgatgggttctcgagtagcttctttcaagacaattgggagtacatagagggtgatatcagtgcggctgtgctatcatttttggaatctggtaacattcttgaagagattaattcaactataattaccttggttccaaagtgtaaatgccctaactctgttaaggattttagaccaattgcttgttgcaattttatctccaagattacagctaagcttttgagttctagaatcagtaacatccgtcctgatataatatctcattcccaagaaggttttaaaaaaggaaggtttatggggatataatatcatgatctgttaggatttggtaagacactatggaagaaaagaaaacaagccaagttgtatgatcaagcttgatctccaaaagacatatgacactattgaatgggaatttattgaggaggttttaacaggtctgaatttcccttgaagctttatccatctggttatgaacaacatctctactcctaagttctctctaatgttcaatggaaccttacatggtttctttgaatccaagagaggacttagacaaggggaccccatgtcccctctgctgtttgtactaggtatggaatatatgtctcgattaatggagaagattggtgacaagaatgatttctatttccatgacagatgtgctggtctcaaattaaatcatctagcttttgctgatgatgttctacttttttgtcatggagatttcaaaagtgcagagtatatgttataggctttgaagcaattctctctcaaatctggcttacatcctaatgcaagtaaaactgcaatttattgcagcaatatggctcaaggatgtgtaaacaagatattccagctctcggggttcatgagacaggatcttcctttcacatatttagggaatcccagtttgtgcaaagaagatatctgggaaagaatgtgaattgctagctgaaaaaatgatagcaagaattaaaagctggagttcaaggaatctatcttttgctggtcgaatcacactgatcaactcagttcttatagctatccaagcttattggagtcaaatagtgattatgccaaaaaagattctgaagtctattgaagctctctgtagagcattcctttggaaaggacaagccttatttcatggtgcaggggcagtctctttgggatatggtttgtcaaccaaaagctgcagggggcttaaggatcaagaagcttgaagattggaacaaggcagccatgagtaagtatgtgtgggctatttcaaatcaccaagagagtctttggcctagatgggttcatagtgtctacatcaaagagcaaaattggtggagttacaatgcttatatccatgcaagtttgtattggaagaagcttatatctatcaagaaccaaatcaccactatgtctgattgtgattcatttcagagagagaagtatactatagcaatcagctataagttgttcaattcttcccaaacaaaactgaattggtgtacagaggtatgggctcggctgaacacaccaaagcacagtgtgatattatggcttgcaatgctcaataggttgaaaacaaaagatcggctgaagaggtatggaatcctggtgcaagatcactgcagcctatgtgattcacatatcaaaaatgggcagcatttgttctttgaatgctgtgttactggttattgcttggagagaatcaaaatgtggcttgaatggaaagcaaaggccatatctcttcctcatcttgtttggtggataggcagggcaaagatctcaaagttcaaaaaactggttttttcaagtgtgttgtagcgttggtgtgccatgtttggcgagcaagaaatgaggtaatttggcaagggaaaccggtgaataagtgcctggtagttgaagacatcaaatggaacttgaagaaccggatcaacatgtttttaccaaagaaaatccaaagtgtagataaggattggttttatgctttatggatgaattgtaaaaatgaaaaaaagttgaatagaggaagaaaaaagaaatacattgtatagatttttaggccattgtatgggtgctattaggatgtaaatatgtttgtgcaatacaactcactgatatgattatatatatatagatattttatatgtacaataaaagaatgaatttcattgttatacgtattttatattgatctgtctctatatatgaggattattttagaaaatatcttaacaaaattttagtttgattagagaattaattactttcaaaatatattttatatattatatctaaacatatattaataaagtgtacaaattattagaagcatatatataattaatcattttttttaaacaatatcattaattatttttaaaataagagggctttcataaaattaaagtttaaatatatataatttatatatatatgtaatttttatttttaaatatatataataaaattaatttttttatataaaatatctccataaattttatttttaaatatctatactaatattataaaattaataaaaaatattctattaattaattgagatattctgttaaagttaacgttaaaagtaaaaaaaaaaatatcgttaaatcaagaattttgttatataaccacattttatataaaatagtgttatacccgaaatttggctatactttagaaaatgacacgtgtcatacagtagaatatgaaccacttgatataataaaattatatcatataatgcaaagaaaattattagtcttaagcgagacaaggatacaaaactattaaaatctatattgacgagacacatgcctacctcggagtacatagtttcaagaagataatccatttattttgaaggaatgtatgcagttatgcaaagcaaccttgaattatgtatagcgagaccattcacctcgctattcataagaaacttgacgaggcgaatcatttgttaacacttagtgttttttctacattgtagtagctaaggataacaacttgaaaatatgcaagatatgattgtccaaatcagatgcatcgacgagttaagcgagatgctattgtccaaataagcattgaccatctttaaagataagaataacaagcagttaagcggttatctaggattatctaacatatgatttaaatgaaacgtgatcaattcccacatttcatcaacagttgtattctcaatttaaatgtaaataactgtcaacctatattcctataaatatagacagattccacagaaaaagagacagagaattttttaga

SEQ ID NO: 83409 - DNA, 884 bp, Cannabis sativa
aaaattttgataaaaaattattaattaaacacttattactaattagtactcttcttttctgccaaatataaatgaaaatttaaacaaaatacttaaaatttgattattttttttttcttattttacatttttacaaattctagttttaacaggtttttcacttatattttttttcgaaaaaagaaaagtcatttgctatagtaaagttctatttgtctcattttgaggtgtgtaaaacctcaaagtgatgtgaggatttacataacaccccatacaaattgggtttaaaaccagaacgttattaggttattagaccactacagacaatgtcattgttattaaggaaaattcaaagattaaaccaaagaaactaaacattacaaccagaaaaatcatatatatcgaatcaactctgttttgctctgctcttgaaaatccaaaacagtagcagaacaactctctctttaattgcaaagcaagagattcaacttccagtgcagatgaagattgagctaagcaactgtaattttacaggtccctaaataaattcaccagttgtgaaaaagagtaattaatgtaagtaaactcgaacaagtcttctcgggtgatgaaagagtttgtttctactgatcacgttgtaataatagcaaattgaacagcttaaacagtcacattggctggccttgattgacctcatggtttcttagttgttaattatgatgctgatttttctgagcagaaaatgttttctactgcttaaatgatacttcagagtgcccatttattgattcattattagtattaaaatggtgaaaagaagtgcaatgtggtcattttcagaaatattaagtaaacaaaagaaaggtaaaagaaacagagaacat

SEQ ID NO: 83410 - DNA, 668 bp, Cannabis sativa
tgagataggctataagttcttaaatcataactacttgttatctatattaggactaatcaaaacaatacaaaaacactattttttttaaaaaaaaaactacagattaaatgaagaaaaaattccttagaacgaaaaataaagctacattcaatcaacattagagagcactgtatatcaaaaacatataacattccaaaatttcttttaaagagcaaaaattagagcatactgcttagtgcgtctacggctgaattgttcagtttgtgatcagaatttttattttctgaggatccaaacagaaatagaggaaagtggaaaggatcgtaccgattacgttgtggagagcacagggagggagcaggagacgatgcggaagagtgtgatggcaaaggagagttttagggtttttgagaaatggttgtgtgggccgacccagtacagagaccactggcccaggtttcataaagacctcaatagtacatatgttttctctcttggcccagaaaactaaataagaattaagaaagcaaaaaaaaaaagagttttgaaatttacactaaattttgatgggataattacatgaaaactacataaaagtaacaggaaaatatttttacagtttaaagatttttttttatatatttttacagttttttatagaaacaaca

SEQ ID NO: 83411 - DNA, 1210 bp, Cannabis sativa
tttttttttttgcatgttttgatatttctatcttgtacgtgtacgtaaatatatcgttgaccgctgtgtgaaatgtgaataagaaacaaaaccaaataatgtgttaaaaggtgtgccctcatcctaacctaacttattctgaattttatttgcacgacacaaaataattaatacacaaaagttaagcttaaaataatttatttttttttttgagaaatttacaccgaaatttttttatgttttaatttttatatatttaactttttttattttttttggcaaaatctctttatgtttatttttctttgtaaatttgacacgccaattaaatattaccgttaaatatcaactagatgactactgtatacacctgtgtatatataaaatctcaaagtcgatatagtagtaatccacttggtatttaatcgtaatatctaactaaaactttaaatttacaaaaaaaagtaaacttaaagagattttgctataaaaaaagagttaaatgtataaaaatgaaaacataaggaagttttaccgtaaatttctcttttcttatgaagaaaaaaaatttcattaatcaacaacacaaatatacaaaaatatagatcctcacaaaactcttctcatcttctttcaatttcttttgagtaaaaatactaattttatttactatatcccttttatcatatctacaattgcatttattctatgagagtatttgttataaaaacaaatatttctatgttaagccaaatatgtatagtaaattgtagtagaaaaagttgctgccacaatcacagccttaactctccctgttcatatcttcaatccaacaactccaatctctaaaccttaaggaccaattgttaattgttggttagttatggttggttgagtttgttagttaataaaaggctgttagttgttactggtgtattgatttgtctgttactggttttgttctggttttttagtcatttgcttcagttgtatataagctcagttgagcttaattgtatgttttgagattcaatcaataaagatttcgttctccactcctaaagctaaaatggtatcagagccaagaaactcttaagctcttcctctgttcttctctgttcttctcttcttctcttcccatctctgcatctgttgtgtcccagctgccatggcaagaggaggaggagctcagactcgaaatgcttccagt

SEQ ID NO: 83412 - DNA, 960 bp, Cannabis sativa
atgttcatttggctagaagccaaaatagatgactaatgtcatcctgtttatttatctgactataaatattatttttatatttgaattaatttatttatgttgggttaggattctcaacctgcaatacacacaaaattagtagcaatctaattcgaaaataacacaaaccaaaaggtagaacacaaacaagaagaagatttaggttcagtatttagtaataatgtgctatagaaaagattggagaattagagtactgaacggaaggagatattatattctgctacaattaatatgatgtttattaaatattatatgtgtttatttatagttttaggtttattcaaatttaggttgttagattatagatttataatcaacatgcgtgttagtaaattaagattctcttaaaataagttctcaaaaatgtttcatgtcaaagtcatcctatcagcatgtcatctacataaatcaaaagatatatgtagcttttttcttcgggcaccttgtagtaaagacaactatcaaatttaaatttgtgaataaattcatcaaatttgaagtactattgtcttagacactattttagaccataaagagacttcttgagtgaacacacttgttcttcttcaccacgctgaacaaaaccttcacgttaatacatgaatatatcttcatctaagttgtcatgtaaaaaagttatatttatgctaacccaaattttgccaacctgacgtggcatgtccacgtaagccaaagatagagtactttacaaggacatgcaaggtctctatacaggtagaatacacccttgccagtagcatgacagggcctctatacaaggtacgacaaaaccacaacaactgaaaggagtgaagcgagctctcaagaggatgtacctacatccctggccggccaagagaagcctataggttggccaggatgagttgataggccggccag

SEQ ID NO: 83413 - DNA, 962 bp, Cannabis sativa
agtaaaaaagttgtttttgccgtgtcccagtatttttgtaaagttttggtcaaaaaacagtatatatgtaaatttccctaaaaaaaatcaatcgaaagtgactattaggctgcctataagttcgggctggaagcccctcctcaggatgaatgacaaagtgacaaatatatagctactaaattagattggtgggcctagatagcttatagatttgggctttttgagtttcttaacaacacttcttcatactcttgtggcttagcttctattgttttttcttttttttttcttaagatgagtgatagttaaaaactcttagtcaacctttacctaaagtcatattgttataaattctacccgacagagtgtttgatatttcaatttactatgtttgtttaaaaaaattaaatctattttcgacatagtaaattatttgtatttttaaaaattacaaaaataataatgtaactataatgaaaattgaaataaaatattccaacattttcaaggaagagagttgtaataaaagattgacggcatttttttaagtaaaaagtcacaaagtaagaaaattcacacatttctcaaaatatattttaaacagaaaaccaggttaatttataatatgtagaattctaaggaagcttcatttactaaggagtaatgatatgtaacaagtcacttccattaatattttaagtgtgtgtcacatgtatcattactgtttagttcttaaatcataaaattcaatttagaggtggtgaacttgagttcatgttatctaaattaaatcccaattactcttactgttaatttttcttaggattccacgctttattgttgtaggttttgtcccgatgagctaatgccaaatcatcattctattcaactattgacattggttagttaagttagttatctagcttgacacctaagctctacctacttgattcaaccaatgc

SEQ ID NO: 83414 - DNA, 700 bp, Cannabis sativa
tttgtaagaaacccagataaacaacatccaagattgtcatgttacttatcccaattgtaataggatgaacagatcttgaggtaacatttaaactcccataaaagtaggctatctatcgatgcaagccataaaatatgattcatcattcattgccaatgtgtttttacatcaaagtgatagatagcaaagccccccattgagatgtctcgcagaaaataattaataccaaaagcacagaataagtacattgcagttgatgaagcataatctatgaacaaagttccacaacgcaaaagggtgtcagctgaattttcataaacctacaaaagtcaattgaaaacttggaaccagcgggatcatatcatcctcctcgcaagtgagcacccaattcgccaaattgatcatcagcctctactgtatcatctgagaggcgtactgcgtcaagcttttgtttcaggatttcaatggcatgaatcacaagctgagaagctttaactgcaccggttgtctcgacagtgaaaatgaagctatcttctttggccgtgatatcaacaagcccaggtttccccatagcttcagcttttttgatcacttcatcgtcgtaagtgtatgcctcagcatcgtacaaacacacctaaaaggataattcaacaaccaatttaattgctttactaataaataatgaaaaagttatatggct

SEQ ID NO: 83415 - DNA, 836 bp, Cannabis sativa
ccgccgtctttaatggcttctccggacaacgcttctaccactaatgttcagaccgatatactagcttctgctactacgaatacccacccatcacaatggaatcctttctccaattccctccctgcttctctcacccttaagcttgaccataccaactttcttgcctagaaatctcaggttgtgcccaccgtaatcggtcatgaactagacgatattctgtttgccggtgttccccctccgtagaatcttgttacgggtgccccaaacccagcgcatcagcaatggaaacgtcgtgatcaacttctcctctcctggcttcgtgcctccatgaccaaaggggttcttggatccattgctcaatttaccagttcctattccgtttggcgtgcattaaaacaatgattctctagtcaatcaagggcacgattgctacaactcaaaggtcagttctctaacattcgaaagggttctttatcaatatctgactattttgacaaagtgcagtccattactgatccccttggagttgctggttcatctcttgatgaacaagatattatcttgaaaattctcaatggcctgggtcctgattacgattcagtggtatctggaatcacctcaagaagtgatcaactctatcttgaggaagttcaagctttgcttcttgctcatgagagcagacttgaacaccacaactccatcacagatctaactcttaagatgcaagccaatcttgcatacaacaactctcaatctggctcctcaaaaccttatcaacctcctggccgtaactccaatattgattctcagactcgccctcaaggtcgtggtaatgg

SEQ ID NO: 83416 - DNA, 655 bp, Cannabis sativa
gttttaactttaaatcgatgcttacgggtggaaaatccattttgcaccgatgccagaaaaaaaaactttcaaatctagccacgaattacttcgagctagatatgagatctgcaaaataatatatatatattatcaaatctagaattaataatataaatgatcagattcaaaaaaaaacaaaaaaacaaaatatattatcaaataataatacaatataatgaaatgatcaatcaaatcaaaacttaatgaagatcaccgtcgataccccacatcatcaactgatgccattgagatgcaaagaaacgaaatgaaagaaaaaacaagaatgaaacgaaaaaaatacatcgatctcaaatcacaaatccatttcccacgcaaaaaacttgcaaaaattgaaatactaataacaaaatagagagaaatagaaaagaatgatgagtgtgtgagagaatttgttgcatcatcgtttggagcgagaacgagagaaagagagagagatagtgagaatctgcttggggtggtgcggtcttggccgaagctcctccaacatggtggagcaggagtggggcacaactggaacgaaatagagacagagaaagacggatggagatcagttagagagagagaagaggggattggctgacaatgtttaggg

SEQ ID NO: 83417 - DNA, 672 bp, Cannabis sativa
cacacttctgcttcacctagactttacacacacagatgccactacaagaaaaggtacttttactggcgcatttggtcaaatgcgccggtaaaagctgacgggataaatgaaatgctgaatttctactttgattcagccataacttattgcaccggcaaaagttgttaatactggcatattattaaatatgcgccggtgaaagatcaaaaatgaactgccaaaaggcgcgagaatgtttccacatccctttagcttttgccggtgcaataggtgcgctggtaaaactattcgcgccaatgtgagaaaaagcgcaaaccttttaccggcacattaatacgctggaaaaaatatatcaaaccaggttcaaagtgaatttaggtatctgtttatacctgcatttaagttgcgccgacgcttgttttaccggtgcatttcacctgtgcgccggtaaaaactctattaccaaccaagatttgctaacatcttttgccggcgtataattgcgtcggcaaagctttgtcggcgcatttagtttacttttgccggcgtatttttgcactggcaaaagtaaattttcttgtagtatgctaagggtgcgtttgggatagcttttaagaaagctagaagcacttttttaaaaaactatcattcaaaatgtgtttggtaaaatta

SEQ ID NO: 83418 - DNA, 544 bp, Cannabis sativa
ggtgtaaggacccaatggaggcttgaagcgaggacgttagtattaaaacaatatattaccaaagatttcttacaatcctcctccacatttaagcaatggagtaaagctataacctcatcaagaattgatgaaactattttatgattacttgcattagaagcaaatatgttcaagcgtaagtaatccataaacaagttggagatttgagtaccaatctttccaaagcaaatgtagaaagatttgaaaaaaagtacaatattattatgagctttttgtcatctttctcatcaaatcgttaaaattaaaacatcatttttttcttggattctaaatgaaaaacttcaatcatcatacaaggaattaaatcttcatcgatttcatcattcatgattacctgcattagaatcaagatgatcaagtagaagtaatcaataaacaccattttgtacaagttcatcttgttctcattcttgttcttgttcttcttcttcttcttactcagatgatgaggttttggttagtgatcttccaattcttgatgagt

SEQ ID NO: 83419 - DNA, 948 bp, Cannabis sativa
ggaaattcttctaaaaatataacttagtcaaaaattaaatttagatatttatctgtaattaataattaaaattaaatatttatggaacaaattaatttgttaagttagtagggattccaatattctaaatagtataattgtaattaagagaattgttaataggaactaatttagcatatttctttttatgaataaggaagtatatagtgactaaaataacttgtttttacaatctactagcactccaaaagggccttaacatttttctttttttggttgagaaaaaattactgtttataaaaaaaattatgagtgttgttattgaatattagtggtgcctaacaccttctatacgtgttatcttacaattagttaacgatactctttaaaaattattacattaaattatatgaaactcaatatttaattgtaccaataaaaatattagcatgtaagagagtactaagcattattggtactttttaacatttctcttaatataatgtgagatcatagtagacaactttaacattgtcaacttttttaataagaaaatgaatcaaattttatatggataaaagaaaataaaaaggtaataaaatgctctaatatctattattgatgctagaattatcttttattaagttatgtttatgtgtaattataataagagaatagcaaaaattatatatttaaaatgataatagctttaaatagaatagagcataaatgacaaattcataatagagataagtaaccaatttttctaatttgctatttttggttacatgatagatacactatgacttatatcatattgtcccttggttggatcatcctttgagggttctcatctttgttaagccgccacggcaaaataacttttagaaatcctttacaaaaacttgatcaaatcataaaaatgctagcaatgactattttgaagag

SEQ ID NO: 83420 - DNA, 992 bp, Cannabis sativa
ccacatggatgtatttttgggctcgctcatagaagttttctatggcatacaactccctcttgaccatgttattccatatttttctcttggggtggacccctgtaactttggtaatcttatgctcatctttggtcagcttgcccaccttggcggcttttgtgttgaagcgttgaatgtaatttttcaaactttatttctttcgctattttacattttccaggcttgttccgtgaatgatgtaatcacgagaggtgtgatgttgagctgaaaattcatcagtgaatttaaatatttatgtgagtcatgggatccttgtactgtcatatttatgtgagtcagacatctcgcctgatatatttccttgtcatggactaagtaaaccatgtctatggtagtcagatcgtttgagcgtcaacgggactagggagataatggaaagaactatgaattatcaaacgatcgaggtcccaataaagggtcgccgttggtgtgtccccaacacgaagagttcgtgtaggaggagacctcgcaggaggtcctcatagggaggggtccccgcaggtccttcctcgcagggtcctcctcgtggtccctgagactcttcgtcctcctccgagttcatcttgatccctgctttttaaattttgatgagtaacagagaatttctcttgcacaaattcttctgttaacactacgtatataaataaaatattaaataataataagaaaagatacaaaataatacttttttcaaaaggaaaaaatagtgtttagtggaagaaagtcttattttaagtacgagatttagggattaatttccaatctcaacttttttctttatttttttaaaaatatttgatacgtaactatagaagattgaatctccgatcatgattttcctacccccaaagggaagggtccttccctttttggccagttgtgggcgaggagggattcgaacccccgacaccgtggttcgtagccacgtgctc

SEQ ID NO: 83421 - DNA, 688 bp, Cannabis sativa
attttttcatgtgttgattttgaaaagaatgttgagggaggcttcattatagagtgtgtatcttgctgtagctatattcctaatttgtgcggtaacgattaggtggttgttatgcgagaaactgtcttgggtaggatctcctttttgagaaagagatcgtgggctctccaagctttggttgcttagagcctcgttctttgcctactaggaagtcgcttttgggctcgtgacggagttttcgagcataggctctctgcctttgtgtcttgcctacaatatggggtccgacaatgacggcccctaagtgtctagccatcagaggtttgggtagaattggtggtacttgcctatacgcttggccaaagatggacgccaacattcaatgatggaggctaacccttggagatggaggccaaacctcaaagatggaagcagaccttctgagatggaggtcatccttcagaggtggaggctagcattcggaggtggaggccaagcttcggacgcagagaccacccttcagagatggaggctagccttcagactgcatgttactgagttttcctactggtatgtctaggcatgctgtgctttgggagttttgatagaagagtgaagcatacacacatttcctccttcttccttagacttcatggcataaaaaaatcgttgaatttccctctttttc

SEQ ID NO: 83422 - DNA, 874 bp, Cannabis sativa
tagctcctctaccctttagggaccgatctaccaatcgaattcctcttttctccatgaggaggaccaatctggcactgttggcctttatatttttgcccgaacccccataaagcaatgctgagttattcactcaccccaatgtcaccattcctctataagcccacttaaacaattcatcttttactgctttgatgattgtgccctcgggagggtccatctcatgctctgcatcccttagacaacattccactcttagctctagaagctcaacatccccacaaccagcggaatgaatgttccctcgatgactaccagtcctaacctggctctcccaccaactaccaacttcactctggctgatgtttcaaaccccttgtctttgttgttggcagtgttaaaggcttaccaaaacgctcgtagactagacgaagtttgcagactaccacagttaggttcaagaggcagctggaaaatgctggcaatgagcaacaagagatgctgcagaggtcgaaacccctaccacagcaggacattgtggtagtggccactactacaaaatgtacaatttgcgttggtcaacgtgtcacaccaaaatggttgaccgaggtaaaaataggcatagattttatgcttcagtggataatcgaagctaaaagaaaacaattagcgttagctactacaatgatgctaaaagaggaactgaagaaaaaagtgaaaaaaaatcaaaaattgtcttttacattttgctttggtggaaaaaagatgcaattttttttagcttcagttgtaaaatagaggttaaaaagtttgcgactattttcactgaagcaaaatgatttaatgtttgtgtatgggcttcgggcccaattaaaaa

SEQ ID NO: 83423 - DNA, 1576 bp, Cannabis sativa
aattagacaaaagtccttaattttaacaatcttaatagttcaaggagaatttttaacggccaaaaaagttaagtagacctgatttaggacatgtcaaagttcaggagaaaaactgctaattagcctaaaaaaaataaaaaaaataattttttttttgtggaaaaatgaaatatttttctcaaacaaaaattttacaaaatagagtaatttaaggcataaataactaattttaactatcggttgcaaataaatacctaagtttaattattaacaatattaatacttaagttatatttttagaactttcgtaggtactactttacacttaacgaccacttacctacataagttttacaaatataagtattattatcgttaaaaattaaatataaatatatatctttaacagaaaattaaacttaattatttataccacaaattactttacgttatattaatatcggtaaaattttgcttccctgtaaccccggccttgtctgttaacttatattattcctcactaagatacaaacaaattcatttagaaaagtaaacaaaaaatacaaacataattgtttagtataagccataagggccttccaataaccagtttacttgtataaaaatgtaattatttaatgtaaataattttttttcattaaaattaatgatatcttaaaaattaaaattatattttagaaaagaacataactcagtattttaaaaaaataaattatatttacaccctcaaatattcaattacatatttaatttattgtaaaatgatcaaaataaatatctttatttttttttgtttttttaaataagtacaccctcacaacaacttattaaaaatcaatttgttaattcttttaaaaaacaaactattcgttcaaaatttgaaaattctaaaatcattcataacaaaattttgatattttatcactgaggaatcaatacaaaaataaattcattatatgtataatcttcaaacagtagagattttatttttgtttgagctttattctgtgatactgaatggatatgcatgcctttattttatagatggttgagacactcgatttggtgaacgcagaaaacttaaagtgtgctgtgaagtcctcccgttctttgagggtaaaaaaagaaaatcataaatgagaagttttggagtgtactaaataatactcttaggaggtgccgccaccaattatggagtgccgtgtcgttaatcatgtgtgattttaatcactgcgtcaaaaaaataaaataaaataatactcttaggactcatttggtacgtaggactgaattagattagaaagactaatttgtccaatccagtgtttgggcatgttaaaagtctggataactaattcaactaatctcatctgggattatttatgtcatccagtagggtgagataaataatctcatgcaggtgagatttttttatcgtttttttaattttaattttattaatatattttaaatttaataagaatttgaatgaaagaattattattaatttatttataaattttttttattgaaaacttattcattaaaattagta

SEQ ID NO: 83424 - DNA, 824 bp, Cannabis sativa
tatttatttattattattatttctttggaaaataattagctaactttattaaaaatatatattttcgaaaaatggtattatattagtctggccagaaggttaacttttcgaagtcctcagttttctttagtgttaatacccaagcttctgtccgtacttttatttgccaaagtatggggattcaagaagctggtgaaaacagttcatacttgggactgccatgtataattggaagaaataaaaatgatgtatttggttttctaaaggacaaggctagcaagcgaataatgagttgggaagggaggtttttgtcaaaggcaagtaaagagttgcttctcaaaacggttgcgcaggctcttcccaatcatgccatgtcagtcttcttactgccacttaaaacttgtaaatcccttgagagcatcatgagtaagtattggtgtcagtcttctaagcaaagtaggcgggtgtcttggatgagttggaacaaattatgcaggcacaaacataaagggggactcggctttaaagacttgagacaacataacattgctttattgggtaaacaagcttggagattgttggtgcatgattcaacattggtgagtaaggtgtttaaagctagatattttcctaatgggtcattcctatctgctagcttgggaaacaatcccagttacgtttggagaagcattttcgaagccaaggatcttattatggctggggcaaggaggagtatagcaagtggcattcaaactttgatacttggagacccttggctccctgatgtggaggatccgtacgtgcattctatacatccggggctg

SEQ ID NO: 83425 - DNA, 654 bp, Cannabis sativa
  modified_base (613)..(618): a, c, t, g, unknown or other
aattaaatgatgtgtcatcattatattggttagacataatatgggatacaatatttggataggggatcttgattcatatcacaatacataatatagccaaattcattaattgatcatcaaacctaaggcagcacatatatactctaacatccttattaattacatgcacggtgtgtatccgttcatactcaaaatgcagtacgtaccaatagccaatacatctttacaatatgtacaactctacttactatatcactatgcatgtgtcatcaatattcacgtaaaccgaaatttacaaggggtcaatacatgtaaaattatttaaaattattttaattattttttacatataattttaaaaatatttgggaggagagggtatggcaccctccggctagctctgtcactgcgttcaaatacctagctaggacatggttaaacaacaatacacaagctattgacatatcataatttctcaactcggttcaccacaacccataatataacaagtactattcatataattcaaacacaatggacaaggagtactgagatcaactatttttcttagggtataaatggcggcaaaacccttaggtggcgtttggttggnnnnnntgaaatggaatggaatagaaaggaaacaattttcat

SEQ ID NO: 83426 - DNA, 852 bp, Cannabis sativa
ttttttttataaaaagcggtaaaaaaaacttttaatataaaaattttataaaaaattattattttttaattaaaattgtaaatattaaaaaaaatcccattaatatcctaaaaaattgaaaatagtaaacgaataaggcaaaaaatggccttaacccctaaaagggaaagaaaaagaaaaaaaatggatgttatgttgtcaatatccattccaatcgaagatatcaagatatttatcttccaatccaattataaagcttagcatatactatactaggcctcatcctctatactctatagtctaatcaaacaaaaatcccacttacttttaatcacacaaaacataataaaaaataaaaagaagatataagaagagagtagaagaaagaaagaaaagaaaagaatgcccaatctctttcataaaaataaaaataaaaaaataaatgtgatggtgtataatgattttaagtgagaaaatataataattaatattgaaaatagtgaggatattaaatgaaacacgtggttccaccggctaagatctcggacacgtactcagtactgacacacttaaatttataaaaacaacgtcgtcgacgcaaatctatcctcacaatcacaaatacaaaaactttttgactattcaaccccacgcgctcccttttttaacttcttctccacgtggcaagttttttcaagctgtcattttttcaaagcattgttattggcaccatgcatctccgtgatattttattatcgagcattgctattaggtaccagtcgtacttagtacttttgcgatatatcgcgttgtgattaattaacaatactttctaaaagttattatattaaa

SEQ ID NO: 83427 - DNA, 643 bp, Cannabis sativa
ttaataaatgataaaaataaacttactttttaattttttctctgagcaaggctattttctccacaggtgtattgaaatcaatagaaaactccacagtatcacccatgtctgaactcctatagtagttgcttataggttttgtggacaacactgcgtttgggtagtacactttttcattgttgagtttcaagaacacagtattcaatatgttcatctcttcaaccaacaactgcaaaaaaaaaaaaataataataataaaaaaatcatgatttaattgattagctagaatgctgagaagggactcgaatctcggaccttatgtgagtgaacaacgtatctaatagagaaatgctaaaaggtacccatggctatcgtgcttaaaacccttgtaaggtgtaatatagatatcggtacaatttaatattgagttctatttataggaaatcgctaattatatatcggaccatttattaaaaaaagtagtatttttaaaaattattaaaaaataaatatgtatattcttaaaaagaaatttttttggagtactgggcctaaagcccatcttagcccaaacccgaccctgatgccctggcatgattatttgagctacccctctttaataattgtaacattttgatagtgg

SEQ ID NO: 83428 - DNA, 968 bp, Cannabis sativa
cctgcaacataaaatgatttctgatcttttattattagtaaatctcatattgaaatgggttttatttacggcacaaaacccaacagacctgctgtctctttacctttttcttctttgttctgaagatttgtcttccctcataacgcaagctacccatcagagggtccccaagaagcatgctcttggtcttcgaatcgctcgtactgcccctactatctctcatctttttttcgcggatgacaaccttctttttaatgctgcttctcttgtcgtgacattcactacaaaaaatttacttaatgactatagccttgtgtccgaacaacgggtcaataaatcctccttttatttctctcccaacatggatgagcatactaaaagatccatcaccatcattcttaatattcctatccttgaggctatagaaaagtaccttggtctgcctcaatcctttaggggctccaagaaagatgctttcaatcacctttctgaccgggtttgggctcatttaaacaaatggaatgagactttcttttcgaaaggcatgaaagagatcttactgaaatctatggttcatgctattctgtcctatgccatggcttgtttcaaacttccttgtcgtttccacaaaaaccttgaatctcttatggctaacttttggtggggaggcaccactcaaactgggaaaactcattgggtggcttggcgaactctatgccactccaaatttcacggtcaccttggctttcggtctataaaagcctttaatcaagctatgttggccaagcaggcctggctcatcattcaatccccttaatatttggtggcttctttgcttaaagctcgttatttcccccatgccaccttccttaatgttggtaagggtcgacgacctttgctagtttggaatagtatctcttggggtaaggaactcctcttgccatggcttaagaagaaggtaggtaaca

SEQ ID NO: 83429 - DNA, 832 bp, Cannabis sativa
  modified_base (64)..(67): a, c, t, g, unknown or other
tattctttttatttttaagtatattctgttaaaccaaaaaatgccgttagatagacacttttannnnataaagatatatatatatttatatgtatatgtaattgcataaatatagatgtcaaaagaaaaaaaaaattgtcgttaaatgtaatagtactacatgagggtccaactggaaattacatattttattataaaaagaataaataattagagatagatgagattattaaatgtcgtttgtccaaaaatggtcttttttcttttactttaaaaaaataaaataaaaggaaagtattatattttttaatatataatgtcttttatttaaattaaaaagcctttaagtatgtattttttttttctaaatcaaaatgaataattattttgcttatatgattttatataaattaaatggtttgcatacaaaattgactctttgttattttactgtaataactatcaatttcacatatatatagatcatgactatataatggattgaaaatattacaatataaaaaaaagcaaacaagagaaaaataaacaataaatatacgttgcaatttttcttattattaattgttgtataacaaattagaaaaatgatgcttaactaatatctctttctgagcttcaggtcaagtcctcaattttgacaagtctgttatgccatttttgcctaacaccacactagccgttcaagttttctttcacagacgattgtcaatgcccatatgtgagtgttatgagaaaatctcaatttaccttcatactatggaagggataaaaagaaacttttcagcgatattaaagagaaaatatggagact

SEQ ID NO: 83430 - DNA, 2058 bp, Cannabis sativa
attcacaatgacatttacccctgcgctgcaatacttggagtttttaatcggccaataggcagcagtccatattgtatgatcttaaggtctgtggcgagttttgctagcatgttcgtgaatgaatttttgtatctaaaggtttggcagatgttgtagcttttatatctttgcagtagtactcaggacatcatcacataaacaacaattttcttgcacttggtattagatatttggtttaccactagttgggagtcactctacacttcaatttattgggcccttacttcctcagccactcacaatctcgctagcattgctccgtgtttccgcttcattattggagttatgaaatttgaaatggagagcactctagagctgatgtccttatggagagattagtatgattctttctctggctcccttttcattcgatgctccatcaatatagacttcccagactagtgactctaagactagctcatccaagtggtaattcaagcaatgacattccaccataaagttagctagggcttatcctttgattgaaattaatggttggaattggatgtcaaattggctaagttccatagcccacattagcaacctaccggatgactccagtttttgaatcacttggcggagagggtggtttattagtaccttaatggcgtgggcttggaagtaggttctaagcttcctgcaggtgaataatatgcaataggtcaacttctcgatcatgaataccttgattctacaccaaatagtcttttatagatgtagtaaactggtagctggacccttccttcctctcgcactaaatgcagcactaatggcatgatcagacacaactaaaaaaagggtacaactcttcaccttccactggcttcaataaaattggagctttggtgaagtgctcctttgatttctagaaggcttcttaacattcctcggtctattcaaatttcttgtttcctcgcaacatgttaaagaacgagacaaacttttccatggacttcaaaaggaatttgctaagggctgtaatccttctagtaacactctacacatccttgccatttttgggagatggcatgtcaatgaaggctttgatcttctctgggtttgcttcaattccttagtagttgacgataaagcccaagaacttcctagaggagacacaaaacgcatatttttttggattaagttacattccatacttcttgaggactgagaaggcctcctcgagatctgtactgtgctctttagatgtcataaacttcactagcatgtcatcaacatgaacttctatatttcttcttaattgattcttgaacatcttgttgaccaatcgctaatatattgcttcgtcattatgtaaaccaaatgacatcaccttgttacagtacacccctttatctgtctggaagctagtgtgttcttcatcagcaatgtgcatttttatctgattatatccagaataggcatccataaagcttagcaactggtaccttgaggtggcatccaccatctagtttattcatggaagagggaatcagactttagggtaaggcttcttaaggtccgtgaagtcaatgcacatcctccacgtgacattgggcttagggatcaaaaattgatttgccaaccacactcgatacaatgattctaggagaaagtcatttgcagtcagcttatctaccagatctaagggtctccgcttctgacaaactatcagcgcgtcttcattaatgttcaattcatggcacataatattacaattgatccttgtgaccctaaagtggctccatgatagcacaacctaatttctttttacaatattcaaaatgctttctttcacaattggaggcaagttcttcccaccttgatagttttggtggggtcgacattgcaaatgctggcctcttctacatcttccattagttcaaacattcttttaatccccactcgggggtccagatcatcttcaaaatccttttagatggctttagcttttgcttgaatctgtatttagggagcaatagttaactcctcccagaccac

SEQ ID NO: 83431 - DNA, 1098 bp, Cannabis sativa
aatggtttcatccgcttttatcttaaagttctcatattgagtggaataaatttgaattttagtctctttcgtagcactagttccttgatgagtaactttaagcatttttctatttaaatatttgtgttacctgttaaaaaaattcattagtatctaaatatttgagttaactattaattagtagtaaaagtatatatcttatgctatagaatgtcttaattgagtgaaaatataattttactgttggatttcaatcaaacataataagagtaaaagtagaattgatattaataaattatttaatagtatcaaaaattattctttttctgaaattctaatgcttattttggagtgttattaaagtttgtgatgataaatactactttttgcgtgtgtgtgtgcaaatagcacaactattcaactaataaatgtataatctaagattaatattaaataaatttggttaataaaggaaaattttataaaagaaattcgtataaaaatttaggtgagtaaaattatttaaaggatgttgtgatcattgtaactgtatttattatataaattcaattagttatttttaataattattattgtattttgagtatattattgtttttctaacaaatttaaaattatttactcttactagtataaatgtgtaaattttccatttaaaaaaaaataaaattataaatttacattcagaaactaactaaagctaaatatgggcttttaaaaaaccatttcaaatgtatgggctttgaaaacccataaaataactctaattttaaaaaaaaaaaaaaaatcataaaaagtgacgaaacttatatttatgagaaaaaatttaaaaagtattctacttatttttttttccatcttcaatatgcatgtggctaggtcaattgttgttaatgatcatatatggagtcgataaacttattaatcaatcctaagtatataattaccattataagtgtagcatgtttttatagaatatatttctgaagttcgtaaaaataatatactatgtatgtgttcctgtatataaatatatatttttaggtgattgatattacattatgagttttaaaatat

SEQ ID NO: 83432 - DNA, 2166 bp, Cannabis sativa
  modified_base (65)..(75): a, c, t, g, unknown or other
  modified_base (141)..(141): a, c, t, g, unknown or other
tgtaattgtgaataactatatgcatctggacttaatagaaattgtacacattaaaccataaacannnnnnnnnnntgtaaacataaatgacttctaattttctattgataacaaagaaaattatattgaaatgtgttttanttagggcataaaatcccaacaggtggcttcttcccctgctgtgcaggcaaggccgattgctgcagtgaaccggatggaaccactgtatgaaagattcagcaagcaggcatctccagtctttttgggaggtctcgatgtgaattcttcagcgatagttcttggattggatgatcgtttattatactaaaagatatcgaggatctcctgatagactacaagaggtattaccttctttttattagtctagatttaatctatatatatattatattgagatctttgggcttatgaatcatattgggtaaaaactattttttatcaagtttgcttttgcttttctaactctgatatgaaccataaaatcgaacactgtaatgacatcattgtaatttgtgaacaactatatgttcaagatttaacaaaacttatatattaaacatataatcaagtataaaacttgtgaacaaagcatatgacaaggtcaagatatgatttctaatctatattgaaagtaaataaaattacaataaaattgagttttatttcgggcatagtatcctaacagcagtagcaagactacaattagatgaaattggtatagctacaatggagttgtgtagaacaaatgactttgaggaagaagcttactaaacaattggaagagattctaatgagaaggaatacaaatcattatggagctcgccctccatcagaatgtggttggagaaacataatcctcaacaaggcaaatatcatgatggaattcaaagaaaacttgattatcatgagcaaagtgcgaaaccataatgagattatgagttatttataagataggaaggagttaattaagaataagaactttaaaattaggatatggttgaaagaatgacttaccaatattttggattgcgagtccagctcaatcaccaacatagatcttatatgtgccaaagtattgttggtttttgcattacgttatgatcattggaggtgcaatgatttgtgtcaccgaagtcacgataccaaaaagtttcattaatagtgtcagaagaagtaattatagcttgcattggggtaaatcctttgtcaggcttccctgcacttaaatgagatatgtttaactcttccacgcagttgatatgttggaggaggacaaaagctagcctaactagagaatgaaccttaagaggttccagaattatattgagaacctccacaattacctgtagcatatggatgccaagaaggagcatgtgaaggcgctaggggtaagaaaccacgattgacgcagaggaattattgttgaaatttctagctaactgattagagtagctagatctgatcatgaaagttcctctattatgatctaaattaacagcgagattagaatttagctcagtagagtgcttttctatacgatgttcttgagccattaaaaatgactcgatctcaaccacaatatactcctcacgatgggagttgatagaaattattaaggtatcataatttgagaaaagaccactgaagatcgaagtaatgtgttcttttggggtgagaggatgaccaacagatccaagtctatcaaccaagattttgactgaaagaagataatcattgatcgtcaaagatcatttcttgaaatttatgagttgagttgggtactaatcagtttttgtaatggtttgagatgagaaatgctgatcaagaatgctccatacatgagaacaactctcacaaccaatgattcaagtaagaatcatatcagacataaaagaaaaaaccaagcatacaacagttgaccatgtaaaaagaaattgaacatctgcagggacctttttgtaattctcctcagtgatgatctgtcagcctcctcattccttggagagggaatattcctcctctatgtttttcctaaaaatgccgttgtaattaaatccttgtgattctccttttgtaacaaactaatgtcgtgtcaagagctgatttgctcttgtggattctgtattgattgccttttcattataa

SEQ ID NO: 83433 - DNA, 1190 bp, Cannabis sativa
aattctggattctttaatagaaagaaaattctaaaaatggataatgaatggttagataggaactagacaaccaaggcatatggaatctgaggtctaaaatatgggaaagacaatatttcggacagcaactgtatatggtggtgtggaactcagtttcatagtcttcccaatgaacatgacattccttctaatgttcttctctgtattaaaatagtacaagggcttaataccaatctcccaattgaatccaattgaagttttatcttcttattctatatccattaataactacataattatatatttattggttatacaagtcccttgcaataataaattgtatttttatagtgtaaggcagctgttgggagacacccttaattattttgttactgtttgtttgtttttaaattataagagtttgactgtaaagaatgaaaacaaattatacgaaagaagaaaagtgaaagaaagagtaaggttcaatattagacgattagtttttttatttgcctacctataaggtagatcattaaattaatatattattaaaaattgctaccttttttattacaagaaatagtaaaaaaaaatataatcaactttttttttttgaaaggtaatcaacttactatagtaagagacgtaaaatattatgctcattaatactaatagcatgtcactgaattacatttgttgttatgttataatactaatagtaaaagatttaaatttatctttagtaacaaatattgtaatgatcaattaactatgaattatgattattgtaaatttcagtcaaaagttttgttttagtatctttttgaggcttattattattttttttaatcaaagatgaaatttattcaaaaacactcagaagatacaatattctttagagcgctaggagcatcatgctcgctaaactcacaatctaacaaataacaagaccctctagcaacacaatgagcaaccttattaacagatcgtttaacaaaaaccaaagaaacattagaaaaagaagaaagcatctcacggcaatcccgagctaataatccaaactgagaaagcataagaatagcgatattaatagcttgaaccaccaccaaagcatcagtttcaattacaacattagtccactgtttcttctttatccaacattaataccgccaaacttttttttttttttt

SEQ ID NO: 83434 - DNA, 1026 bp, Cannabis sativa
tttttttttggcaaaacttttttaactattattttacgtgtatttaattctttaagtttaaattttaacgataataattcttcaaactactaaattaatagcaatttaagtgtcattcggttaactgtcgctatgagttgcttatgtatattcttgtacacatgactcgtttatattgcaacacctaatattattatttaaaaattattttaaaaatttattttaaaattaaataaaataataaaaaataaaaataaaatattgttcatatattacaaatacaattactaattttatgtaacattttaataattaaataaatggtgattgaagtatataaaataataatattagtaataataaatatgatatatacttgaattgtcttatttttattggttgaggacattcaaatatgtgaaaataagacatatggatgctatctcctctccttttacaacatttgtaaaataaaataacaaatttacattatattatatttaacattcgtaagagacaacaagtagtggtgaaaacctatcaatgccactaagtctaaacaaactttatttcacaaaattaattaagatgcttatgcaaatattaatgtatcttactttttttttttttggaacaaaaagtatttatagattaaaactaaatagagttagccttcacgctaattatatgagatgatgtctagtatgaaaaaaaaagcttaactatcagtaacattttctaacaaaagcctatttagccacattatgaaccgcaaaattataattttaaaaataaataaaaaattacaacttaacgaaaagattagagagatatttacatggaagcacatagttaccaataccttaactggaacaagttcccttcaacgtcttgacaaccgtctcagagtcactcttaatcaacacaaaagggtgtttcaatataactgcagtctccatagctaacaaacaagttgtaacttcttcaatgagagagtcagagaagttgagcatgttagtagccacc

SEQ ID NO: 83435 - DNA, 1319 bp, Cannabis sativa
ttacaattcaaataaactccaccatgtatgtaagtgtacattttcgaaactaaatcaatctatttcgacaataagttactaaaataaaaaaacagtaaaaaaatcaagaacattctttaattagtctgtctaaaactgaggaattgtgatcattccagcccaaaaaatcataaaatatgaaacataatggttcaatcaattccttttcctataaaagatttcccctttaaaaaaagtccacctttttatttgtgccagaaccatgcaacgagagattttaggtatattctacagagattattaccaaagactaatcaagccaaatcacatcatcttacgcaaattaccaacaagcatccagaaaaaatcaaagtgagacatcatgaattaaccgtgtactatgttctgaaattcataacaatttcaatattttatgtaatcaaagttatgggtgcatcgaaaattaaagggaatattttgttgggtttacaaattggaaatatgagtggtgaatttaaaaatcggaaaaagaagaagaaagggtttaccggagagagttgtggtggcgacgagggaaacttctagaaaattaaaaacaaatgaatatgaaagaaagagacgaacagaactagacatgtgagactattatatatatagcaataccaccgtcattttacgtaacatttcactactgaaagtaccatactgcccttttcagacccagcccaatttaaagataagcccagcccagcccagcccaacttatatttacaaaaatgtatgattgaccaatcacttgtttcttacaaaaaagaaaaaaaatcacttgtttattgcatttaaacattataataatttattatattataaattttaaatagttttacaaataaaatatctttttgcacgtaatagtttaataattttaaacttaaatctatgatgaaaagattttagtatgctgtacaaaattagagtttgttttggatgtgtttttgaattttttatgatttaaatgtatttattattatttttatttttttaaaaaatattttatttttgaagcctgtgatgtttataagataaaagtattattagtttaatgaagaaaaaaatgatataaataatgaaatttaattgtcttactcttacctattaaattttgacacattatcttgattttagtcgtcgaaagtaattttatttttaatattttttgagtttgtaaaaatgacaaaattttaatataattaggaaaatttacatggtatactaacttttacaatttttttacaaaaatactgttaggcggaattttt

SEQ ID NO: 83436 - DNA, 617 bp, Cannabis sativa
caattcaaggactttacatcacttaaattttgaaaggaataattttttgagctggaggattggagttacagtgcccaaggctagagcaagggacaaacctaggagtatggtaagggttttaattaggtatgaactcatttgtatttttgatattttccctaattgttgtgtaatggattctggttttgaagtttatattctacactgaaacgaaaaaccaaaagcatattttataaatggatatgaaatattggattttaaatatggcctctcacattttgagacttcttgtagcatttatatttttctatattcagtctgtcatcatcaagtcattatttttttattcactatgttagagagtgtcttttgcagtgcaatatcaagtgactacaaaagtgaaacctaacaaattaatgataaaagtatatggaatgtctaatatagaaatggcatgggaagttgtaagttcatatgatagttatgttcatttgggaattttgtttggtaaaagggatttttctgaccatttttagtttatgaactaccttagactgcaattggtttaatagctattggcattgtgaatgagaatcaataattcattggaggattca

SEQ ID NO: 83437 - DNA, 2414 bp, Cannabis sativa
  modified_base (2373)..(2388): a, c, t, g, unknown or other
aatcagattgtatctccatggtgggaggcttagctttccccattatgcctttaaaatggccaagaaaatgctgcacaacatcaggaaagtgatcatttagaaccccttgctcggtagtaaacgaaacaatcatgttatcttccttctgcttcttcaacatggcatgaaaataagctgtgttgctatctcctttttgaatccaattaaccttgcttctttggtggagaaagttcaagtacatttttcttgtatgtgaaatcggttagcagtcacttgctccaattcaaggaaatgattgttgttcgggtttgcttgacattggaactgagcctccttgtaattatccttggccttctcataagcaactccaatgttcccaatcgagtgcctattgaaatcttttaacttgtgtttgagcctcatggtttttaaataaatccccttctacccaccacatctaagaggcttgccctagctatcaaacacaatgttcttgtaatcctgatgatcaatccagaaattatggaaccaaaacggtttgcttccaatacattttgtagcaaccgaatgaaccacacaaagacaatgatcagagcaggtctcccaaaagaaatgagcagaagtattcagaaaatcatcaacccactcctcattgtgaaacacatggtcaatacgagaaaatatcctattatcctatttattggtccaagtgaaagtcgaaccgtggcgcttcatagaccccacagaagattgagcaatccagttattagagtctacaacccctgcccgtcatcatgatgaaaaaccgcattaaagtcaccaagaatgatccaagctttagaaacatttatcattgatagggcggtccaaagatcactcctaccttctatggtgttagctccatagataatggtagcaaagtaatcttttttctaccctatcattttgatacgacaacatgttgcttggagtcctcaatgatttcaacattaacaaaattcttcctccagagaaggagaatccggccttccactttatttcttgaataaaagtcccaacacaagaagttatttgccatcatttttttgaatttttcccctttaatcttggtctcaacaagggctccaatgacaactttattaactctccaaacttcagcaactttatcttgcttctcctttttattcaaacccctaacgttccaacaactaatattgtaaaaatccattaacaacacaagctaaattcattctctccctctacttcttcatgctgtccccagggccggtcctaaggtatatggggcctaaggcgaaatcaaattttggggcccctatatatatagtttagcaattataaaaattatagttgtagtgcttagtttaatggtaaaacttttaaaaactcttaagagctccaaggttcaatccctcataactacacattaaatatttttaagaaaaattaaaatgtagaggttggaaattgatcccacgacctcttagagagaagttaaaccttttaccactacaccaaacaatttttattatattttcttcttatttaaaattttatttatatattaatattttttttgtgatggtgatggagttgtctcctgcaacttctgagtcagcaaatgcatgagtttctgacattgagcagcaaaatccatctctccattaacattttctttactgtcatttcctgctgtgaaattggctgtcgactttcattactgattgctagattggttaggtgtttctctaggaaacctgccatataaacgatggccaggtggataaccatggattttatagcacttagctatagtgtgtccaggcactccacaatgtgaacaaatgggtcgagtatcagacctgttatcagatctgttattgctttgatttccttgggtgcttccagcaaactgattagaattctcattagtagactgattattttcagcttgagggatgataattcctctttgtttctcttcttgtattatacaagcaaaagccttattaatatttggaagagaatcttgaagaaggatttgggatctagcattcagatatgattcattaagtccaattaaaaattcaagtaccttatcttcatcctagtactcctgaattatcttcattgctccacgagcatggatcggttgtggcctgtattcctgaagtagatcccaaagtcctttaagccttttgtaaaaagctgtaacatcattggatccctgagtcaaggtctgcatacttcttttcacttcaaaaattctaggagcattcttttgatggaacctttcttgtaattcacacaagatctgtgatgcatcttccatgtactgttggaaatattttaccnnnnnnnnnnnnnnnnaccaagtatgtttgattaacatccta

SEQ ID NO: 83438 - DNA, 995 bp, Cannabis sativa
acccaacccagaccgaagcccaatcataaataaaaaaatattttacttttttatatacacttatcaccctacatataaaaggaaactttacattttcttcttaccctaaccctaaattctctctaccagctcaaaaactcagaggcgctcttctccttctcttactctctcaatcgttcttttcaaattgaaaaaaaaaatggtctcttaacctcctctctcatatcatctctcacactcgtaggcagccttctatgcgggataaagctaagtcaaaggtggtgaggtaatctatcttttataatatctcggagtcgatcaatgtagtctttttctttttcttcttgagtagtttttgctttacccagatgattttctcgagaaatcccattaatgaagttggagaaaaataaaaatgcttatttagttacttaatctgaaaaaagattgcatttttctttacatatctatgttgagtaaatttttgatgaaacacgttttgaacaatggactttgtaagaatttgattttgagtgtgagaagtttcttttttcaattttgggttcttaccagaattttgattgtagtgttagagaaaattattgatgattcaaaaatagtttgttatgtgacctgccatatatagtcaagccaaagttttaactaaagatttaatttttagattaatatttgttgtttctcaagtttagtctcttttttatacatttatgaaatagaacaatgtaatgatcccacaagcttgttgaaagtaattttgatatttcctttttttattgttattttcattagataagaaaatcagattaaatagagtaaagtgttttcacttttttattatattgagttaaacgagtatgtggtttgtagtctaatatttgtaaataaatttggtgatattgtttatgttattttagaaaataattagattatttctattgtttatattattttttcaaaaagctttagatgttttt

SEQ ID NO: 83439 - DNA, 913 bp, Cannabis sativa
aaactttattatatacttttgtaaataaaggcttatattccacatacgattcattctattatacacattaggatactctcattttgttaaaatttattaactttgagaagaagttccaacaactattactgtgattgtgttagtttgattaactcggtcgagctacgaatggatgtgaaatataattttgtattaattacttaagtcaaacacatgcagctacaacaatcttctagttgtatcaaaaagcaaaaaaatgagcaaagaatattttaaggaatattatctacgatatttttttcgtatagtacattaaaaagctaaaaaataaaagtggtgatggtcagtgatgatggtgacaaaagactaatagactaatagtctaataattcatattcaatggtacccaaagaagacagataaaccaactataaatttatatatatcttactccattttgagggttgctacagggtaccgttcatcacggactcattgattaacaaaacatcaaaattgaaccatcaattgctgatacacatacttttgtttaatattgaaattttttcacaactcatagaaagattattatgtcaaactcatctataaattcaaactacgtacaaccatttcaaatttgtagctactgcaaaagagaaaaaataattaattaaaacttaaaaaagaatttgtagatcataagagtttgactacttctttgatgggtaaacaagggtagggacaatttattggaacatgtgggcatatatcctacttgtatgggtaggtcatttcccaacctacgcaattatatatttatatatctattttatataaagtgtgcttatataacagaatttttggtttatgagaaatttattgggtgactttttatttataataaaaataaaat

SEQ ID NO: 83440 - DNA, 776 bp, Cannabis sativa
  modified_base (741)..(745): a, c, t, g, unknown or other
gttttgtatattaccatgtataatttaggactcgaacccaggacctccaacacatacgcaccctcctatgatcacttgatctaacctcaagtggtgtatatgtatatgccttaagcactaaagaatgcacatttaagaattcctttgtatagggtttataccaatccattgcagtagttattggacacattcttgactatacaaatgcttgaagaacaagtgattatgtgtttcaagatcatgcccacaaaggaaacaatcttgcaccccttgaattccttgcctttgtaatatgccaccaagatataaatctatgtttagaaagactgtattttgcccaaacatgtttagcaaaccttaacaagcaatcacaagtcttctttatggaacagtgctctattgttttcagttcttttaacttatcccttacctacaatattttaactcactacgagctacaatcttgataggtttcatacttccaccaatttaaatcttttaagtaaactttatgcatccatttaactcgtaaattatctttattttttgagttaaagtccacacatattttctaatagctcacaataagtccaatccctcttgatcttttggcttgcaaatatctttccaagccaaaagaccgagctatttatattcagaaagtaccacttcataaaaatcacgacatatcttatcaatagcttgtaaattttggtgccgtttggtaacacttttttaatnnnnnttttgtttttaaaattgaaaaagtgaaaata

SEQ ID NO: 83441 - DNA, 1246 bp, Cannabis sativa
aagtatactacatgactaatgtaaatgtaaatttaatctactttgataattaataaaaaatggaatgaaaatataaatttgcaaatggaaatgtagtttgattggtttagcaaaaaaaaaactaaaaaaaaatagttgttataggaagtgaaatataggagatttagccacaaatacttctatttgataaatttacaatatcaattcaacacataaatctaatttacttgttctacttctcttcctcatttcaacaatttattaattctttaatgttatatttaactatatcccaaaaagtaaaatatatttcaaatttatttaatgtctcactacttaaatttaaaataatatatgttttataaacatatatatttttttaatgagaattcaattttactaaccaataatttcaactatcaaataaaatataaattagttaaaatacacttcaaattgaatcggcgatcagaaaataaaataacaactttaaagtcacagactacttaattagcagatcatttaaacaaaaaagataataacatttttcaaagaatcaaacaagcttttacagtgtttaataattaaaccaaacaaagaaatcatattcaaagaactttgtaaagcttgtactacatatagacaatctaatttcacattaacccgttgccacttcctttcttttatctaaatgagaacttctttaatctctaaggcctttgctaggatcagttctaccacaccatgaaccagttatgtctgatcctcaactagcttgccatttgaatctcaagccactaaaccaaggtcatagcttaagcctccatcaaataaagtcctgtctacattaaccttgatgttattgacttgtggtgcaatcagagcttgtgctgagtaataatgggtccaaaaaacttttttgtgtgtattatatctaaagtatagtgtgagcattattagctcttattttattaattttttaaaaaatgtcattttttttcaatgcaaaaaatatactatattaaaattttgagttctggatttggtgagctctaagcacgacgagcctagcttgctttagcccaggatcgggcttaggtggaatctaatgcttactcccattacctgtctgacaagcaaaccataatgtatcgatgtcggactttctagcattaaatattacttaaaacaaattaactattttttgtggaacataaaaaataatcataaataaatgaataacaga

SEQ ID NO: 83442 - DNA, 585 bp, Cannabis sativa
  modified_base (537)..(537): a, c, t, g, unknown or other
ggtgttggtatatgcatacatgagtttacaactaatcatgtactacttggaaaaaaaaaactcatttacaattttcaatccactttttaagttgtaagattaatagatatattaatagaaactttaataaaacagatccaatactcctaacatttgaattaaaattaacaatactttatgaatcacacaaagaaaaatacttttttttttcttgaatatatgattaagtgggttggtatattattgcatgaagatatcattaagaaaaaaattaattatagacttagctcaattactatagtcaatgattgggaaaaataaacaaaacgtgtcaattttatatacacactaactccatacttttatatacactaaactaattatatatgattatgattaatgcaataatatgagtttatttatttaattaattaggattattttttagggtgattttacaatgcatatccttaaaaaggatgtactaatgcactttctatctgttttggcattcagaataattttttagtctaattnttttcatattcatgtatgttataactatttaagatatccaacaaaatt

SEQ ID NO: 83443 - DNA, 863 bp, Cannabis sativa
tttttttgctataaagctatactatttaaatatttaaaatttatcgtagtataagtaagcatgcctttaaattagataataaattaatttaaaaagaattatgattcatttatctcaaatgtatgctctttgcagttccaacaataaaaaaattacaaaatagactacaatctttttaaaaaaacacaaaaaatattttagtatggaaaaaatttaatttttaccctttgaatttttttattttcaaaaatattttttcattaaaaatagtatactatttttttttggttgttttataattgtattatagttgttacttatgaggttatttttagttattttataattgtcgtgaggtaaattttttgttatttttttagttattttgttattttttgttgaaaaaaaatgtattttttataattttaaaattttaaaagaatatttttataaataaaaactttatgtagtaaaattgtaaataaaacttttaaaaaaataagaatatttatgaaaattttcctttaaaaaatcacatttatttttgccaatataaatgtcaaattaaattaaaaggacccttagtgattgatgcttgctttaataaataacaagtccttaattatgccatcttattatgatttttagttagtgttatgccctttacacgcaacaacaacaataataaatatatatcagcattgttattagatactaatagtatctagcatattttataggtagtgctttataattggttagcgatattgcttaaaaattattttttaaagttatatgagatctgatacttacgctaataacagtaagatactgagaatagtattaagcaccaataatacttt

SEQ ID NO: 83444 - DNA, 1664 bp, Cannabis sativa
agaacccgactagaaccaatcattttcgacccattactctgtgtaatgtgatgtataaagtcatttccaaagtcattgcaaatagaatcaaacctattttaccttctcttatttgcccaacccaagttgcctttgagcctgggaggaacatccaggataacaatgtaattgtacaagagattatcgactcgttcaacaggaagaaaggcaaagagggtatttttgccataaaaattgacctggttaaagcttatcggctgagctggatatttattgactatgtgatttcttgttatgggattcctgaaaaatttcgcaattgggtctctcattgtatctccaccactactctcaatatctgtcctaatggaggaaaggttggttagattaaacccacttgtggtttacgttagggtgaccctctctccccctatctctttatttgggcttccgaggttctatcaatgcttctagaggatgctctttgcaagggcattattcaaggaataagacttagcagggcgaggtagttctctctcatatattttttgcggatgacctaattcatgttggtagagccaatgtgattgaagcaaaaagtgtttggaactgtcttgagagattctgtgcttggtttggtcaacaagtaaataagctgaaaaccacaattttctttagcaaaaatactcctcctagtatgaaaatagggattaaggatgccttaagaattggatctcttgttgatttttatcaaatacttgggcctcctgttatttagatcaagacagaaggatgttgacttcaatttcatcctggttaacctcacttctaagttacaaggctggaaggcaaaaatcctgtcaaaggcggggcgtgctacccttatcaaatatgtgggtctgtctctgcctatgtatgctatgcaaactatcaaactttcaaatcgccgtgttagtaaaattgatggcttggtgggcgatttttagtggggatttgaaagagggaaccatggtctggacttaagagcttgggataagttgtgtcttcctaaatctcttgtgagtcttggttttcgaaagactagagaaatgaaccatgcctttttggcaaaatgggggtgtattatgctgattgggggcaaatctcgctagttaaccaagtgatagaatagaactagctatatatacaaacagttctaactgacctaacaacatttttaggacaactgttaatacataacagactgacgtggacactaacagaatattcacatgtagttacaacagatgaacaccacagataagactagaatcactagtaatataatctgtcaaaaatatgaaccttaaaatctcccccttgacagattatgttcaatgaccacacaagactaataatagctactaaacaaaataaaggcgaagacccaaaaagttatccaatagcaagaaactatagaaatataaattgtctttgcaaaaagaaacatagcaatccataatccatatcaaaagaaaacttgagaacatatatatctccccttcattgaacataagcatattgcaccacatctttgtcaaattccccttgggatagtggcactgaagacaccagatgaggagcagtggacattggagacagttcagctgcagcaggaggatttt

SEQ ID NO: 83445 - DNA, 1034 bp, Cannabis sativa
gttaaaccaagaaatgccgttaaataggcacttttaatatataaagatatattttaaaattacataataaactgctacttttgaatttttttttttttcttttttttcgagtgtgttgtgtttttttttccagttcgatataatataacccaagctatgtttgtccctaagctatgtatgtcgtaacattatttagggttgttctcttttactaaaggattattttataaatatataaaagtagcaaattttttatatttttatgaatctactgttttttttaacatttttacaattttttttttacaaaaatacagtgttattgtttcgttattttcaaaaaatttgttgttttgacgctgttactacatagaaagcaacatttttctctaaaaaaacaagtgaaaatctaaaaaaaataataaataaataaaaaatcgtaaaaatataaattaaaaaaatttcatataaatataaaaaaaaaatccttaagaatataaaagaaaaaaagttgaataaatgaagcttctcaaaaaaaaaaaaaacctcctagtggaggaagacctcctaaagataagagacaaagagctaaatggagagctaaaaaaatgatctttcgtgtataattctgtataatctcgaatgttatcagtttcgataagtagactaaataatacaatgcaagtaaaagttttcagattcgtagaataataaaacaatatataaattatcatgcttgcatatctaccatttgagtcttaaacaattattttaataattacgtatccaatttataaaacaacatataaattatcatgcttgcatatccactatttgagtcttgaacaattattctaataattacatatccaatttaacagaataggcaagcatactattttttaggtatatatatatatatataaatatactagcaaaaattacgtgcgaggcacgtatgtgttaaactttatgctagttttttctatgtcatttgaaaaaatattattagttattaggtgagattattatta

SEQ ID NO: 83446 - DNA, 1427 bp, Cannabis sativa
ttgattttcattttcatatttttgatttttgattttcattttcatatttttgatttttaaaaacagaaaactgattaaaaaagtgttaccaaaagccaccttaataaaaaaaaaattacagtcaaattacaaagcgctatttgaaaacttttttatataataaagtataaataaaaataaataaagtatcttagaataaatttgtgaaaataaaaaattacttaatctcatcctaaactttcaagcaccagccggtccctgacatcattttttagaaataaataaataattcctttatagctcctggattattcatttatttttttcattttatatacacataaatgtatattagttaatgtgtaaactcaaaagtcatgtatatcaaaggttagaaaatatttttatactataagaacaaaataggtgtaccaaccatagaattattctatgagtaatttgcggcataactttcttaaatggtcagatttttgcaactaatacctaattctaaaattttggtggtaaaacctcctaaactcttgttttgttagcagtttaacattttcatccatttttagctgttaactgccctggtggaatgtctacgtggacacagtgtacacgtggcacaattttattagtccacgtaaataaatattaaaaaaaaataaaattttcaaaaatatttacaaaaataaaataaaaattaaatattacaaaaattgttttaaaattaaaaacaaataaaataaaataagttattttttttttctttttcttcttctgttcttcttcttcgatctctggttcatccaccgtcatcaccaaaactatcatctgcatcatcatccacaaccgaccaccatcatcactacaactgcccatctccattaccatccatgatcgaccagcagccacattctattcattttatccaaatcaacaccaaaataaaattaaaaaacaattccattttcatatctaatctaaaaacactcaaatcaaataaatacaactccaatccctcatctacctttctctcctcctagccaccaatcaagcctaaagctagcttaagtatcatccaaacatccccaaaacacaaaatgaaacatcttttaaacctacagagccctaactcggattcatgcataaaaacccaactccaaacataaaaaaaaaattcaaggagaagagagtatagaagcttaccttgagttgaatccctaaaattctaagaaaaattctgcctaaacactcaacaatcagagttgagaaccctaacttctgctgggtttctaaaggggtcaagagagagagagagagacttggaaggccaccactatcccgcctctttctgtcgaagccttccagtaccggcaaagcccccaccttgcgagttagggctctctctctctctctct

SEQ ID NO: 83447 - DNA, 711 bp, Cannabis sativa
gcaaatactgtcccattcgaatctagaatgaccaatttgaggacacaagagccattgttgacgtcgagagcgacgttaatattggctttgaagaccgtggttgctggaagagtccaacgaggggaaagctctttgagctagcaagcaagagaaggtggacaaaggggagtaacctgactattttcttgacgataagagtggagaaaattaaccgtccaaggacctactaattctggaggaatggtaaccttatcatggacaaccttgttacgacaataccaaatgcgccaccaggcgacaataattaattcaatatctctttggggtagttgttaaatgacattgcaaatcaagccataaatatcacttacaaaagtttaaggatcgccaagttagaaagtgcaaagttttcaaatttaagcgagattgtcacaactccaaagagcatgaaaagtagtctccaactcacaagagcggatcagacacaaattatcattgcggaagtcatgcttttagagattgatcatagtagggatccaatttgaagacaacctccacgcaaaacttttgaccttaggaggtaaatgaagactttagagtagatgacaccaagtagtataattaaaggagaaatacacaatgtttttagtgacatgtcaaatggcaagctaataaccacttttaaccgaataaaaaccatgtctctcatac

SEQ ID NO: 83448 - DNA, 1112 bp, Cannabis sativa
aattttatacccatgaatattaataatctattttgtatgatacatattaaattagctttcttttacacttgaatggctaatgaatcctatatgcatgtcatagtattttaactttttatgcattattttagtgaaaatatcattattcattcaattaagcatcatgtttattaattaattgttattgtttggacattagaagtttattaagctgaatttgatatactcgaatggctaaatttagtagttagaacttgaatgatgcaaagaaatattcattaatttttaaattatttttagtaaaatgaataggaatattttattatgcattacataactttaaaaactggtgcttcaattgtattctttagatcaaatttaatataagaatatatttaattagataatacaactttatccataaattttgaaaaaatctcataaactcattgagaatattatacatacatatatatatatatatagctgatatgtcactaccacaacagagaataatatttaaggtccacactagtatatagcttaggtaaatatataaatatataatatgggtcatataatcatatgaggtacttatgttatatgttattatcgtgaaacatttaatattctaaactaaaataattaagataataaatacaaaaaaccataacatctcatctctatatttctatttctatcacaactcattttcacaaagtccctacatttcacgtttttagttcctatgattaaatgaacataatacatatatatgaatatgattagattttcaaactaattattaataataataatttataacaaaagaaaaaaaaataataataacgaactaactactaattaattataataagactttgattaaaatagatttaaattcaattaatatgaagattaagattataattaacgatataaatatttatattagtaacttataactagctcactacatatataaggaattttatttgtattctagaaatttataagtgcactttattttaataatttttattttacattaaaatatataactttaattatattagtttttttatttattttttcctccaactcatatatga

SEQ ID NO: 83449 - DNA, 944 bp, Cannabis sativa
  modified_base (68)..(69): a, c, t, g, unknown or other
  modified_base (276)..(283): a, c, t, g, unknown or other
agtgtaactctattgagttataacctctcaattagaatataatttatttggtcccaagtgtattcttnnatagaggttctactgtaataacaatattttccaatgatattaggcactatgcgcttagcactgtattataaaaaataattacgtaaattttttataattaaatgtaatttttagtcacattaaaaaaattatttgtaattaaaacatagtatttaaatataaattgtcactaatttaactttagtcacaacaagtattatgactaannnnnnnnttagtcacaacaaattgtaatttctgtcactaatacttttagtcacgaatcttttggtcacaatttttttatttttagttacaaattttattatgactaaaaataaaattttttgtagtgtttttagagtcacgccctatataaatgcttatcaattttttataattattattagaatattgttattaggtattttatggtgctcaatatcatatcgcgatatacgtgttgtaaatagttagcaatttcttatataatttattaaagcaaaatgtgtataactcaacattaaattgcatcacatcacttaactcaatttatgtggtgcttggcaccgtgctccttaccatttctcttattattaaagtaaactaattgggactacatataataatacaatactacacttcatagaaatgttaggcattatgagtgttcttctttagcatttgataactttttatggtgcacatattaacatttctctatataggctagctggtatatataaaaatatatatgactatatgagaaatggtaagggcattttaatggtgtaaaagaccataacaaataacatgtcattatcggtataaattaacatcgaaattttatataatttataataaataataaatagcaatactttttatatatataa

SEQ ID NO: 83450 - DNA, 1099 bp, Cannabis sativa
agcaaatccaaaacgcttgctactgctttgggaaacattattggtgagtttattgatgtgcatgaagaatctcttgatgagggatggggccctttcttaagaattcgggtaagacttcctattgataaaccgcttcttcggggtcgtatgattagtttgccaaggattaaagatgacttttggattgactttcgatatgaacgattaccggagttctgttttgagtgtgggcgacttggccaccctttcgaaaaatgtgtagccttcatggagagaatggacaatggtaatgatgatgatcttgagtatggtccttggatgaaaggtgcgaaacttccaactactggctatgacaaataccgcactgatttctctaaggggaacgcttggccacttttgactcgacttgctcgtaaatcattggtttctaccatcccaaacttaggatcgatatctcaaccacaacccaaaatcctcttccaaggagaatcttcttctgctgtcccagtttttccaggaaataccaactctgcttccatacctcgacaccaaatttcaccttcacatactggtagtactccgcaattatctccagctccactcaccattcctgtgtcatctatcacaaatggcacatctaatatggctatttccaccaatgttaccccacttataacactttccttcagtcgtaccagtacacttcctatcaatccttcatcaaccactagccttaaccatatatatacccctgatattggttctggttccaatatctatgtcccaattgcaacataccctccaaactcatctactgagccaatacacttacccaccaacacatctgtacataccaccacacccatgatgcctacccttttcgctaactcatcaccgattaccacatcaaactgctgcaattcagaagttggtcaagaaaatgtacatcctaacagacttttcaaaaggcatactgatgctccttccatgagacaaatgctcaagcgttgccgaaaccaaaacactgctgctgctgcttttccttcctcgtcaaaaggagactgctcaaaccaaaatgtttctttgtttcccaaggatt

SEQ ID NO: 83451 - DNA, 644 bp, Cannabis sativa
ttttttatactacattaaattctgaaattcaataatttttccatgaaaaaggtttgtattatattgattataattatagcctatcgtactttgtatttatggatgttaattttaacttattaatcgaatttagtgttctatatatataaaaaaaaaacttcatatagcatattgcttatataaaaaaatcatgccaatctagggtgctcaacatcttaaattgtcatggttgttgtaatttagtgttaggttatttttatctagctatattttaatttacatgtgatatgtatctaaggtgttgcatatttaagtttctccatttagagttattctaaaattcctattacaatttcttaacttttgtgttctaaaacaaagagatatttttttcgacgacgatgttcgttatagttataacattattcttttaatttttttttttaaattaatttatagtgtctataataagtttgtaagcactcgtagtaaattagaataccgaaaactctattttaagtacgataaactattcgaattttacagagatgatattataactataacaattatcactataaaaaatattctgacatataattttaagcgcaaaaattaactaggagattgtaataagaaaatat

SEQ ID NO: 83452 - DNA, 829 bp, Cannabis sativa
cggcttggactctcgggcccgggacaagtccagggatcgggttggggtcaaggttcgaggttgggtccttgtttgaggtttaggtcttgggtcaaggtctaggatcagggtcgggtcaaggtctggggtcctggtcttggtctcgattaggggttcgggtaagggtttgggtttgagtttgagttcagggttcagggttgggtccaggtcgggggtccagttttagatttggggtccatgtctgggttttagtttgagttcgagattcagggttcgaggtttggggcttggttgatttcaaaccttttgtagatattataagctaatacgtgttttgttatgtattaaatgatatgactcacattttattaaaatttatagtcgtagtaattaatataatacaatgttctattcaaacaatgttatttattatttaatataataaaattcttatatggcttatcaaactcggcctaagtgtgtacttaattattgttttcttgtttttaatagtggtgaaaatatatggcatgatgtatttatataattgtaataattataccattttgttgaaagttgaactatatgtaatgcaatcataaatttccaactgaattcattttttgcactttggtctctaacttcaaagttttgcatttaaatcttcaaattcttatgaagttagtatcattttttttttgaaaagatgaagttagtatcattagtctttgagtaatattattttagactttaaattttgtaaaagttatagattagattttctgtttcgttaaataataaaatggaacttgtattttctaaaatagta

SEQ ID NO: 83453 - DNA, 675 bp, Cannabis sativa
aaaatcatcatgagttggttaggcgtgcgatccacatactttatggccacatccactttcccaaataagatattatctttttatcattttctgagtcgaaacaaacattttctatttgctttgctcagtaataggaactcattgccacatttttggaagctgtccaaccccacattatatttgtatttatgttttgttattgttccctagtttttgtattatatttacggactttgctcgcttcggcctaagtaatgaattatttattgaaaataatagagaataatacattcttaataaataaaaaataatatgtaagttgcttatctatcttatgagtatgcacaaatttattggatcatgaatactctaggaaaattagaaagcaaagtaatatcatctaaaataaattagttaagattaaaaatcaataacatataaaggcctcaaaagacaagcaaacacattgacaggtatgaactacaaatcattgcaccaatgtcaattgtctgaggagtcatctaaagatgtgtcattatttagtttattttcagccaacaaaagaggtactcagctgaaccgattgataactgtttgagagattcctaatagttgactttttgacatccatatattcttcatataaatgatgaatatgccatacaatttcgtgca

SEQ ID NO: 83454 - DNA, 528 bp, Cannabis sativa
tcttttaggaaagagacggccatggagggcttttctattatatggtccacctggaacagggaaatcctacttggcaaaggctgttgcaaccgaagcagattcaactttcttcaggtaggataatttccatcaatgctttatatgcgtagatgtaaattgattttgataattaatggaatgtgggagaagaaatattggcttttattgaaagaactgcagctgattttttgagatcaaaacccagaaatgtcgcagcattagttcaagagattcccatattcttctaaattttaccttcttcttcctttttgtgactttcctatattcttctaactctgctcacatggcaaaaacgataaaaccagcactaaaacagaacaatacagcacatagctactctgttcacttagacttttaacgctaaaagtattaagatttcatcactctacgacaacacacaatcacttcttagacccaattcttctttctcacattagtgtatagagtggaaagtttatcagatagcaa

SEQ ID NO: 83455 - DNA, 1543 bp, Cannabis sativa
tcgtcgtcattggctagctcaaattgctctcctcgcttgcttagccaccaaatccaccaactctttcacttcacccccaacgtcgatcgaatccagaggaagaacgtccagagccgtcgctacagcctgaaaaagaattctgaactgagatgcgacaaacttgcacttggttagaatccatagcctggaaccttcacgggagcaatcttctaacaggaactgaatcttctggaaggtatggtgaatttcggagaggcagaggagcgatgagtctgagagaatcgagcctcggtccaaaacctcctcaaaaaagacgaggagtactccaacctgacgaatagcttctctggcgtttcttctctgtgatgcgaagagcttggagtggaaatcgcatatagcttgggatagagaaagaagtgagcttagcagagtcccctgtgaaattgcttcgcagggatgaaccgccgggaaattcaagctccggcgatcattctgatgagatctttgaatcattgaattgaagaagaaaaattctaatgtttcgatactttgaagaatcgtaactgaatgaatctgtatgttaagtagttacgggttcaggtggcacaagataatatcaccaacggtggggcctacctatgactatgaataggtacacgtggcagccactggtacggttgtcgtaggtgaattttgaccgcgtgaagactcagaagatgaatggaaacagggtttcagcgcgacacgtggctggagacacgtgtggtgtttgtgttggcttttatcaggtttcttggatcgagtccatctgtttagagttagttagtttggattctgtaaaaaatatcgggttactgttccaagtcgtacggatactgtgcgtttgttatttaagcttttttattttcgggttttagaacaatgtgaatgtggtcgtcgtttttttttattttgttttttgcttttaaatattttgaatttgagtttgagataggaaaggaaggaaggaagtgacgagttttgtgggacctagtaaccgactgggacacgtggccgagttaacgatgactcgttacctgggtaatgggttctgttatccgagtcagactattcaatcctacgtaatcaatggctgactttattttattctgtattattattttttttttggatgattttttatttttgtaaattgccgaaaaataattgataagcaaatgaaagaacttgattatgaaggtagaagataaatgagtagtaatggtgttttttttttctttctttctaaagaatattgcttttaataaaattgatcaaaagaagtatctaattacaaaatattttggtttctaatagttgtttggtctatatattctcgtcttctgaagaagttgaagataaattaaaaatttgtaatttttttgtttagttgtctttctacaaaaaaaaaaaaaaaaattataaataaattcaacaaactgtttggaatatatcatatattttagagcaatttgcggcgaaacccccttatgttttatttttt

SEQ ID NO: 83456 - DNA, 608 bp, Cannabis sativa
tgtattataagagctatcattctgtgggtataagagtccaatagaaatttgaagcggggacgttacaaaatagaattgtgatgatgttgccaaagaaagtgaaaaaacataatatagcttatacaccaagaatgaggtgatatcagggccgatcctaagtaaattttggaccttggaaagaataattttttgaaccttttttataaaaataaatgagattttaaaatttattgaaaaaaaaatgtatatttatgaaaagattttttttcatttggatcactgatagaagtagaccataaatgcaaacttagcccaccttaatttaggactagcctagtgatatgtggtaaatgtttgagttttgatgcaatatatctccaacagctgttataacaaaagaaaaaaaaattgtattttgccttggcttaaattattaatagtagggatatcatataataaatcttatcatcttaaaatagtcctcccaatcccatattcccattattattgtcacaattaataactatgaatattattattattgttgttgttgttgtcatggcttttcaacaacatgaaaaaacttgtacagttggaacattatgttc

SEQ ID NO: 83457 - DNA, 1044 bp, Cannabis sativa
tactcatccaaactaaataaaaatactaattaactcgattggatgttagatatattggatttttgggcacctcatctaccatctgatccaattcaattggatatttaaaaataacatccaatctcaattcgagatcacaatagatctttctaatgtttggcggtcggttgtagttggatcagtcggttctcattagattcgatcgatttatacacacccctacacacaataatgcatagatcaagtcggttctcattgtgacagtcagtagtccttagatccgtaaagaaaaataacaagtaagatgtgcaatcccaaatcgtcgtcggggaaagatcaagtgtaataggcataatgagattgaaattgacaataacaaaaggtctaagattaaaggcaacagtaccggttgacatgcagtcggttttactcactaatgttttgtatgtgatatgtaatgttatcctcattatgtgtacattgtatacatatgattaatcgagattatatatattgagctttgtatttccttaatttttcaataagaaaaacaaaatcaaattatatgtaaagttaaaattttcatatgtagtttctaataattaacattagcaaaattaacaagaaaatacatatttatttattgatgatgtttaataaatcaaacagtacatatcatatgttacagaacaacacaacctctgggatttgtgtcattgaacatgtactggagttacacaaatgagtaacaataattaagaaaaataaaaaggacaaaagataatgttcttgttttttattatttaaacattaataagaacttagaaaattaatatgaatgagatctcttaattatgatatcatatcaaaatttaagcatgcatgttcccattcccatacccaatgaattcgaaacgtcacaaacgtagggctcgcaacacttttgtcccaagctttcgttacaattttccatagccgaaccgcaccctagtagtttccttcccaccgccgcatcttcatgcagaagctgctcggaaaccacct

SEQ ID NO: 83458 - DNA, 539 bp, Cannabis sativa
ctgaagaattgtcttctctatataagataactaactttaagttataattgttttgtagcaaaaatatataataagttataggtgataaaaaagaatgtataacaattcaaaaaaaaatgtgagttataattaatacaaatatttatacttgaaattaggaaaaggatagcttttttttcaataaaatgatattttgttctttcataaaaaaatcgaacttaataaaataacattttgtgatcgcgatttggaatataagtttagtcctggcttgtttttctttttttaatgaattggtgctttgcacctccattttaccaaaaaagaaaaaattagtaataaatctatttcaagaacaattatttggtttgttaaaaaacaaacacattttgggcttagtgatcaaagtattttgctctgcaaaacatgaaatttcattgtatactcattttactttacttattttaatttttaccttcattttcatattctttgaatatacccacttttatagataatgtctccattaaaccccttaa

SEQ ID NO: 83459 - DNA, 886 bp, Cannabis sativa
tgttggagaagacaaccaatcaaaatgatcggttgggagattacaactcaaatttagtcctccttgaatgaatactatactgccttgaatgctgccgacgtttgtctcttcaaaactcaacttcaaaacaccaagatgactggttgactgaatgactacctccttaaaatcaaagggatagttaactaccttgccatgatcagtcactctcaatctgctcaagatcatattgaaaccattttcaatggtcttccttctgagtatgatgtctttgttacatctgtgacaataagaaaagaggcctataatgtggctgagattgaagctcttctaaagggtcaattggtgtgtattgacaagaaagaatcttgatatcaacaaaggtgaggctaacctttcacacacaaagcagtgggggtacaatcctttcatcagacctagtttctctagttctcaaaacagtctttgtatcaacaggagtgctactggtcctactaacatgtatatggtggtcccccacatcagtccctatctcgtggaaatggcgcctctgctcctaccagaggtggtcctgctggtcgaggaagtgatccccctggctttggccgtggttcaaacaccaattatggacagaaagttcagtgtcaactctgtcacatgcttggtcacactatcaaacagtgtttctatcgatttgacaaaactttcacatgccctgaatccttcaacaatttccctgctactacaaatgttgctgaaatgcaagccttgtatgccacatctgaatttttctgtgatgaaaacgggtatcctgatactggtgctattttaattaacttaattaaactcaagctcattaatatttaatggacaaatcgaactgaaa

SEQ ID NO: 83460 - DNA, 1036 bp, Cannabis sativa
aggaagatacttgttccaagaaccttcaaaatccattacacacgctctcagcatatccttaagtatctgaatagttctctcagactaaccgtcagtttgaggatgaaaggctgtactaaactttaacttggtacccattgctcgttgtaagctttcccagaacttggacataaactttaaatctcgatctaaaaatatctacttcgggacaccatgaagctaaaatatttcctcgatgtataaatcagcatactgatccactgtacgccagagtattaagtgcatgttgtattatgactggttgaacttatagtatggattgatgctactaatatgtactagtatgactagagtaatcagtgcgtgtggtattatggtcaatcgtactacggtcaataacattcgagactcagttatgcatgtttgacatggtttatgacttgttgataggtgtatggggcgcttagctacaagtcggttatatgttatgttattttatacttttcttattgagtctatcgactcacaaatgatatgttatgtgcaggtaaaggcaaagttgttgttgaacggtagtgattttggagctggatgaagattgtacatattgagacagtttgacttggagtgttagatcttcgggacagctaggactcacaattctgtagtcgttgtgcgacatcttttgatgattatgtacaattagaaatgtagatacaggatcccaaattttataaatgtaatgcactttatgtttatttattaaagtttaaactaaatcatgtgttcattaatccctttgattaacaaaagttgtacaataattgagaaaaatattgtagcatgcctaaattagtatggtgcaacaaaattaaatattatcttttattttaaaggattaattaaaaaaaaaaaattgtttataacattatatattttttatatatcagaataacaaataaggcagttaataagctgagagaaataagtgttaggtttgagacaaaatatgattaatttctctctctctctctct

SEQ ID NO: 83461 - DNA, 937 bp, Cannabis sativa
taaattactatttttttatattaaaatattaattgtacatataattttttaattttttttttataaatatatgtagattgaactggatcagttattttacatgtcaatcaatattcaattttccaacccaatctaatctacacaagtacgtatatccacacttttataaattagataagattaaatcgtgcaaatgaattaaattagttattttataaacatccctaattctatgaaattaatacttaatatttatatagtgcacactttgggtatgaataaatattacaatttcttggttttttttccaacggctagtattcttttatccttatgatagaaaatatgataaataaatttgtattctcactctttatattaaattttcactttaaaataatattagtttactgtacttaaagcatctctctaaccttaacagttaatttagtgtcatgctaaaactaaatttggtgttaaaaactcattccaatcataaatactaaaaatacactaaaataatattttttttagtattatatttatttttaaataaagtagaacaaaacattacattaaattaaatcttaaaaagcacacacttaaatgattaatcaaattatactagttataaatactaagttaaattaaaaaaaaaaacaaaaatctatgatttatttaaattgtaattaaaaaaagtaataatttgtgatatttataatttaaaccccacaaaataaaccaatttataaatttagaatttaaaaattgtatttttgcatatgccaatctatttctttaataattgtaatgatttgcagtaatagattgaaaatgtgttactccaaaaaatagacttgcagtaacaaagcgaaacataaataaattgtgtagaatttaaaatttgacacaaaagaattatacgtggtattagtgt

SEQ ID NO: 83462 - DNA, 651 bp, Cannabis sativa
aaaaaaaaaaaaaaaaggaacaactaaatattaactagtgctgtctggggtttccaagagaatcgccaacagtaacctgttccaggtatctggtactccaggcaaacaccagtggctacaatcagcaaaagtttcaggctttttatgctgagactccatcaatttcattccctgctttgctttgtaaatacttggatgtgcatcttttctggtcccagacaagttggtgatgttcaaataagttactggagtcttcattgtcagaatggctctttccacaatctcgacaattcgtttcggatatggagggaggtaagaatcgtccatgatgggttgtgtttgattgtagcaaaatacttttcctttgtgttctggtgaaatgctacgaaagaagactcttgttttggtcgcatccacgtttgtatcaacccaacgagaccaagtctccatggccatctgtaattcgaactcaccctcctcctccatttgtttccaggttttcgacatgtttttcctgcacatttttattaccttaaagacggcttctttaaccataattttttcaaaaggaaaaccgtctaaattttggtaagaagtagctcatttcaagaaaattcaagggcatatatctatgctaatatcttataaatc

SEQ ID NO: 83463 - DNA, 587 bp, Cannabis sativa
aataaataaatttctgtgtagatttgagaagatgtgaatgtatggaagaaaggcgcgatggtgattattttcagattcaggtgatctttaatagatttttttacatatataaaaaatttggttatataatgtatttagataagtttacataatttgattattaataaaattttataatttattaaaaaaataaatgtttacataatttcaatttatataactgcacgtgaggatagttagattgttattttaatttggctatataaacaaaaattgactacaaaaatacttattttacaattttgcatgctaataatatcattgtagttttttcaatagccaatttgggatctatttccaaatccaaactacttgagttgattatatcataattcatttttaggtaaaaaaaaaaacatgtttaaaagtgtgcatatgcacccctattttgtttcattgaaagaactttttttgacttaattttttttatagttaagtacatgttgtggttatttaaaatattttataaaattttaaaaaattataaaaaatttaacatgctcaaaaaaaattacaaaatatcttaa

SEQ ID NO: 83464 - DNA, 1576 bp, Cannabis sativa
gtctctacaaaattgctcaaactttgtgctttgacatgaataagacctgtcaagaacatgttagaggcatcataatcagaatcagaacactttccatttggagcactcggctgcccagtgcctgggcaacctagtgatgcactgaggacccaagttgacatattttaaacctagggcacttccaactacaattttgaagaagtatgctgagtattttcttcttttctgtccaaaactaagaatcaagtgcttttgggaaagaaacagatcaacttgaggctaaaattgggaccccacaccctggttgacatgttatcaacctgggccatttctagtagcagtttagaagaattctttcggttatattctctggtttcttcaaaaattagatttggttactttttagaaacaaacggagccatctaggagccaaaactgggacctagcgcccatgttgacttggtgttgtgcctagcgcatagttgacactttgtcaacctaggtcatttccaaatagttttttagaagtcttttgggcatattctctgttttcaccaatagttgagatgcaagtgtttcaagggataaaaaaaaatcatttggtggccaaaatcttgaaccatcacccatgttgacattggcattgagcccatcgcccaggttgacactagcgcttagcctagcgtccaagttgacattttgtcaacctgggctatttccaatcacatttcccaaaaagtgttttgggcatcttttctattttttagaataatgaagatacaagttatcacaagagaaaatgagatcatcttaggtttgaaatacagacccagcgcctaggttgacatgcaacctggtttacatgtttctgctcctcaaacacaaatttttctccttgcattcttcttatttttgttaaaaatggggttggagacgtcattcgcaatctcaaattccataaaagtatcaaaacaagccccgaggagtctcctgaagagcacccaatgcctaagttggcatatggcctggtgagctaggttttgcttaatcttatttcaatgccctcgagcatctaaaactatttttttttttgtagtaaacaagagatgtgacttgtgacaagtcaaatttacactttgatattttaccttttttgcaatatggaatattggcaaaattggggagtttcgagtctactcaattttataaaaaaacgacatctcaaagaactggtgaacaacttcaccaaaatgaagaaattgactaagtgatgtcaacatatcactttggcatccaaaaatataagtccgagtcgttttttcacttacccagcatctaggttgatgtcagaatgttaacctgggtgaacaacctttaggtaaaacggtcataactccctcaatatcgattcgattgatgcgattcaacttgcattttaaagaacttttcaaaggtttttcaagtaatgtatcacaccaataccacaattttgaagatttaaagtccaaaatttgtgcccaagacaagtataattttttccgtagattacccaaaaacgatccaacggacaagattc

SEQ ID NO: 83465 - DNA, 627 bp, Cannabis sativa
ccaacatcttaagcagcagaaatccaataaaaaattctccctaaagaagccaaaagcagacaaaggctaaaaaagaaaaatcaataaagaacgtaagtaatatttcttgctatttctcaaaaagagaaaaaagatagaaatttaaattgaatacagagctaatagaaatttgaattgaatacaaagctaaatgtttactctatcaggttacatagaaatctgagtcctccttttaatgcttactgaattcagggctagcaaattcatttcctttccttttcgtgccctagttacagaaaagactcaaattttaaattaagattgaattaaaaaataatataaaatgagagtgagagagcgatagagacagagaaacaaagagaggtcgcctaagattgtgagagggagcgagacaaagagaggtcacctcatgaatagaattgttagagagagaggtcatcaccgtagctgattttatttatttttttttattattttttttttttgcattagagagaagatgagtgagaaattattattcacctaatgatggtattttatatttatagtgtgagaaattattattcaccataaaaagtaagcaaaagatgagtgactaatagaata

SEQ ID NO: 83466 - DNA, 1856 bp, Cannabis sativa
  modified_base (48)..(55): a, c, t, g, unknown or other
  modified_base (1818)..(1825): a, c, t, g, unknown or other
ttataaggtctaattaataaataatcaaatgacaattttatttgatannnnnnnntaattattaaataaatagatttggcatttaaaggattgaaattaaaaaatgacatttgtaaaagaaaaaataatttattaaataaaatggcaaaattaaaattagtggggtccacataagggcatttcaagccattatttttttttttcatttcatataatttaaatcctaactctagttgaaatcctatataaagaatataatggctctcattatcataacctacatcaaactattctatcagataactaagtattgagagcctctctctatatagaattcaaaattcctctctccctctcttcataatttcgaacccactcaattgaagtcaatactcaatcagagtgtggaagattgtgaagaattctaacactaaaggagatcaaggttcagatcttggcaatactctgttacagaaaggaataagggttagagatctgaacggaatgagccataatattccgatgccaccaatgtaaggtttttttagaactttatatgtgtttatttcattgttttaagaaattcatgtttatgatgttagattatagaatataatcatacatacatattagtaaatctagatcctggtaaaactagttccaacatgtatccctagcttattggagttatatggtaaccactgcagtgtacctactgttttaattaatgataaaacatcttatgagttactgcatcgaaagtcaccactctacacacaccttcaaaattttggttgtctagcatatgcctcatttgtcaccaccaaaaccaaaatttcacctcgagctagaccatatgtttttattggttatccgcacaatatgaaatcctacagattagtagatattcaaacgaggaacattttccattcacgagatgttgtattttatgaacatatttacccttttaaaaatatcccccataatcaaaatattgatgacttctttcatcactgtcctaccacttcttcaatcaacatccatgaagaaaatcaaactccaacactaattcctgaatccatccagctcccaaatctccgtttcacaatgctgaataacacacaaaaaccagtcaccaaaatttgcaccaaatcaagtcatgttcatcacagaccatcccatcttcaagattataattgtgacttggttactcattctagcactcaatatcctctcaccaatttcttatcatatgacaattctctcccactttttgagctgcaatgcttgctcttaatctattttcactactataaaattaggctttagaggcggtttttaaggcctttcagcgtcggttttggcgaatttcgctaccgacgctgttccaggtgatgctaaaagggttaaaaacaaccgacgctgtaaggaccccatggcgtcgattattatgaaaaccgtctccataggggtttcttgtaatttttttttcagctttaaaattttgtgttttaacattttcttttatttttattaaaaatctaatttattttttcatatatatatattattttattattaatataattaaattaagtataaattatatataataagtataaataaaaattaaattaaaaagttaaataaatacacatttacattactttaagtgtttgtttataagttttttttgttaaaatttttatttttatataatatgtgtttgcattttttttagtatcttttttataattttttaaagttatatttggtataattattagtatattaaataataaataatatgtaatattnnnnnnnntatgtaatttaatatttttatacatttaaat

SEQ ID NO: 83467 - DNA, 971 bp, Cannabis sativa
tgtattgagtgtcaataataacttttaaaggtattattggtgctcaataacgcccaatgttcaattttcaatacatgaacaagctttaattatataagtcaaactcaaatgggttagtagactgagtctatctcttaaatcacaatccaataataatcaagttacgtagtcataaaaagacagaaaccaaaagatttgagttattgattgattttaccatgtcacactcacttttactattcaaagttttaaccttttcttcttcacaagcacattacatcacatcatatcttcgtttttatttctttcttatccttatcatttgtttgttttcatttcttgccaaagtggtcggtccaatcagacactttcatttcatttaggtacttttttttgggtcatcaaaatttcaaaatttgaactataatgcttttaaatataaattaataaacacatggtaaataataataaaagatctaaagatagagaatatagaataattatataataataataataaaagaacaatcttttggggccaccatatgaccaaaatctatacaaaatataattcacattaaaatcttaggaaatacataacacaacacattccttttgctatgttttcacttggtgagattcaattatgtctacattttcaacaccatattattattattattatccacattttgttttaaattattattttctttgaagaagcaaaaagtgatgaagtgaaacaacatatgtgagcctatttacatcttacataataagtacccctaatacaaacctccccaccccaccttatttttgtacctaaaatcttacatcttctatacaagagatacaaaatccccacgtgcgtgacaaagtcaactcttaactttttttactacagcaaagaagtcaactcaatagtagtgactgttatattatttttaatataataatatgtagattaaaat

SEQ ID NO: 83468 - DNA, 534 bp, Cannabis sativa
ttgcgaggcacaccttcgagataaagctaccgtccaggcatagaattatggcacggaccaagcaaactatgaggaaagactcagcatccaaccctcaccttgctcggctatttcaacaactaggtttgaacaagctaggccatcgagcgaggatgttgaggttgtcaagagggacattaatgtccaatatattgaggactggggcgaggtccatccaaacagtccctctaaagttgaaggagaagaagaagaaaaacaagaagaggttttagcactcccctttggtggttacaatgaactcggagaacctatctccaagctagggtaggtcttggtggtggatcgagattatattgaggaggaatacacagaggctcagcctctaggcacttgaggttcgaagggtcctcaatgggtctctttaccatccgtgtttacgtttaagagattaactaatctctttgaagacggcctcctcgggaaggtagaggcattcctacctagtcctaagtaacttgccataaatctcagagg

SEQ ID NO: 83469 - DNA, 833 bp, Cannabis sativa
cagttattcccttgagatcttatcctttgtaatcgttcgtgaaacatggacaatctccatgtttcacatttacatcacatgagataatgaaaaataactactcataatcgctcttaaaactttatctgtaagcgtttatgcagactataccttattcttctcacaatgcaccaatctcttcaagacgctaaaaaaggattgtcattgcctaagtatattttaagtagtacttcttgtattcttccataaatattaaatgaggcaaacgtgaaacgtttatcagagtatgccaattatgagatgaaccatattcgaaatgttatttttagcctttcaacatactcacgagtatgtgggtcaatgcgctacgagctctttgaataattcattatacatttttcaaacattgtcattttattatgtatttcgtgtatctcgagatggacatttttttgcttatatcgttcatctcgctggtctcatcagtcaatagatattattcatggctcgccattatctttaaaaaatgtgagtttgaatgttcaatatttctactaattgtactttccaagacgagttgtttgaatgcatttattattttataatttgggctggttcatattccaacttccttacacgtgtcaacactatattattgctcgagatatgagtataacactaccttaattatataattatatcaatataaaaataaaattttagaaacaaataaaacaactcaaccgaaaataaataattaaattataaaatatttttatcaatttaaagatgctaaatataaaattaacagatggagattaaaattctctcca

SEQ ID NO: 83470 - DNA, 1491 bp, Cannabis sativa
gttagggcttgaaaatggtgatcgcgggaagcaactgttgaagacaaaagaagcagaggaaaaaaaattcaaaaaaaaaaggaaaaatggagttatgaggtggcgtgcgtgaacgtgtgaagaaaagatgacatatgcatggtaaaggtagttttgtaattatgaaactttttgaaaactaaaattgaaaaatgtaaaaggtataaaagtttaagaaaccgtgtaatgccaaaaaagtaaaaaaatgatgaaatgtggcatcaagtgtaaaaatctcaactattaatgagtctcttttatatattgataaatttctatgatatttttgtttatattttattctattaagatacattgtttttggttattggttggcaatgttatcttcagacgattcagatatttatttaaagatatttaagttagatgtcaaataatttgtaaataattgggcatgaaaaatttatttaggttagaagaaactttttctttcatggaggtcagcagggtattgccaagggctataagtcttcttgaccgaccactttaaatttttaaatatatctcttgccccaaaattgatatcacaacaatgtcaccagcaattgaaatttaaaaataaaaataaataacttattttctttaatatatatggtgtcttttttttaaaagaaaaaaatatgattagtgtaatctcattataattttatagtaaccataataattatattatttgacatatgaaataaatttattaaataattaattttaatttagatatttaacaagatcttttttaaaaaaacataatttttataaataattttatttttatatttaagtctatattataattttttttaacatttaaactatttaattataataattataataaaattttattttttacaaaaattagacttctacctcttttaaaataaattttttaataattaactatttttcaaaatgacatctaattatttttttttgtaacaaccgcttgacccatcttccttataaaaaaaaaaatctcaatttcaaaaattagggtttcagtctatcccgacctaagatcatgtgaattttctactttgatgcaatttcctacatctcagccacaaactcattcctccgattcactagctacagttagatttctctttgattttttagtgatttgcttgctattttcctactattgcttagttgtgataaagaagcaacaatcttaattgctatttttggctagcttatggacaacataaggtcgaccaacatgcatcctataagtgcacgaccgaccagacattggcctgacaggactttggtgcacaactttacacatggacatcaagccagactatgaattgggccttaacaaccgacaaaaatagatggaaaatatctattttcaagggatattttagtcatttgtattttactaatttaatgtgtaaatattagcttattttacctatttctaag

SEQ ID NO: 83471 - DNA, 750 bp, Cannabis sativa
taattattatttatacaacatttacttaaattaaaatttaagtaactctaaattatctcctctttatactattaaggtaactatacatatgatataatatatatatttagtgtttaattatacaaacaattatactatataatatatattatatataacataatggaagagtatatatatatatatcatacgtttgaaaagtatataataatatataatatgttcagccaccataaataattcaggtgtactactgcgataaatcaatgtaacacaagatttaaaattaacatattttctaagcttatataatcatttttgttcctaattaaatacaaacacatatatatacatacacaattattagcacacaaataataatatcatcacacataaattattaatattagactaggtattacaatgtttacttgaatgcaatactactagtcttatcattaagaacttggaggtcaatccataggaataccgactagcaccgataaagttttataagataatattcaactataagagatattgttttatgcatcgacattatgtatttaaagatgaaaaagaaataattatttaactaagtaggagattgttggaattgtttaaatacttaaagttaaaacatgaagattaataaagactaatcaatgagatatatttttttttttgaaagaagtgttctttattaaatcgagcaatcgctctcaagaatagacatcaagtccgtaggaa

SEQ ID NO: 83472 - DNA, 839 bp, Cannabis sativa
cagacatgggatttgaaagtttccattcactgtgaaggttgcaagagaaaagtcaagaaaactcttcagaaaattgatggtatattatatatatacttaaatgtaatactaaaagcaacactatttaagaatggcattgtaaagtttcttccttttttttttcattttcatgcaaaaagctctgttttgctctgttcatactttaattttggcaccattttctcaggtgtttataccacgattatagattctcaacaacaaagagttacagtcactggtaacgtcgacgttcagatcctgatcaagaagctggtaaagacaggaaaacgcgccgaggtttggatatcatcagagaaagaaaaagagaaagtttccgggaaaatcaggtgatgaagaagaataagaagaacgagggaaaagagaaagacccagaaagcttaaagaacaaagctgttaatccaagtaacaaaacagaagtcaatgctactgaaaacgctgcaaaaaatgagagtgaaaagaaacagagtcaagtttcagccattaaaggaaagtcgccggaggagtctccctccggcgaggagtccggcgccggtgaaaagaaaggtcaaaacaaggtgagtgtagtggaagaaggagaagttaatggtggtagtggtggtggtgggttaagtaagaagaagaaaaagagagggcaaaaaggtaattataacgagaatggtaatgtcaatggtgggggttcaacgagtaataatacacctgcatgtagaggatctcaaagtacaagtcaagctaaccatagtctacgttatacgtatccgtatgggtatggtccagtacct

SEQ ID NO: 83473 - DNA, 575 bp, Cannabis sativa
tagttaaatttcagaggattataaatccaaatgaaaatgagttgaaattccctattgaacagcaaatacttcatcatcaaatgacaatcacaaattcaattaattttaagttataacaacaacaacaacaacaacaacaacaacaaaaacacaattgtttcatcttaatttaccgtcagattgggcagagaaattaaaaaaatctgggcttgggtcgtgtttgaggaggtgtgagcagaagtccttagacatgtgtaagtcgaattgtagggtttcattgagaaaagagtgaagagtaaacttaagaagctcttcgatgcgatttctgaggtcaactgcagacatttctctagagcagaaaatgaactgtattgtcttctaccagctataaaaatctggtttttttttattggcctttgtcccgttatatgcattttttcttaaaaaaaaaaagtaaaattttattatatacagttatagactatttaatcacttttttttttttgacatgatttaattactttttcaatacataatatatgataaaatggtacataaataagatagggtgattc

SEQ ID NO: 83474 - DNA, 807 bp, Cannabis sativa
tctttggcttgcccatggggatcgaaacacaaagtactttcattacaaggcctcacaacggaagaagaaaaacatgataaaggggttatttgacgatcaaagaagatggtgtatggaagacagtgacatagaggcaatcctagtgaattattattcggatcttttcacatcttcggagccgaccccccatatgagagacatcctctcacggtgtgtccctaaccgaatgtccttgcaagataacgaaagacttatggcagatttcactttagaggaagtaaaagaggctatagctcagatccatccccttaaggcctcggggaaagacggtctcccagggttattttaccaaaatcattggaaggaggtgggtttagaagttttggctatgtgcttgggagtgttgaataacaacaaggactgcagtataattaatgacactcttctctgcctaattccaaaggtgaaggagccaactacggtgggtgactatagaccattgagcctttgtaatgtaatctacaaagtgatatccaaatgcttggccaatagaatgaaactaagtatggataaggtgatttcggagaatcaaagtgcgttcatcaaggggagacaaatacaagataatgccatccttggttttgagagtcttcattgtttaaaaaaggggcgttttggaaatgggaggaaaatggcccttaaactagatatgtcaaaggcatatgaccgggtggaatgggattttctagaagaaatgatgagatgccttgggtatgatgctctatggattgccaaagtgatgggatg

SEQ ID NO: 83475 - DNA, 746 bp, Cannabis sativa
aaaaaaaaaaaaaaaggaaaaaactacactacaaagagagaggaaaaaaaggaaagataagatttagaaacctcttcaggaaaaaggattccgttggtcttcttaatagcttctgccctgtatgataaaaaaaatgcaagaaataacaggttatgaaaattttcaaggcagaaatatcaatccactcatcaaagcttgtacttacatgtctcctccttcacagtagcctataataatgcatacatagcaaccctgacaacaaggtgaacaacgtaaacagttttagtccacaaaaaattagccaaaaaaatataaaaagcataactactataaactaaacagatttcctcctagaacaagaaacagaaagcaggggctttatacagaatgcagccaattaaacaacagcacaatgtggcacaaaaaaaattacagaaataaacaacagacaccccttgtaccttttctacccacgaatctttgtactctacaatgaatggatttcgcaatttagatatgagctccatctacacgaaccacgaaaacagttaaatgttgctcagaagaattgtaatcataaataccagttaagattcacgcttaacagttattccttgttaccctccttacctgtttgcttctaagtagacagtaaagattagtttttaacaaagggatagacaatgagtggaaaatgaaataaccaagtgtatatccattgctgagacacgagaaccaataccaac

SEQ ID NO: 83476 - DNA, 1340 bp, Cannabis sativa
  modified_base (1313)..(1314): a, c, t, g, unknown or other
tacatatgaatattagaaaatatgaattccataactctcaagaataaccaactaaaacgaaattctacactttatctattgtattttaacatgaatcattaatactatcaatatataaacctaacttattccaggccaaagtttcgaacttaaattttcccatcaatcaaaactaaacataacaccaaaggatgagatcttaccttgattactttgcgctagcttctcttaagaaatttctctagatagaactcatcttcaaatgtcaatatttattaatttactaatagtaaaggaaataagcttgattgtggttatgggcatactttgtcgtatatgagcaaagaggaatgagagatatgcacttcttttgttattgtaatgggtaaaattaagatgatggctaattgataagaatgactttgatgagtggcgtagcaaggtgtcatctccaagagttaggaaattaaaattaagataaaaaagtcaattaatcaaatctaaccaactaacagtatatctaaagaatatatgtatatataaatcctttttaactaacggatattaaattatcacttaaaacaactaagccaattaaactaatcaccaacttctactaactaagaaattctaaaaaataattactataaaggattgtaaataaatctcgactaataaataattacaaattctatcacattttaataacttaattaaattccactcaattaactgaaatccaactaaagtgtaccatagataattccaacaaatagctactagggtattaataatttctaccaaataagtctaaatatcgcactctggtatttttcccactatgagttttgactatgttgctcaaacgattttgtacttgctggtaattgataaatataccacataataataatgtgatgtccgagcaccacataattaatttatctcaatactgcaataattttataatcaagttatctcaatcccattaaaatttccaactaaactcattgtaatatttttggcctctgattgggtctccaaggttgccaagtctaaaaatattgttatttcatcaataacccacattatacctacatattcaaaataaatctccgtaattaataatttacggttatttatatacttatagaaaaattcataatttatgctaaattagattaggtcattacaacctatttaatccacaatatataataaatcataattatacataattaggtttctaggaattacattgggcctatataaccgagctttcaataaatagatctagaattcaccaagtaaannctcaacttattaattccgccttgctc

SEQ ID NO: 83477 - DNA, 869 bp, Cannabis sativa
cccaacactggatctagtttaggctaagagaagaaagatcctaccacattcataactacaccaaaaatagtgaggttggtatgcagagactggagccagcaattatattaccactgatgctaagaatctaaatcacaagtcaacttatggaggtaaggaaaaacatactgttggaaatagaactggcaatctctattccaacaatggacatactattattcttaaagacatgttacatgtaccacatatcacagaaaagaattaattagtgtgtcaaagttaacttgtgataacaagatttttgttgaattttactccgacttgtgttttatgaaggatctagaaacaaaagaggtagttctgtaggggaagcttaaaaatgacttgtatcaacttcaaagtccaaacaccaatcacagtacttatcgaagtgctttcaatgtgtctgcaataaaatctcattctatttttgagtctattattcaatttctagtcttgtttctttgttagatgagtcaaatgtctctaattctagtctttccctcaaagattttcggcattggagatttttccacccatcttttgaagttttaacttaagtgttaacattacacatgtaaaaatttccatgaatgaaaaacaacaatttttgaagcatgtcaatatgggaaatctcattctttgcctttcaagttatctaacagtagagcaaaggcacctttggaactaattcatactaacatctggattccaatgcatgtgattgttgggatatatgttactaggatgtagatttactaacaagtatattggattatattctataatctaccaccctaatcatgaattcctaaaacaatgaaaataaa

SEQ ID NO: 83478 - DNA, 802 bp, Cannabis sativa
aaaagtagtgagattaatttgggtgatgaaagtaaaagggaacaattttagggcaaatgtattcagctatatagtttatgaacttaaaaagaagattgaaaatgcatttgatgtctcactcacggggtatttatatctatataggtataaaattaattaaaattaattaaattaaattaaattgatttatctatctgcaatctattaggattatgatttaggattcgatatccttctactataagtatttaaatatctttcgtatatatttctcttttacaaaaagatattttacaaatatagccaaataaattcaaacttttaatcagatattatttgttgatttatgtatttttacgtaggaattaaaactaaaacctaatattgcattaaaaacaaaaaactacctttaatcgtttccaaattattcaagggaaattacccattttaggttcttttgctattattttttcaatttacgatatttatatcacctaattaacacaagtgtagtacataaatacatgattctaaaacacttaagaaagtacaacaaacttgagactaataaaattataacaacaataatataagtcaataatctttttaaagtttcaacaacacacggcctaaaacaaaataacaaactcaaaattaattaaattccaacaacaatataaaattacaactaacatacaagcaaacacaaacttccaaccagggacggagggactttagcccatgtgtgggctaaagccctcactcaaatatatacatcaaattttttatatatagatatata

SEQ ID NO: 83479 - DNA, 619 bp, Cannabis sativa
aaattctcctaaaaaaaaccttctatcactcctaaaagagggttatctcccaaaatctaacaaaccagtgaagatgccaataattcacctcatcctcaatatcctctttgtctattttgacacattttttttttgaaaccgagacaaaccactccctctccgatcttattttccaaaggattcagaataggaagtgggaatttaggaatgcttgtagcatcttcaatgaacacgacctcttccaagatcgatttccttttctgctttgaatccattatcgtggagaaatcattccttatctctgatttctttcattccatctcaatcttcgattgatcattgtgctctggatcgtcattatagcatcactgtctaaatcagttgtcgagaattccactgcatcactgccttttctttcctagtaatacctcactttttaggtcgccccttccctgccatggcccatttattgttgaagaaggagaaataacctcatatcgttttctaattctgtaacatgagcataactagttgtattatagttattatgatgttttttttttttgtgttttatattttattttaagttgttgggatgttgatttctcattattttttt

SEQ ID NO: 83480 - DNA, 860 bp, Cannabis sativa
  modified_base (48)..(53): a, c, t, g, unknown or other
aaaattcacccataaatttctcataaatcaagaatttcagttatatannnnnnctttatatagaatagatatatgaagataaagactaagaaagtgtttggaaatagtgaaataatgagtttaatttttcaactagaataacgagtctcgtaattaattgacacatgtaccaatttctaacaaaaaaatgatgacatgtcaaacattaccaatccgtttgggttattcttgcaagacaaaaatatgcaagaatgtgcgatcgagacatagtctagtcacacactatgcatgacatatgagtaaagacggcacatccaatcaacatccaatctgcacaaatacagattttagattttccaatcaaattcaatctgcacaaatacggatattcgcactttatgaattgaattgagtgaggctttggcataattgttgcgaaaaagaaaatgcccaaaaataaatttagaaaaatttaagaataaaagaatgatctcgcaaatagtaggaataacgggacttacgagatttctaaaaatttgtataagcacaagggtaaagtcctgtcatccaaaagaactagtctttgagctctttcttgttgggaagatagattatgatcttgcacacgtcaaaatgtgttctgagatagaaaatgcccccataacaattcttcctcgctggagtcactttcagtgtgtatagacagctgatctcgtaaggcgagtgaccttcccatcacatcatgtgatactataattgtagggatttattttatcatgatctaaatttactaacatgtatgtttgattaacaccctaaatatgaattctctaatacaataaaattaaacacataagagt

SEQ ID NO: 83481 - DNA, 1053 bp, Cannabis sativa
aaattaatttattaatttaaaaattctattcaaattaatataatagaaggtaatgattcaatcctaccttttttaaagtatcaatattaccttcctcaagggtggttataatattaagggaataacatttcaagactaaagactcaaaacaaataaagtaatattttacattaccattaccttgttagcattaatttattctaaacactccagtttaattttgaaataatttctatctatttaaattttattagtattggtttttttggtgtaaattgtacaattgttgactcaagttgttggttattcaaagtttttgacgttcaagaacaactatttctcattttgtttgtaaattatatattattgcaattcaaaggattagctcagcgtacttttgacaatcaaacttttattgtctttttcttcctaaattttactcaaaaagaattaaataattatttatacaaaatacaaagaaaacgacataaaataattcttaaacattgaatggatgcggctgagagtgatttattaattaaaaaaaacgtacatattactggatatgaatattgctttatattgtggtattttaacacgtaagtatatgtatcgttttaataaataatacttaaataagtcagattgtttttacgaaaattatagttaagtaccaataaattgaattcttatttttatttcccaataaaatagataaattttgaaactaaataaactaagcaaaaataaataaataaacaaataagaggtttaacaataaatgtgatattagggatatgatttcaattgcatctatttattatggtctaacatgattcaattctattaccaaattctatgcaatagtaggtttactgaaataatttatagtcttctcagatatatataaatctcaattatatgtcaattttctactcccatgataaattaaacatgtaaaagacattacacagaaaccctataagctatccaaaccatataagtactctcgtccaatatcaaaatttatttctattttacgtactatagcgt

SEQ ID NO: 83482 - DNA, 565 bp, Cannabis sativa
ggcttagcaagataggtgttttgagaaggcaccactagtacaacaccaacattagatgaacaagccttcagccatgcattctcaaatgcctgcaaacaaaaaagttcttttcaaactttgaaattacctttgtcaatttattggcattattactctttgcttgcctttatcagaattgattaacttttacttatcaatgataagctttgtaatggactttatcctttagttccctattaaaaacttttcataataataattataatatccttttctttaatccaaatactcaaaaaaaacttccataaactaaaatcaatttattttaacgtttttttaactgggccaatgaaaatggaggaccattactgcaaggtaaagacttgtgagttatcatgatagatgattactcctttcagtctggatatcattgataattttttatgtaacttcttctgaataactaacaatattctataaaaaattattacactaaatcatgagttccaatacttaatttgatataacacatgaaacgttactaaataccattactaccttttac

SEQ ID NO: 83483 - DNA, 639 bp, Cannabis sativa
attacctcaaaaatttaattgggtctgaaccaaccccacttttttttttttttttttttttttttaaatgaataaaaaaatggatggcacgtgatcgaaccgctgggaccgaacccaaaggcgtctttgggtcctttaaatataacccccaaattgacactttcttctcactatcatttctctcagtatttcatcttcctcgaaatctcagtcactctcttctcagtttacaatgggtaacgattcttactgttgagcttttcttcaatcgatcgtgctgttttgattgtttctgcttgaatctgtggtttttaatctgacatttttcgttttcgttttttttttgttttgactagcaccatcagacaagaagatcaagatcggaatcaacggtaatggtttgatctggattttttattctattatgtatgtttgtgttttggaaatggagtattgagaagtttaaatgctgtgtaggtttcggaagaattggacgtttggttgctagagttgctctccagagagacgatgttgagcttgttgctgttaacgatccatttatcaccactgattacatggtgagtaatacacctgtttatatatatgtatacatgtatatgtacatcggtgctttgtttt

SEQ ID NO: 83484 - DNA, 567 bp, Cannabis sativa
tataaggtgtttgatgatagtaatgataatttttgttcaaacaattattttgggaagagacataggccaaaccaaattttgagtatcaccaaattttggagtgcaattttaatttttaagttttttattattttacaagtttacaaatctgatttttttgaaaaaaaaaaaaatatataggaaaaacagtttaggatttttttttttttttttgtgagttttcgagtaactagctgccaccaagtaattagttactttatattgtttttcttttcctaatttttttttctttgaattttcataaaaattatgttatgggaaaaattaaaaaaataataaaagaatataggaaaaacaatttagaataactagttacctcctcatagtgaccagttacctttgaatttataggaaaaactatttgtgttactttatatgttttcaaactttttttgaattttcataaaataattttttgaaaaaaaaaaaaacttatatttttttagacaaatggtttaaaaaatagtgaaatatgtgtaattgtcactaattttgaaagtaaacagt

SEQ ID NO: 83485 - DNA, 935 bp, Cannabis sativa
catgtatattttttcatttataaaaaataaataattaatcactatacgttataatgtctttggtttacttaccatatcgatagtattataataaatgcaatttattatcttcaagaatttgattgattcaatttcaattattataatttttataataataataatataattagattttaattataaatttattatcatttagatatttttcaattaaaatttaaatatgattcaattgaaaatttaaatttaaatataattagatattttttaaaataaatatttcatttattattatttttttctactttaatattatttatgattattaaatataaaagaattatctcatatacaattctttttaattttctttttcaaatttacggtttgggttgttgcggtagtttctccggtagcttctatgtgagttactatgtagattttggttgcgatttaagttgttctgttagttgctatatgaatttttatgtgaaattctgtaaaaatgcaaagtaaaaaattattttgaagtgtaaaaataataataaaaaaaaactctttaaatatatatgtaaaatttgaatttgaattattatttaattttataattttcattttaatatacataattatgatattattttattaaaatataaatataaatgtgtttttttttttgagaaaaaaatataaatgtgtttttaggatgctataagttataatagatatcaatttaaaaaaatcaataataattaataaatatgtattattattttaaactttttggaaaaaaaaaaaattacaggtgtaaatcttaatttttaaaggtaaatgataaaagaaaaaaatatatgtaaaatttattatgtatatcaaaatacaacattcaatttatttagtttccattttttgaagtgagaagaagaagaaga

SEQ ID NO: 83486 - DNA, 538 bp, Cannabis sativa
ataaaaatacttaaaattaaaaaatgtcatataaattagttaaacttaaaaatatcatatttaaataaacaattttaaaaagtctataatgagtgtaatttcctcataattaaaacaaaaattaactaattgatgtttatacattttgtctaagaatctctcactttcctccacggtgtggaacaaaacaaagtaacaaagtgatatagtatattttctaaactcattgaaattttttgaatgatattgtttcattttgttatagtatttttggtccatgtgaactggatcgtgctaaattataaatataaattgggttatcataacatgccttgtaaaaataaataaataaacttgcaaatgaatatggaataatttgactttatatggacatgtgtacacataaaactttaaaatttattttaaaggatagttatctatagttgagaagagaggtcatgggttcgaacctaggaactttaagctattaagctaatatatgattgtaaaaatactattacgctacactcaaaaaaaa

SEQ ID NO: 83487 - DNA, 1271 bp, Cannabis sativa
  modified_base (688)..(690): a, c, t, g, unknown or other
  modified_base (879)..(879): a, c, t, g, unknown or other
cttaaatattttttcatataaatatatttttgatatagtgtaaaaaaaaggtatttttttaatattttctttaattaaatggctaaattaagtataaaaatccaaatttcttaattattattcgctatcgaatcaaaatttaatagtttaatatttttaaaattaatatttatataataaataatacccactaaaaaatattgctaatatatattacatcgatcaattgtattataattaaagaaaatatttaaatgtaccactattttactattttaaaaaattgataatttgtaaaagaaaaaagttcttctaaattaagtttaaaaaaaaaaaaaaaaaggaaagtgtaatgtaaagtaattatcacctgtggtagtggaacaatgcgaaaggatgacctccaaaagcaattaccaccacattaaaattgaaattattatcttttgtagatgtacttgttagccggctccaagcacttacttctctcatttatataaattagattgaagttatgtttttggtgtagtatattttgttttattttagatgttataaattattgaaaaattttaaagtgcatcctcttaaaatagatatattgatgcatctctatctgttttaatatccgaaataactttttagtcaaattttttctcatgggcatgtacgttataattatttaagnnntcctgcaaaattttaaaaaatttggaaaagtttaacatgccaaaaattatgttcaaacagtgtgttgcactcgtgactattttattttatacgcgtgtacaatagactgtttgaacattgttttctatatcgtaaattattctgaatttttcaaaattttgtagtatatcttaaatagctataacgtanatgaatatgaaaaaaaaattagactaaaaaatttttctggatgccgaaacaagttaaggatgcaccagtacatccattttaagggagtgcattgtagaatcaccctaaattatttttgaatgatacaacaaataatcatatataattaatttaattttgtttaattttagcccttataaaaagaaaactagtgattaattgaaaaaatatatatatataataaatagaagtataagataagtataagtctttgacttattttttttaataagaaatgttttttttttttttttttgaagtgtttgtatattattaaaaaaaaaaattataagtaaattaagaattatataaattattttagttataaaaatagcttctcaaaaattctttcg

SEQ ID NO: 83488 - DNA, 552 bp, Cannabis sativa
gaggggctggctagccatactagtcccaaagaggggctggcttaccaatgttgtagtttaacactaactttgttttgttttgttttcagaccttgatgaaactgaactctgtctgcaatagcccctggggatcctcagatctttgggagaaagtgaagaccatggaggcttccatcctggtgaaggacaaaaccatgtctgagatcgaggctcaccttgtggggaggtatagcttgatttcttgcctagagaccatgtttggtgtcaaaaacaaggagaacaccacacaagttgcctttatctctaggctggagtctaaactagcaaagcttcagtagagagggaaggaggctcttgatgtccaataggccataagggaggagtatgtttacttatcctccaaactcatttatgagttcaagctgcataaccccagagctaatctgtcatacatgggcagtgaggcttttgtggagaacatgttcgcctaaggaaaggcacccttcaagagctggatggaagtggaccaggccgccacctattgagaggggt

SEQ ID NO: 83489 - DNA, 522 bp, Cannabis sativa
gcaaaagtcaaagcactaaccatagcaaccaactcaagaagtctattagccggggcttcaacattcaagggtgtcattgttgcagaagcaaccgcacttgcagcctacaaaacaaacgaaatatcaaactcagactcaatcgcagcatttgaatctactggtgggaacaattgggttgtatgctcatcaaataatcgatcaattatattcggttaatgaagtgggaatcgagatgtgtaaatacaagtcgagttatctaattaccatgataatataaatcagactaagcatacaagtccagttatcttatttcttccccaaatttaagattatttgaaacaacgtaacataagagacttaactatttattcctcaaaacattcagcgactaaaacacattcatttctaagacaaattaagaaggaactccactaaatggatttacggacttagttaactcaatcaagaagtgtcaagaaaaagaatgaatctaattacattgtaaaactcaaatgaacgttg

SEQ ID NO: 83490 - DNA, 712 bp, Cannabis sativa
atgatataataatataaagacaaattaaaatatacatataatgattataatatataaaaacggagaagatgagagaaacttactttttgagaagggaattgtataaacatacatagctgatgatgagggaggagtagtagagagaatgaaaaatcatgataattaatgatcaataataatttctttgagttgaggggaatgaagcctggtccgaaatcattcaaattaattataattgtgtttatatataattaacaatatatatgtatatatgggaatggtttcgaaccagacagcattcccctcaactattcatagagagagaaactaccagattgagaggagaggggagagagagagggagaagaagtaggcagttttattagaattattaatgttagaagtttttgttgatatgtgattaggccatgcatattgtttttacattgggcccttttatacgttccaaactcgaaagatgagtaaactgtctcctctaacttttatgggacccattattttattataattaatctttgcttttcatgtacactcatcacttgcaaaattttcatgtcttaatttgatccctttatttgattaatttatttatttaatttggttttcttcttctaattcaaacatatacaaggcataaatgtcaatggaaatatactttttctttttttttttttccttttaaaaaaagaat

SEQ ID NO: 83491 - DNA, 1197 bp, Cannabis sativa
gttggtggccttagaaaaatcatatagaggagacaaaatgttttgtgctgcttttcatttcacaacatttaaaaataaaaaactgtctgcttcaaatatgctgtttttggcttttgcggaatcttaattgctgtcatgctctgctttaggtcctctctaaaatttatcgtacagaaagcttatgtcctttttcaactttccccctttttcttttcattaatggaattctttttcaacattatttgattatggatggagatgatgaacgttcttcttttcagtatgaatcttcttcaataaacaaaatcatagattgttcctccactggcatagtactaattaatacttttataatcaaatatatatttgatattcctatatttgttggtctctgaaatatacaaagtactgctcatacgacttaccttttgacaacattgtttatctcaataatggagtacaattaagactcaaaaagaattgttaaaaatgtgcaaataacttgtgttgttacgattgtgagggttactatatccattactgaatatattaaagtctctgtgttgtctagcttagtgaattttacgctaatttgacaacaaaaacatatataaatgtacactataaaaatgttagaatcactttctgaaggattgattacttgactttcttccaattcaatcttagttagctcttatttctgtgctattttgttaaaatgttgtgttagatatttcttttctttttgtatcttgtacaacatttttattgtaacaagtagaactagacacttcatttctgaatttaatatgttgggggaaaaatatcagtaacataatttcagagaatcatatgatcaaaattcatgtggaagaatgtacacgtgtatttatatctcatcgatgtacaagtgtagatgaaaaaaaaaacactattctgtatggctatgactatataacactactgtctacttgagtattgagctagtagttgagtgtgttaagcataaaaactctggttttaatcaaacgcctgtaaaggctctcaactcctccttcaagatcttgaatgcacaactctaatgctttgagttcgttttgtacattctctacaaacttattatcagatttcttcaacttctggccgacgaaaatagacagtgcaacatcaacactagcaaatttgtttgattccatt

SEQ ID NO: 83492 - DNA, 909 bp, Cannabis sativa
cccccccccccggagatcattgttcttgtttgcagagaaactaaaatcgcaacccatactacaaccattctatttgtggagtggactagaaagttgaggatggaaactaacaggaatggttcaatggtgatttagttgcatgttgggttttaatttttagggaaacttgtgatataggatttcaatatgggattagatgggaatgcaaagatggagaagcacagtaatggcggtcttcctccagctaaaggagacaatatgttgtatgagaagcttcaaactagttctttctttcttcttcgttggaataacacatttgattaagcactgtaaatttgtaataaaaaaagtttatattgtataaataaattactttataaattatcgtatatgtgcataaagttttaactgtaactgcataaatgaaaaaaaaaggattatttacaccatatactaaaatttctaacttttttatttttttattgtggggcaaaattcttttcaaaaatattgtgtaagttttatatggtgtgttgtgttaagttttcactgttattttacggttgctttttagttgctccactgttgtttttagttgttctgttttgtgttccactgttgttttataaaaacatagtatttttgaaaaaaaaaatctgtgtggcagtatttttgtaaaaattaatctaaatttcagtatttttgtaagttttcaaaaaaaaaaaatttgaatctaaaattaaacataaaaattcaaatttttataataatacatattaatatagataataaatattaaaaatgccctcatatatctttatatgttataaatattaataattatgtggatgtccaaatcttttattcattgccattaattgtaatcaatattcctctttttcttagttt

SEQ ID NO: 83493 - DNA, 608 bp, Cannabis sativa
aagacataacctattaacaataattagaagtacaaccttttttttttcctttctttctttttaactggaatgaattgtattgtgaaaaacataacgcacttataccatccctcttggggccatagttggtacctggccttttttgctgtgatatctgtcaaagattctcaaaacaaacaccaatttatttctaatcgtagatataatttttattatttatttcgtaaaaatattaatttaattatggtcactatctataaaacgataaatattttagaagctagtgatataggagcctagttttcagaaaattttagttattggtgtcgaaattataggattctcgccacattaggagtgtctctagcctaatgtgtgctctattaattgcaggctacttgatcacattcactaccctaaattattcgaaatttataaattataatataaaaagttaatatataaaataaaatagagttacaacaattcatatacaaaaatgtaaaaaatttccactagtagtaaaaaaaaattactcagctccttacatatttataaatatataacacaattacttgttaggcatggcttaaaaattgatactattg

SEQ ID NO: 83494 - DNA, 739 bp, Cannabis sativa
ccaataattggcggggaattggtagtggtagttgatggtattgaaacaatcattgggaacttaccactttggtgaaaaaaaagatacaacatgattattcttaccagtttccatgactgtacctttgaaaagaaatcagaaaaaaaaaacaagaagggtaatgcaaagaattataaaacacttgagtatatattgtactctagccctaaagtaataataacataatgctttggcttttttaaacatcaaaatccaacattatatgtctttgtatgcatttgaattagtagtaaaatactaaaatctatacaaccactgattacaatgcagtctctaaaattctaagtttgaaaataatgccttgtgaatttaagggctactaaatgcatattaggcagactgtagtataggacaggaaaaaaaaaatcaacactaaatgtgtcaaaataagagtaaaatacaacatgtcactttctattcaagtcagtttcaaattttttaataccacaaacaatgtaatttattatggtcaatcatactttttcattttcttttctttcaaaatatacactcattagctaggctgtcggtagaacttttatcctttttcttcttgattatttttaaaatatacaaaaattaaaaaaaaaaatacaaaattatggttatacataattttaaatatttttacggttgttaagattttatttacaacaaatataattttttaatgttttca

SEQ ID NO: 83495 - DNA, 944 bp, Cannabis sativa
gtgttaatggaaatggaatagatagaataacattatataacaaataagtttattcattattctaaattgttgaacttctttattatattttttctttctttctttcttggcaggtggccattgagacaatctacacagtaatacaatcatttgtattttcaattatactcttctctgtgctacgttttgaatggacagcaggaaagttcatgtggctctactactacataacaatgtgcttcacctatttcaccatgtgtggaatgatggttactgcattgactccagggattgaggttgctgccattgtcatgtccttcatcttgagtttttggaacttgtttgctggatttttccttactagaatggtatgtatacatacaaaaaaaaaaaatatttaaaagtgaaacttagtacaaatttattaacacattttttaattactgatgttgtagcaaattcctatatggtggaggtggtactattgggcttctccagtagcttggacagtatatggcttagtaacctctcaattgggtgataaagatattgagattgaggtctatggatttggtactggtattcaattgaagatgtttcttaaggaaagtttgggttttgactatgactttcttccagttgttggcattgttcatctagcttgggttttactcttcttcttcgtatttgcttatggcatcaagtatctcaattttcaaaaaagatagttaagctatattaccattctagtagaccaagatcttcatacaactatagtaggaaaataaaatatatcatgaaagtcatgatactatatgacaatcgatacgaatataatttgattaatattaaattatgtaagttaaattaatggttttttcttttacaattcaaaacagtttttttttttttgcatttttacggaattctacatagaaattcct

SEQ ID NO: 83496 - DNA, 713 bp, Cannabis sativa
aatattagttacaatatttataataatattcataaataaataatgatctaaagttgaatttaactatccatgatataaaagaaataattaaattattcgtctttcacgcaattttaaaatcttctagaaactttctccatcttgagaagtgttgaatcaagatcgaatgctcccttgatatactcgttttgtatttgagcccttcactctactctagggctcgagtatgcttaaaaattctccttcaattggagcccttccacatagttgtaaggctctaatttggttttgatattgagtctattatccaaacaagccttctatgttctttttagtgctcggaattgtaatgattatggctctgaaatcaagccctacatgatgttatgactctcatacccgaaccacaacttcgaggctcaaaattagcttgacaagtaacctaaaatctgagccctacatggcttggatccatattgtgttttgttgattccatacccgagccccttattccatcttgcggctcgagttcactctagaaaactacctattttaaagccctactctactccacatataggctcaaaaatgctcaataataagtccccaaattctaagtcttccatctcttttagggctcaaatatattatacatattgaagaacattatcccacatggattaaatgtaaaagtattaagccatatataagaa

SEQ ID NO: 83497 - DNA, 1209 bp, Cannabis sativa
agaaaatggataaaataggaatttcacctaagtgttgcctttgtttttagtgagaatggagagcatttttttgtcctttttctaggtgattattagggattatattatgtgattatagtttattttttttagttgataaacattaaagaaaaatcaagaaaaaccaaagtcacctatgctctccctcccaattcctttggctgaggcagaattagaagaatccaaagtttcttcatcaattcttgaccaattctatccatattccaagggtgtagatcaaaggtaagctttaaaaactctttcttttgtttttgaaagttttggctaagttcaaacatgcaaatttagggaaactggttctgttcgaaccctagggattaagagttgttttctgggttggttttaagttgattgttgattatttgagttggttatattgattagttcagttgttgagcaagtctgagtttaagaactcaaacttggctcatgcaatggtagtttttgtatttatgagtattttgaggttctaccacttggaatgtgtttgttgatgcttaattaggtactctagagcttgatttcaagtttggggttattttgagttagaaaggagattttttttttctgcagtaaaaaacggcaggttgtttctgtggaaacggtctactatttttactggtatattgcccaaaaaatggtatgctatttttccaaaacggcctactacttttcctgacaattttgatttttcctcaatatttagagttttgtcatgctatttatcaataggaaaacttctagtttagagtttaggtctccgaaaaaattttagcaagttgtttacccgatttacatgattgtggcatagggcttccatttagcacatgaattttcattcaggctgactaacacacctgaatcaagaaatgaggtaagattagtataaaatatgtatacgtatatgtatatgtgcatgtatgtaaattaaattctatgttatgtgattcacataccaccaacaccagtacggtggcggtacggagtacattggtacagtatatgatgttcaaagggtacgacgcagtattactactaacactagtacgtgatgagtacgcagtgcatgtggtacaacactcagtggtactcagggtacggtttagccctaccaatactagtacaagatgatgttggaatttattttac

SEQ ID NO: 83498 - DNA, 1030 bp, Cannabis sativa
tgctaattaagtattactaatgtccaataacaatgttaataggtgtctcaatggattgctgattaactaacattttcaattattatatgcaatgaaaaataattgaggtgatccaatcgattacagctataataatatttttatatgtagctatcgatactatagcttaacttctcctataaataccactatatatacacctccctaaatacaaatttatcatcaagaagaaaaaagatttaaacatatatacatctaaaaagtgatgatgatgaagagtttaataatttttctatttgtggttagtaatatggggtggtgctatgggactagagtagcacatagtgttactattgtcccaagtagtaatgatcgttgttatataaaagatgagtattgcagtgcgttaccttgggaaatgaaaatttgttgtgaagggcttagctgcgcaggatttctgagcagtgcaaacaaatgtgtgccatttataggttgtcgcaaacttggtgaacaatgtgctcttttaaccccttgttgttacccaaatcgttgtagtggtacaacttcccctggttcaatatgtttggcccctagaacttcttcttcttctacttctacaccatcatcaatattgtcactagatcatgttgatgaataattataatttatgtatatataagtatgtgtgttctttgtttttgaattgtaataagaaagtacctctctagtagtacttatagagacaaggatatatatagatatatatgtcaaaccatgttattataatgtggtaatataagatgtatgtattgcttgtatcccaattggactttcacatgaataataatatatattcgtgttcaagatatctctatatatgtatgtactatatatacaggtgttttccaattttagggttttacaggttaggttcatgcatattggttgggtccgggcgaccattaaaaaaaaaaaaaaaacttaattctcctataaatacgactacatatatatttatatcgtcaagaaa

SEQ ID NO: 83499 - DNA, 3960 bp, Cannabis sativa
  modified_base (621)..(623): a, c, t, g, unknown or other
  modified_base (1854)..(1856): a, c, t, g, unknown or other
cttactaaattagactcactgtgtcttcatattgctttattatatttcaatcgttataaactacttgttgcttactaatttagattcactatcgttggctaaaatcaagaatcaagaatcgctctgggttggcatccgagtctgggtcccaattcgggtgaagttttgggttgcagtccgggtcctggtccggttacggttttgggtccttgtctaggtccggctacggttccaggtccaagtccaagtcctggttccggtcgtgtttctgggtcccggtctactgccaatttcgggtcacagggtacgggtttgggtccaggtttgggtctgggactaggttcgagtctgggtctgggttcaggtcctggtctgggtttgggtccgggcatgggtccctgtaacagcctaactaattaggcacattacccaagataattaagaagccctaatcccctaaatgggagtactaaaaaaatagcgcacaaattaaactttaaatacgaatggaatgtgttgaccttgtgtttagccaacgacaacgagtctagtttaataagagataagtgatttatagcaatcgatatataataaagcaatataaagacacaagaattttannnaggttcagccccgagcagttcagtaatagcctaatcctcgctacttgtattgacttaagaacaaggagaaagattccttttcttatagctctgacaacggtatctatgaatatataattcttagataatatctttagggtatagtttaagctaaactgttttcgaccctttgcctagtgaacatgcatcactagttatagggctagtaagcttggagaggaagggttttccctctcgttacaatgtgtataaacagaaagatcgtgggatcaatgctgactacaaagatcatgggattgaggctaaatacgctgatagtgggatcgtgtgtatgccatatccatgtagtcctatacctgagttatagggactgtgttgatgactcacgatgcgaaagctaaattttctaagtgttggttgctctgtgcggattgctaagaactttgctctgggcacgctagcgaaccatcctgctcagattatgcttcctgagtagatgctccaagtggattccacgtgtcaccattcatgtgatggcacgtcaaagtgaaaaaattgggataacatttgccccccaagtctgtacgggactttcgaagttgcgtgtagacttcatccgagctgcttctgccgttggatggggacacgtgtcaagcacgaccgttcgagactcgatgtgaggctgactgggtatcccttgctttttcggctaataaatgttgtgacaataaatatttcaaaatcggattttctctcttcacagctgacggctgtacttgattacttttgatttcccatattcgtttttaaggagggaaactgaggcgtctcaggttccttttagtcgattacgtcttttcgtgacttgcctataaatatcaataagcattggcacctaaactcattttcaccatccttgtttgctaagaaagttcagagcgaaaagagaggtttttagctttaagtttgctaaagtgctttcatcaaggctgcttgtcgaattgacgttgctcgaacctagacatctgattcttgagtaagtttctgactccgtttatgcttattttcgcaaatttacatttcgaatataccttagactttgttgtagaaaatatccaagaaatcctaggtccagaaacttttgtgattcttctttgtcatggcttcatgcacctttacagtccataatgtatgttttctgaactgtgtaacgtctgtctttcatcttgcnnnttctaagcttcatgaactttttttccataactcgagaaaattttaaacttcttgagttttgatttctctttgaatattcttgttcttgattctgttgagtactcctggtcggcatacttgcttgtttattgtttgatattttgaccaaacactcatcttgtgtgttgtcttttgtagatgaactcgattgagctttgggagaacaaatatcgaatcgaccaggacctgcttcaacttctgcacgaggatcatcctcgtcttcattctagctgatcttcctgtagtgaaggaaattcttcaaaccctgtacccagccatagaatgatggctcgtacaaagaaaacgacgtgtctggttgacgcatctattcctaaagtggctcggcacgccactttgcccaacgccgaacaggatccagccatccaggtggagggggatcatgaaggggatgctgaggtccaagagatcaaggcgtaggatgatgtacgtcctggcagtctctccgaggcggaggaagaggtagaggttgaaccccaaattacggggagtacaacgtggctggggagccagtcgatgctgacggagacgtgctggttgagggcgtggactacgtcagtgaggaacttgctgcggcggttcctcatagaaggtagggtgccttgggtgccaggtgggtaagccctccgtccagggttacagaggcgcgccttcgaactcttgacaaggcagatacctgggcgagctagattgctacattaccgcccataacaatcgtgccacaagccctgaaaaggggatgtgcgcctggtcgggtgcccatggtcagcaaggggcgttgatgcccttgcgtaaatacttcaaggatgtggcagactttttcgacctctgcccggcccagttcactcctcagggcattaagtatttgtctgccctcttcgtcctctacgcttcccaggagtggggtacttcttatcctcacgaagttgcctggttctttgatttgaagtccacccttgagcaaggtaggtcggggtacttccatttctctcaagcaggcttcaagtggttgacgagcacagacgactcagccatcagtaagattggacattttgctgaagagtacttcatggtggatggcacgggcatcactcgcactcggttccagcagattccaacatatcaccgtcctcccctcactcttgctcttagtgatagagctcaaaaacatgccccgttgccgagggatgaccagaatattatccagctgacctccgaggataattttctcaagtacgggctctatcccaaggactttgttcctaagtccgtaacggggaagaagaggaaatctggtgctggcgagactgaacgagctcatcaagagaatgaactcattgaacttaagcgtgaagctaagttgaagggaggtgcaagggccaagaagtttgctcaggagcccttgaatcctgaagatgaagccgaggaagagcatgtgactccactgaagaggaagaagaaactctaggccccgcaaaggcttgttgaacatgcgattcgcataagggagcccatttcacctgttcagccattccctcccgtgttcggaaaagggaaagttgtcatgtctgaaataagagcgatgttagatgatgatggacttctgagtcttgttcgggcagtcaccatgcatactactttgtcttatttttgagcttcttgatttttatgcctcatatttgtttcctctaaccaagttatctttgttctgtacagacatgtctctgtagatgcttgatgctctgaagaaaagaatgggcagaagctctattgcctctcctctggccaacaagtctaaaggcggtgaggggtcctcttataaagaaaagaggcctactggggaggtcattgatctttccgaggagctaatggctgcaaacccctctaccccaaaagctgctaagtccaaggagtttggaccactgaatgttgggtttgcgctggtcaggagtgatcttgaacaggtgcgggcgcctactccacctgtgctggtgcttccaaaggtcaagaagggaaaaaagatgttggcccactacatgaaccggct

SEQ ID NO: 83500 - DNA, 1605 bp, Cannabis sativa
aatcgatggtaaagaatttgctactgtgagaaaaggtcgcaaactctcttacgattcacttacccccaaatttcttataaaccaaatcatttcttacgaaccctaggcgaatttcctctgctgctcaacttcgaagtcttgaactcccttttccgctcacgcgattttgctttgccatgccttagatttttgctccgccagtgctgtaagttccctccgctcgtgctatcgcgatctcgatctcttcgacctccgtaagtatctcaaattcaattataccttccttcgaggcagccatcgatcaatccttttatgttcatccccaatttatttctcagtattatcctttatatttctcaaaacacctaatacgattagccatatgtatcctctgcatctttcttaattaaaccttttcttcaaattattttctgtatataaataatttagtttctaaaatcaatatcttatttaacatccattgttagaaactctcttcaactaaatctctcattgcaaccacatgaagatttttagggtttcactttcaggtatggtttactcaatctttattctcgcacacgttctttgaagtctccttgttagcatagagctttgataaggattgaattattttttaagagatatttagtgcttttctcgttaatcacccaattattttttatgtataatcatgtttattattcttttttatattgttaattgtgactttaacaatttcactttattttttaattatataatgaaaaaaaattgataaaaactgtgcgtatatatgaataaattatgtttgtttttttagttgaagccttaatattctctatttttatagttcttccagagttgtcatctgctaatctgttctttctatggtagtaaatttttttttttaatctttttgttttttggaattatattttttatttggtgtgttagttataaatctaaaataaaaattagtcgtatgtgattttttttattaatgattttaggatttgaatgacctatcaaaagtttggagagaggttaggacagagtactatggattgactttacattaagctatttcttcatgtgtgaaaaggtataatgtcgtttaagtaaatatatattatgattagattatggactttatataaatgattaacttgttatttccaattgtggttgaagggaagaaaactagtttcatagataagacaaattatctcatcttcatgattagtgcatttcaggaaccattcattattgaatgtttcttttctaattattttggttacaatttaacagtgtactctttttcatgttaatcttgatacttctattataaggggtgtggattattttttaggtggagccatttattgatcctaaacttacttatagtataaattagtatgataatgagataaaagaacaaccaaagtgttacgagttattaataatgcaatcttattattggttcttgttagctatgattattttgtacaaataataacattatctacatttcatttagaatactgtgtaattgtagtctaaagtaaaagctctatctaagactttaaatctgccacatgataa

SEQ ID NO: 83501 - DNA, 566 bp, Cannabis sativa
actcttggacatgaattaccttgatagagaatatgaaaggtgaaagttgatcaaaaacttagttacatacaaattttacaataataagttaaattaaaagtattaagtaaagtacagttttaagcagagtaaagaaaattaccttgcaagccaaattagcaaatctaccttccttgaattctctaatcaatgaaaagttatttgaatctatcatgtatacatcgcatttatgaatattacagctttaaatatctattatttaattagtaaaatcacataaggcagacaggtacaaaaatttagaatacatagttttagatacctacactatttttcttttcttctattttcatattgtcccataatttttgttatacttttgttagcaaaactaagcttgaacatctacgaataaaaaaggtagctaatatgaaggttcttcgatgtcgtataagaactttactttatatgtaaacatatttagatacctcttgaacgcccccgagaatctagtagactactagacttatgtaagagcatgcgtggtttgtttaagagattcaacc

SEQ ID NO: 83502 - DNA, 911 bp, Cannabis sativa
catcaaacttttttagttaaaggaaagttgaaaaacaaacaagttaggtgtgtctcaatgtttgaaggaacacatttaaaaaaatgaaaattaaacagtcaacacccaccctcaacccaattgaatattagaatatatgtgaatcagaggtgagtgagcatgatatcattatcttaaaaagcttggctatagtttaagtgaaaaagacaatatcttgttttggtagggcaagcaagatggtaaagaattaattatgaaatatgacataaaaatttaactagccaaattacaggacaaatgtcatgttgttggtaagttggcacctaaatatgacaccccacacacactatactctctatagtcattaatgtacatatcactctcatattaaaaacaattattttcttcatttcaagaaagaaaataagggtcaaaactatgttatccaatacgctacattatgaaagtaattaatgtaataaatatttttggttattagggatatggaatgacagaagcagggccagtgctaacaatgtcgttggcgtttgcaaaggaagcttttgatgtaaaagctggggcttgtggaactgtggtaaggaatgcagagatgaaaattgttgaccctgaaactggttcctctttgccacgtaatcagcctggagagatttgcattaggggtgaccaaatcatgaaaggtatatacacatatatgttttggaaacttacacaaatattattagaatttaagtttatttttataagttctctcaaaaaaaaaagtttatttttataaaaatactgtcacacgaattttatttttaaaaataatgtatttttataaaatgacagtgcaacacaaaacagaataactaaaaacaatagtggaacaaagcaaaagtaaaaactta

SEQ ID NO: 83503 - DNA, 1145 bp, Cannabis sativa
aaacccaacaaagacataacgctccatctgacaaccgcagttcttggcgacaaagtgaacttctacagtcatggacatgtcttcctatggcgagatggacgccttgctatcacttacttgggtttacccgtctattatacttaatctgtatactgtatattatacgctaagtgtcttcacagtcattatatctcgcttacgtctactcatgattaacgaggttgatacctcgccttgcgcattccttgacgtatggtttttcactattgtatgaggtatcagtttgtatatctttatctcgcggtaagacccttatagtcaggcaagttttaaatatactctgtcacttccgcatttaatgagttattccattttcaaatataattacagtttcatgcattgatccatactccttccaatctgacacgtcttttccgttgaaatggtagctgaattttgggtataacaattatcccttaaaaagtactttttaaatgatctcagagggtatatttgtcataatctctttcttcaagataacgcattcccttaaacttaacggcttcacggtttcgtgagtcgctattagcattaatgaactactctttcatcttctacctctttcccaaccgttaaatttcccaacctttagccttaccgtcattggtttccgagtataaaacgatggttcaggctagccatattccataaactcctggtttttggtgaatctcatccagaagttggattgtcattctcttgcggagatgtcccatccatgctcaaaactttatccctcaatacttgtaacaccggagtatgccaaccgctttttctctccatatgttcccaaaaacttcaaatctcagtttaaattgggaacgaaagattctaagactgaagatcatccgattatttcaacccaaagagatacagtcaatcgttacaggcgatcctcacaagagatctccgagggtaagcatcattctttgcgaatggtggtctgatctgaattcgtcgttttttttattattgttgcttcattgattttttatttttatctctacaggaatgaatgtagattttgagagcatgttcgaaggtcctccccgtgccaacgagaaatccagggagaaggtaaccca

SEQ ID NO: 83504 - DNA, 1054 bp, Cannabis sativa
  modified_base (91)..(91): a, c, t, g, unknown or other
atgattatttattgaatctttcttaattaaattatagaacacataacataaaactaaatatacgtgtcttgcacgtaactttcttctagtntatatatatatatataattatttctttattttttagtgtatatatatataattcggagtgcaaattaattagaagagatattaattaactatgatgatgatgatgatgatgatacatataaacatactttatatttcatattgtaaatttgtaataattaggcataaaataaattataataattttttttattgatcatagcaaggagagagatatacattacaactattattcaaaatgaaattaataaataaaataagtaattaataaaacaacagaaactagcaaaataatcaaaatgagattactttatttccccattatgtaaatatatatatatttaataatgagatgtagtggatggtggcctctttgggttgggaccgggagtttggctgtccaaaagtactcttccaccttcaacggccataattaaactacccataatcaacacactaatcaccacaaacaatacaattttcctactaattattatcttatgcctcataattaatattattcaataaattatatataatatatataagatttagctatagctagctagggttaattatataattaaataattatagacaatattatagctatagggattaaatatactagtaatactggccaatgaagaattagctataatgccaatggtttatatagtaactattagggttgaaattcaatatattttccaagaaaattgtatatatatatatatatatatatatatgatctgactttgaaacgaatactacacttgacttttttctttgttaatatattcttttacgatcaaaattaatttgtgatgactcttgacttatatttgtacatgtaaatggtaaaatgtttgaaaattgaataagattaagatatatatatatatatatatatatttatggaaagaagaattcaattataatcgatctgtatttatatatatat

SEQ ID NO: 83505 - DNA, 794 bp, Cannabis sativa
atgatttgtataactatatttctacctcaccgaactctttatctgatcacccctttcactcatcaatttattattttgatttcatttcaatttctgtcattttatatttatactaatctttatagatacaataaagttcgtttattattgtgaccgcagtgtaacaaattaggcgacattaatttttggcgccgttaccaagaaagtttctacgctacaagaggctaatatagtaatttacttttaattttatttcattactttctttttctctttgttcgtttattctaattaaaaaaaattttggtactttttttttctcagatatagtgtatttctttttctttctttcctacgaatattatttttttttttcgttaaaaaaacaagtaatttaatagtttctttttctttagttatatttattacattatttattatattacggtgttagtttattctttttatcatttttttttacatttttgcttttaagattagatcctttagctaaaaaaaagtgtaaataaaatgttttcatagaacacgtcaagacaattgtgtaatagtgaaagtggtaaaaactaaaattattttgtctaagaaagattgactttaaaggcttgtggtaaagtattctctacaatttctagcaactttggagaattctagtaaaatgtgggacgaagtggtaccttggaaaccttcctaatcggcctgggaatatctcatattaaattattatatagttgaactttatattaattaaaaaaaatatgaatgaagaagatcat

SEQ ID NO: 83506 - DNA, 1501 bp, Cannabis sativa
  modified_base (1071)..(1072): a, c, t, g, unknown or other
aatagtggttgagctttcaaaagtgacgagcgtttcgaaaagggttttggcaaggattttcatctaaaatcatagaattaaaacaaaaaaattataaaaaaaaaaataataattcaaattaaagaaatatattcttttcgaaaaagtaaattggtcaaatttaataggaaagataaaataaaaaccataaaattatatgaaatccaaaattattgatacaatacttcaaattaaacatatatatcacataaaaaaaatttaaagatgcaactatttctttagatgaaaaaaaaaagtgacaaaagataaaaaccctaacttatatgaaaccaagataagtgatgtacaatatattatttgtcaaaggccttcattgtgatagactatacccaaacttggcaggagagaaaaatccatatacagtgacatacaattcattcaatcaattatttgttgaaggctttccttgtgatagactatgccaagacttggtgggagagagaaatctgtaaatggagagaatttattgcaaatatgacttcgattgtagaattcaacattcacctgcaaataattatataattatttgtgagtgtgcgagaaaattattcaatatatgttatataagaaaaggaaagtatggtaacaatcatgaagagggaaaataaaaaaggtgaggctgtgagagattcaaagaaaggacataataacgatcttagctaaataaaagttcaaattgtataacattaggttggagaatatggttattggacttgatttttagatgtgttgtaattagacatattctaaatttttatgatttgcaaattgtttgcaaaattgaaaacttaatctgcatatttttctggactgttctgggacactgagtgccaaatatatttttgtacaaatatttatgcatgttatgatttttgggtttatccaaaatacagccgttatgctaccgaattttctaaaaatgaaaaggaatatgttcttttgttatgcttattaattgcctgctttggttatactgatgagagccatgttgatcatgttcggttcatattnntgtttcacgacctagtctctgtgtcatcataggtagatcaagtgtgcactcatctgtaagtgaaagacctagaatctgtacagggagtgaattaattctgagccccggtatgatggtggatatcagatgcgactacccagttttggatgtcgttttctatgattggtattgagagctaggggtctagtggacggtgtgatatgcatttaatgcttgattttgtaactctttgtggtctctctattttgtttttacattttgatactggtgatgagatattttatttttacaaagctaaccatgcaggaattttattaaaccaagggtcctttgatattaattgttatcctactgggctttataagctcaccccctattttctcccattccaggaactcagtttgatgctagtggatgaggatgggaccg

SEQ ID NO: 83507 - DNA, 544 bp, Cannabis sativa
cattttaattgaaggaaatgaaggatgaaatcttattatttatgtataacgaattagtatggtgtatattcgtatcataatgcatatgaatagtaagatcatctaacaattttattaagaatagaatttataagaacaaaatttatgaatgaaatcatatattttgtagaaattttttgagtagaaaatctcaaataaagaattttttttttcaaaatattattaataatactttatgatactatagtgagtcagtgacaacatatacttaaaactaatcatttttattcgaacataaacgtgcatggacttataattattggtattaatgtatcctactagatgaaagttacgtggcgagccacgtaaatattagttttattttagtagtttttgtttaagaattcggtaactaattgtaaattattttttaaacaataggttttataaaagtaaacttgttaagaatgtcataattgtgtatataaacctatgatatacacattgttattaataataaacagtaagtttatctcaatttatt

SEQ ID NO: 83508 - DNA, 1328 bp, Cannabis sativa
tatttatgctgacgtggcaatcggtatttgtgcaaataattttcttaaaggtatttttataaataaaatcaattttaggtataatattgaaaagaccccttttttttattgatttaaaatctgctctctataataattagtttcattttcttatattttttttatgctctctttgaggtattcttccataaaaaataataaattaatgaaatatttgtgcaataaaaatacttaatattttatgatttatagtgatttagtattaggagtgcacatttatactcgaaacttgaaactcacccaaaacccacccgactcgaaatccaaaaaacctgaaaaaatggatttcaattttagtatatcgagttcaggtgtaacacagttttgtactgagtttggatgtaaccaaattctataccaggttgggttcgagtttaatattttttaaaaactcaaaacctgaaacctggttagtatttttttttattatttttatgtatatattatataattatattatatatatctgtctctttttttttaattgtgaatttttaattgtgtgttaaattattaatttgttagtttatgaatatgtatatataataataatatgttgtataattgtattattttgtagtttttttggttaaaaaagtgatattaaaaaaaaaaagcctagcctaacctgaaacccaacccaacccacccaaacccgtcccaaccggacccaaaacccaaaacactcgatctccatacgggcggatttggtcccaagatttcaaaacccgaacccgagaaacccaaactcaaaaacccaaaacttgttaaaacccacttgatgtgcacccttatttagtacctaattttttttctttttcacaacgaacttacctaatataatgtatacttttttggtataagttactattcactctaatatagaggtaataaatgttgttaggaataaggtcatatatatacaaatgggtattaagttatcatataaatgaattaaatttatgttgcttattttgtaataaaatttataacttaagaacattattgttatgattttaatatgtggataccataaaaataatttataatttacttagaagctagattagaaatagtcaataaatattcgtaacagtttagacagttattaatgtaataggtgatagtccacaatttgcaatattttcactcttgaatccccactatcaagagactaaggttccaacaaatttgactggaaattcagaagatcataacctttgtacaattaaatctaaaactttggtatgttttcgctaatttttggt

SEQ ID NO: 83509 - DNA, 1369 bp, Cannabis sativa
  modified_base (578)..(580): a, c, t, g, unknown or other
  modified_base (751)..(763): a, c, t, g, unknown or other
tactttaataatattaattatctaaaaatagtaatattgtataattacatagtgtatttacatgagaattggagagtgtaattaacactcttcaattacctccaattacatggttagtgtgtaatcatctagttgaacaaacacttcaaaccacctaattacttcgaactacactcaattctaattacacacgtgcccttaaaaaatatattaattttttaaaattacatatgaatttgatataattattaatcacactgtctgttatcaaatatagttttatataatcatataaattatacagtacaatttttattttataaaaaccaaattggcccttccgatctgcatatcctggcttcgtaaagctgccacatgtggtttaatagtggttttggagtactagagaggaggagccatgatgaccatgctcttagttttttttaggggtaaatattattttagttcttacgttttgtaaaagttataaattggactctttattttgttaaatgacaaaatgaaccttgtattttttaaaattgtacaaatagaaccctgaactgattttttgtcannntaaaacttaataataatctgatgtagaaatgttatgataaatctggttatattttttgtatctgttcgtgttaaaaattgtcttaaagttggttatattaaaaaataaaattgttcaaaattgagctcatggtcctatttttactattttagaaaatacagggttcatttnnnnnnnnnnnnnaacagaaggtccaattaataacttttacaaaacacaaagtcgaaaaatgatatttactttttttttttatgtcaatactaaataccatgattatctaaatttatagtatgagtttttttcgggtaaattcactcaattatcatttcacttgtatttaattttccaaactcaaattttagttgtttgtaaaagtaaaactaaactctccaatccaaactaactactgaattgttagcaaatttaatgcactatctatttttcacagttaactgccaacatggactgcttatgtgtacactctagtatatgtggttcgtttatattagtacacctaatattattatttaaaaattaaaaaaaaaatcaaaatttataatattttttatttttaaaatgtacattatttatttttataattatatttaattttaaaatgaattttgaataattttaaaataataatattaggtgtatcaatataaatgtgccacgtgtacaagagtgtatacataagtagtctatgatggcggttaatagaatgacacctaaaatttgctaacagtttacttagttgaaaatttttaccgccaagattaagtgtaaatc

SEQ ID NO: 83510 - DNA, 996 bp, Cannabis sativa
cacttaaattttagcaacattttagcaacccgaactttagcaacccgaacttagcaacccgaactttagcaacccgaactttagatcccgaactttagattggaactttagattgggtaactttagattgggttagaaaatatataggataaaccgcccaaaccgaccgatgtacagccctacctggtatggttgattttacagtacattacttaatgaagattgattgcaaggaatgggatgaggaggtttttggtgatttgtttgaggagaaagatcgttacttgatttttgggattccattgcaaattgatatcgagagtgataattcgttttggtcaaaagaaatttttggactttactctgtaaaaagtgcttaaaatattctttaggaacaaaatggtaattagcatgtgtctatggaagaagattcctagaaacaccttcgaaagcttaaagttccacccaatgttcatcatttttcatggaaggcccttactggatgtctccttactcgacaaaaacttcactccaagcatgtgtttgttgatcttgattgtttattttgtcatcaggctatggaataaatttatcatgtgttattgtcttgtccgtatgctgagtcttgttagaatcgttcaagtttggatcgtggaggtctctttcttgtggagtttaccagctgattccagaacattttttctcgaggtcagtcgaatctagttgaggaagtggccattgttgtttggtcattttggaagagtcgcaatgatattctttggcactcaaaaatagtttcagcgtcggtaattgtctcatcagctcgctttattcttgatcaatggaagtttgctcaatctaaaaaatttgatctacttttgtttgtccaaaatgcaaataatagtggtgagcgatggacaaaaccagatactaataagatcaagattaatgttgatgggactattttcaaagttgagaactcttatggggctggtc

SEQ ID NO: 83511 - DNA, 622 bp, Cannabis sativa
tatgactctaaaattgttgaaaactggtgaatttacttcgttagttattgcctggtaaactaagtgatgcaacaattaagtgaagaattcatcacgtcattgtaatattttttatgtgcatgttactattacgtttttttcttcttgacatactaaaaaatatttgatctgtgattgagtttgtcctcagagtaggcactgctgctttttcttttcttttttcttgactgagttcttttttcttctgttttctttaaagatgacataaaaccatgtgaacaacagatttcaagcagtcaaccataacatcaacaaggaataatatgaagagattttcatatttaccatcactttagattatgattctgtttacattaattatatgtacaaaacaattcaccatttcagcaactcaacatggacaacaaatcagtaggccgttacttataacagaactgttgagcaccctatttcttgattttgtactattaattgtataacagaatgtgattggactaaagctgatgggccgacccataatggttatggtagaatcactacacaaatttacatacgtacatacctacctaatctacaattttgaatctttaccaaaacctat

SEQ ID NO: 83512 - DNA, 1543 bp, Cannabis sativa
tattgtatgttggactgccagaaagaaaaaagaatattacaaaaataacaatgcaatggaaatcttctactatgccaaaatttaatattccaacttaaatagttatcaccatcaagtacaagagaatttaccacttactgtgatgggttcaaattaaatggggtctcttgctgatcgagactgcccttgtcaccaaaactaattcttccaaccccatcttgtccaaaacacatggaaaaagaatttgctataaacccttccctcgataaaatgctaggtactgatatcttctccattccaagcccaaataaaccattgggagctgcaacatcaaggaatgaaccgctttgaacctctccacaactgcatataattcatgatacataatcatctacagacgtttaaattgtgaaatgaacaataccaatcaagtttaacaaaaatttcatttataacaaataaacaagatgaaatggaactcacccgaaagtgacgtatgcctcaacaagttcctgatatttatcttcccttttcaagtgcaggacatcctctatcaatactccagaagtagatgtttctcctgagacataagagaccatgtaagggcaactgcctaattcaaggcaacgattccgacggccacatatagtattgttgcaagtaacctttttgcttgttgaagagccatggcgctctgcatcaactcggcctccaatccgtctgcaaatgaagaaagcaattaaaggaaaaaacaaacaaaagttatagaatgaagaaagcaattaaaggaaaaaacaaacaaaagttatagaatgaagaaaatccctcaaataaatggtatatttggggcgaagagtgaaagattaaaatcgattggaattcgttaaagctttttatttcaatattttatattgtgtttagaaggacaaacctgttgatccgattgggagtagtgtttctctaccctatttcttgatgtgggtggcgatggtggtggtcgtgtaaacagtaccccctaaactccccatcgttggcggtgtggaagcactgatcgtggtctttttgggaagaagagggttttggaggagtggaaatccaatctagggcatataattaagggagaagaaaattaatacaataaaataatattattcccttgaaaggaaaaaaataaataaaaaattataataagaaagctaataaagttttatagaaattatcacagctgttgacagttgttaccttagttatagctcaatgagggttatatttgtaaattgactatcaaaagcccaaagaattattctcttttttataaaggtttatagatatatgtcgacttgaatgagctacatttggctgcttgcattattattattgcattttattgtaattatatatatatatatatatatatatccacaactgttatagttttgcctggtgttatactattactgtcctcattttggttactataagctcactgctcacttctacagatccttgtttttttactgtataataagcctaagaacaagaa

SEQ ID NO: 83513 - DNA, 708 bp, Cannabis sativa
ctcactaggagtgaaatcatatccaaaatagaaaactgtctcataataaaactaactttttgagttaataagaaactagaatagtttacttgaatacagggagaattatagaagattttgaccataaggataattataaattcacaatgagcaggaaagattcttgttcacagagttagaatctttcttgcttgtcttttgatcacttagttttacgttatacctttggtcaaagagtctggtagaggttgttggtggagttaagctggcgatgggcattaagttgtggtagtgataggggtaaaatgctatgaagttcatctaacctgtgtgtctactggatgatatgatggaaaggaaaaggatgatctttaagttcatcaagatgtgttcgatcatttatgtaacagttctctctcgctctctctctctctctctctctcttgttggtggagttaagatgctatgaaatatatcttacctgtctgtctattggatgatatgatggaaaggaataggatgatctttaacgtcatcaagatgtgtgtggtcatttatttaaaaacagttctctctctctctctctctctctcttgaattctgttgatccccccgtatgattgtaatatataaatatatatttgtatattattgtcttttaatatgaaaaagtctgatcaatttctgaataaactagaattataggca

SEQ ID NO: 83514 - DNA, 797 bp, Cannabis sativa
aaatgactcacaagtttatagtccgtattatgactatcttggcggatcaagaaataatcttccacattattaaattgttgtatctcattttgtctttgaaggttcgtatctgtgttattacatttccgtttaacgttctagaaagtagaaagtagaaactataaaatataaattacttctaattatatgtttacaaaagaaaacaaaacaaaaattcttattagcagttatgtgagtatttacttaaagtaaaaacaaaaatatagtatacaaaagaattatattaatttaatcagaattggatctgtctattgtctattctactttgtgcaataatttaagtttagtttatttcattttgattatccatttatatagaaagtgtgtctactaatattataagtaatcaaattaaactgttactacaataattatacaaaattaattaagataaacgtttaaaaaaaataaatctaaatttcatccattcttatcttaattacaataacgtctatgacttattagtacacatatcttgttacaaaacaactccttaaaggaagggccaaacaagaggggataacaggcaggcccgaccttggacataggcggattaggcctgtgcctagggcccatctagcccaggggcccaaaattttttttccccttttaaaattgtatattttttaactggctttgaaaaataccacattttttctaacataagggcccaaaaataatttttttttcctgtggccctctttgtttgaggaccgaccatgacaacgggtaggaga

SEQ ID NO: 83515 - DNA, 1091 bp, Cannabis sativa
gagttttacttagggcataaaatcccaacagaggtttcattagcatggtagaaaaggaggctatcatatgcaaataataaatgagacactgacagagcacccctggatatcgctaaccatttgagttttctaacattttcgacttgtcttaataaagatgagagtacctcagaaaaaattaagaataagtaaggtgacattagatcaccttgacaaaggcctctataaggtacaattgagcctttaactgcaccattgattttaaaagtgagagttgaggatgccgcacatctcataataagatttactaagttgtagcaaaacccatcttaagcatgacaactcttagtgaatgccattccaccctacaaaagcttttctcatatcctacttaaataccgcaaaccctaaacatcctctttttttattctttaaacagtgtagaaactcaacatgagcctagctccagacgctgaagcctccttctatgcacttgctaggcctttccctgtgaacagagagcctgttccagaacagccctagaacactttcaagcccgcattgggtctcgtacttcctcaaattattgtagatcctgaacatgtttatttggctgttgatctcccatggactatcatttaggataaattttagagcattttcctactccataatctcctcctctgagtcagcttcatctcgacgagtctgtttaggcatggtttctatacaaatgaagaaaattcaagaagtcagccatcctaactacataacattcaaagggagctgaggttcctcccccatgaactacttggagaggtcccaactagactaactatcccaaaagaaaaactcccatgagtcatttgttctaaataggaggctatgaacgacaaagagagaaaagcatatcagagattaatggtgagcccaaaacaagaaggattttggacgtgggaaatttttttgcagcatgcttgctacaaaacgctcgacttcaacaaattctaaatttataatataaaatggtttgtgaagcctaaatttatcaacgatgacaatcacacgaataaaatgttggaaattatttt

SEQ ID NO: 83516 - DNA, 986 bp, Cannabis sativa
aatatatatttacattattaatagtagtaagtagaaaatgattaagagtctacttctaaataactctaatagtatctaaaagctacataacatgtccaaaataatcacacctctaatctattacatgtggggaaaataatccacatgataagaaatgtatatcctagataatgagcttgtgttattgaggatgatataatggctaaaaatggaaaattctcacatattgcttcaagtgagattattaagttaatgtttgattatttgatctgcttcatgtatattccattttctagagtggcttgcttttcgtaatgatggaaaatatagtgagcagactataccaaatatgcaagtgaaagtggtaagcaaagctattctggaatcaaagagtaactcacactcaactatggtaaatttacctcgggatcataagaagatgaagatttaagaaatgggtacccatttcatttataaaatgaacaatgtaatttgaatgttgctaatgattgagtgcattacaaaatatgcttataatttttaatacatttgataacattttgcttaccaaatacactaatatacaattatttttataaaagggtgtatatacattagtaccctatgttttatctaaatacaagtttagtgccttgtatttttaataatacttatttggtaccatgtcttttaaagcatatctatttagtactctaaacacaattttttttttataaaattttatcaatacaattaaactgtcttcaattttataaattctatattcaaatttaattatttagttattgtaagaaccattattttttgtagaaattatgtccagttccatctaggattcgtagtgttttgtctggagttcgtattgtttgtgttaatccacgtcagcaaagatattttgggttttaattattcagatggtaacaactgtctagctatttcaaatttcttggtttacctgggtataa

SEQ ID NO: 83517 - DNA, 1018 bp, Cannabis sativa
taatttatatattatgttataaataattttagtaaaaaatatgcaaatcggtttattcgggttatttgggcgggttagaataatattcaacccgtccaataaattaattggacaatttgagtttttgtaaaatttttcgaattgtattttttgtcgatttatttaaattaggtggtttgttaatatttttgaacagccctacttgcagctattgtgtgcaaggcgttgagtggtggcacatatgtttttcttcatgggaggcgtactcggttttagtatctacaatttatttactttgaaccctattaattagtacctaacattaaccaataaaatcaaactatttattgctatatctgaactttaaatataatttataagagaaatgctaaaagcactagtagtgcctagcactctcctatgtgttaatatcgctattggtctggaatgctcaatttataattataaaaacacaagtttgtgtcaatttttaatgaattttcttagcatattatattttagaaaacgaagtacgacgccaccagtgacagacccactttgattgatgtgggggctatagcccccactaacaaaaatactgcctttcaaaaaattaaatgtaatttttttaatttcataattatatattaaaatagtagaaaaagcaagctcccacaaaattaaataaatctagtaagagtaattataatatagatataaatattttttaatgataaataagcccccacaaagtaaaaattctaggtccgtcactggacgccgccgtaaaaaaaaaaaaaagaaaaaaatcacccctcaacttaaattttggatacaccattgaatggatctcaataactttatttgtgagtgagtgtttgtttgttttctatcaaattattattagttagatttctattttttattgaggctaattagtatttttttttcccttaaattttgacatgtattaaattgtgttcctgaatttttttgccgttaaaaattctccccgaac

SEQ ID NO: 83518 - DNA, 2519 bp, Cannabis sativa
gtagtggtagtggtagtggtgcatgattatttggggtttgtccttgcagatacatttatgtcacgttatttttatccacttgtgtggctgagttgatggttaattggttattcgttaggttatggtattgtgatggcaaattaattgcagtatattatttattgaatctaagtgtagtatggctgcggcgccctggggctatgcttaataggccgcctaatttgagtagtcatcttgatttgagttgttggtatttatggtgatctagctaaaggtggctctctcaaagtgagtttgaagtctaaatttattaaatttaaattttattttgtatgatataaataaattataaaaaaaattgaaaataaaaaataattaaagtttaaaatatgaaaaaccaaccaaaagactataaataaagttggtaaaacttttaatagttatatcaccgaagaagatacagtcactgaaaaagtcaccggaaaagtcattggcatcggaaaagttgtcgaaaaaatcattatcgctaaaaaatttcaatgccattgatggaattgactaagaagaaccaatagtttttgtatggtctaacaggtgtgaaacgaattttcaggagttgaagcaacggctgatcacgacaccagttctagcttaaccattagaccaagaaaaatttgttatttattgtgatgcatccaaacagagtctgggatgtgtcctgatgcaagctgacagagttatagcttatgctcctcgacagttgaaggatcacgagtagcgttatttgatacatgatatggaattggttgctgttgtgtttgccctaaagatatggagacattatttatatggggagaagtgtgagatttatacagactacaagagcctcaagtatttcttcactcagaaaaatttgaatatgaggcgaaggcagtggttagaattagtcaaagattatgactgtgagattttatatcatcccgggaaagccaatgtagtgttggacgctttaaacagaaaaggtcctgggcaagtttttagtaccataatgatatctcctcagttggcttcagacatggttaaagttggaattgagttcatagttgagaaactacataacctgacacttcaatcaaacttgttagaaagaattagaagagtgcaattggaagactctgagctagttaatatttgagaggagatattggcaggttgacctaagtacttctcaatctcgaataatggaatgttacgttataagactcgagtttgtgttttgaacagtaatgagctcagaaaagaaatactcgatgaggctcataatacgccttattcattgcatctcggaaccaccaaaatgtaccaacacttggtggtgcagaatgaagaaagacgtagttgaatacgtatcaaagtgcttaacttgtcagatgatcaaagtagaacatcagaaaccggtagggttattacaaccattaatgctccctaagtggaagtgggaagatattgcaatgcactttgtagttggtttacctagaaccacgggaatgtatgactcaataagggtcatagtgaaccgttttacgcagtcagcacatttactactggcaaaaacatcttatacagtggattaatgtgcagagttgtatgtgaaagagatagtgagctccgaaatccattgttttggacagagatccaaggtttacatcaaagttctagataagtcttcagaaggctgtgggtactaagctgaagtttagtttagctttgtaccctcaaactgacgagcagtcaaagagaacaatacaaatattagaagacttattacgagcctgtgtcatggactttgaaagttcatggagcaaacacttgcctttgatagaattttcttataataacagttattagagtacaatagggatggctccctatgaaatgttgtacagtaggaaatatcgttcctcgattcattaggatgagactgggaaaaggaagtatttgggtcctgagttagttcagcggaccaatgaaacaatagacaagattaagactcggatgcttgctttgtaaagcaggcagaaaagttgctcaaattctaagcgaagaggcattgcaattcaggttggaggacatgtcttcctacgagtttctttgatgaaaggtataaggcgctttgggaagaggggcaggttaagccctaggtttataaggcccttcgagatactcgagaaggttgggcaggtagcgtatcagatagccttaccaccagccttatcaattgttcataatgtattccatatgttttatgcttaggaagtatctgtcagacccgactcatgtcttgagtaacgaagctctagaactacaaccggatctgtcctatgaggaacgaccaattcaagttctcgataggaaggaaaaatttcttcagaataagaccattactttggtcaaagtgtgttggaaattattttactaggatcttagatctactcataagtatgtttattaacacccta

SEQ ID NO: 83519 - DNA, 634 bp, Cannabis sativa
agctctagcagcctctgctgccttaactgcagaagccgctgctgattttgaagcatctactatttcatcaggagatagattagcattattatgagagctcaacagattgctcagacgaatgttgaattggtccgaaataggtgatgaaggaaatgcaggagagccgggtttgggagccaaggcgggtgatgaagaagaggaggaagcagctagagacagctgcaaagaagcatcaacatctgaactctgttttttgaggcctgcaagtaggcgcttacgaggaggcaaaagaacatcagaatccaaatgattcacatcacatagattagtctccattgtttccttctctaatttacctccttttacaccacaaagagagaatggccactaaatctacatctacatgaaaaagaattataagaaaatgtttattaattgagattcaatatccaatctttgtacttatagagcaaattaattgaatcaacaaagcaagagtcgttctcaaaacacccaataactcattcatgatcttctatgatccaaaccaattacaaaaccaatcatttcttattgtataattaatttgatattcaaacatcacatgttcgatcccttccattgccaataaaac

SEQ ID NO: 83520 - DNA, 1709 bp, Cannabis sativa
atcagattattaatttttatggcataaaatcccaacaaagatcaggctgcaactgaagggagaggcaacaagagagaccctccagtacagtttgaccttctgcaaaaataggggtaggagctcctggtttatgagtcattgcagaggctaagacttggtgagagcctttcttgaaaacgaagcctaaactagtaacactacttgattgatttagcgctgcgtccacaaataaagcagtactaccagctgggatagtgtgctgtgatgtaggattggactgagattgttgttgtcttgtgttggccgagggaggatctgtgcgattaattctttgagcctccttatattcctacaaaaaattcttaacaaattcttccacattgtcagtattataagatttattaaacaacactgattttcgagtgttccaaatatgccatattaagctaatgaacagaggaaggtccactttagctaaaatggcgaggccttggagatagaattctttaatgtcctggcctctatgagctgagaaaaattccttaaattttgaatgcttccaaatagtgcgagctctgttgcaatctataagtgcatgggttacagattccattctgcctccactgaagcgacaaaatgggtcgttgaggaatttcttatgaaacaggttaagagcacaaggaaggatgtggttgaaagctttccaagtgaagtgtttgattttttgtgggatgggaaggttccaaagagttttctaccattgattaaaggcattggaattagatggggatggtgaattgatattggaggatgaggaagcaaggtgataagcagagttaacagtaagaatgcttgactagtggtaaccccaaatgatgggtatcgcggggattggggtcaagaggaatttgtataatggcttggtaatgtgggaggtaatgctgtagtttggccatattccaggtgttgtttgggtttatgaaaaaagacacagtggaaaaggaaggatcgatgggatgaagaagagttgggtgagatatgtttggtatctagttggaagcagaaatagggatatcattgccactaccaattttccagacaaggccctttttaagaagttgacaaccccagaggaggcttctccaagtgaaagagatgttgtaaccattgaaggcatacaagaaatctgagtttttgaaatatctggctttgagaattgaatgaaggagggaatctggattagaccaaaatctccaagcctgctttgcaagtagcgcttgattatgatggataagagatctaaatccaagaccaccaaaaaattttgaaaaagagatagtagaccgtttcttctagtggattttcttatcatttgaagtcgaaccccaccaaaatttagagattagacgttggatagcccagcaaatagatttagggagcttaaaacaggacatggcaaaagaagagatagcctgaatgacgactttgataagtgtttccttactagccctagaaaagaattttccatgctagacattcatctttgaaaaaacattttggataaggtcatggaaggcagagttgctaaccctgtcaacacagtggggcacctttaggtatttgctgatgaaaccctcgttagtaagatgtaacgaattcctgaacagattttgagagtcctggggagtgttgggtgagaaaaggatgga

SEQ ID NO: 83521 - DNA, 860 bp, Cannabis sativa
ttccatattttaaattttttattcgtttttccagtttttttaaattttttttatttctccatatatttctaaaccacttacaaaaaagccatatttataaaataaacccttgtcgtttacatcgtaatgtaatgggccttaacgtagttgggcccattgtttcgctctcgagctcaattctccaaaattttgatccatttccgctgccttaggcataaaatcccaggcccgtaaagagcccaaccaatgaaagaacccatgttgtccaatctctgttcaaaacttttctggaaatacacattggctatcagaaactgggcattgatcaccatgagtatggaaataaacagaaatttgaggtggcggcatgcaattgttctatttactctggtcacctatccaacttcggctataggtaattaaatttaatttatatttagataacattgttttacatatatattaaatgtaagaatagtgaatcgtatattggactacttaatttttagatacaaccttataattttttaatatggtattagaacaaaactaaaactctaacgagtaatcaattcaaatctaaaaatcagttcaaaaagatgagtcaaaagaaccgctcataattcaaggtagtgaaccaaaagaactatttgtgatcaagtcatacaagattagtttgcatgaaaatagctaccatcttgagaggatgttagagagttccagatatgttagaggatgttaaaaaaatatcatatgttaatttcatttttggcatatttaattgacaaaaatattttattatttaatgtatatttcggctggcatatattgatatggtttgtgtaaatcaaacttgaaag

SEQ ID NO: 83522 - DNA, 847 bp, Cannabis sativa
tttttcaatttattttttttttttttttttttttgcaaattctttcaaattgtgtttttccttccgtatgattaaattctttcaaaatagaggcatcaattaattaaaatccagtcaagaaagaaaatttgacttagtatgcttaaatataaatcatggtgttttaatgtaccacccaattaaaaataatatatttatacttttaatatatttttctctcaaaattccccttacatttcataaaacttctctctctaaggctctcactctctagtgttgaaccccgacctagaatctctgtcgtcgaacacacaaccccagaacctgggttgtaagcccccgttatcgtcttcactcacagcttttctcattttttatattttttttcttctggttttctagtttcttgtaatatttttttttttttatatttaacgatatttagcgatatatttgtaatgataaaccaaatctgaggttaagaatgaagtttagtgataattaataatatttggcgatgttttgcgtatttagcgatatttagtgatgatattagtgatttatttgtgatatcagactaaaaaatgcatagtacatcgctaatcatcgtgaaaacttgagtgtgattttgtggtatttagtgatattgtgaattagaaacatttagcgatatttcgcaacatcatcaaaaactagaaaaaaaacgcaaaaaacgagtgagttgagaactctagtgatgggtaggtatttcaagggcttcagggtggttgagctcatggattttgggactttgggatggagacaacaagagcaagagaattatagagagagaggagagagagagaga

SEQ ID NO: 83523 - DNA, 839 bp, Cannabis sativa
  modified_base (27)..(39): a, c, t, g, unknown or other
  modified_base (764)..(803): a, c, t, g, unknown or other
aggatgttaatgaaacatacatggtannnnnnnnnnnnnctggtaaaatatttccaacactcaatgtttttcgagatctaagaaatcctctttccatttcattcttcaaagagtcagtaataaacttagtacctggaaatcaaagctcttttctaaagttggcaaatagatcctgttgaaagcggtaatccaagctataccttcatatgtaatgtcttattacagaattccccaatcgatttgcaagcagcttgaaaaactcatggccaacttctagtggggttcaaaaggcaacaacaagtctaaaatgcactggaaatcttggaacaatctttgcaaatccaaattctttgggggtctcggttttagaaccatcgtttgtcataatcaagccatgttggctaaacaagcctgaaggatatttcaaaaccctacttcccttcttcccactatcttaaaagctaaatattttaagcataatgacttcctccattcttctttgggtcactctccttccttttcttggagaagtctgctttggggaagagatcttctttccaagggtttagtctgcaagattggtgatggcaaatccattcctaccctcagtcctaattaactgcctgataatggtcatctacactataaagatgattccttgcctcatgaaaataatatttcccactttctcaaggaaaatggcaattaggatattaacaagctcaactctttctttgataaagatgttggaaattattttaccnnnnnnnnnnnnnnnnnnnnnnnnnnnnnnnnnnnnnnnntaaatatgaactttctaaaacgaagatcggaagagc

SEQ ID NO: 83524 - DNA, 747 bp, Cannabis sativa
accgttgggaaaacccacttttgtagtagtgaaagatgtatcggcgtatcccttttaagggggtgcattatagaatttcccaataatatatacatacgttgatggattagtacttttattttgttcatgtcattattgtttgaataaaatgaaaatctatattgttttcgattaatgtcttcattttcttcattattaatagtagaatttagatgacataaatattcaacaataaatattataattcccttttaatttcacattttaatatgttgttaccaagctactttatttctaattatcaatattaatataatcttaatatataataagattggatgtttataagctatactaattatgtggagtgcctatagatatgtcacttattctatttttttgttaatacaatttgattattttcatgatcaatagggcctttttcaaaaattaacactgaagagttttctctcaattaatgaataatatatcacgttttctttttgcacagtaaattaatgaccaagtttatatctaaggacaaatcagtatatatatacactcaaacaaacatgaaaaaaaaaaatacaaatgaaaaaaaaaccagttttatctatttactaattaaagaacacttataattagctctctgttgcccttttctagggccataaaattaaaaaaaagatattgactatatataagaatatttctatatttaatgaagaaaaaatattgaacaattgc

SEQ ID NO: 83525 - DNA, 782 bp, Cannabis sativa
attactttagtggtgtgaaaaggacatattaaaatttgtatcaaatttaatccgatataatatatgaaaattacatattttattgatttttatacaaatatataatttattttagaagaagaaataaaaaagttaaaattactgaaaaaaataatataagataattgattatgttgttagttactattcagcttaccctaaacctatttcttatatttttttttaaaaaaaaaaatccacaaaataaattttcgaaaaaaaaaaggttaaattttttaaactttgctattttgttcttattttttgttatttttatattattttatatgtgattttcttattattttcatattatttttattagacaccataaaattgtaattaaaagataaaaaatcgtaatttttttttaaacaaataagtaaaaaggtaaaaaaaaaaaataattatttaatcgtaaaaaatttaaaattttaccaaaaaaaatattttacataaactcagtacaaaatttaaccaattaaaaaaataagttatactttttatttattatattaccactattaattaatctaattcattaactattataaaatttatattctttatttatcatattattttaattttgataataaaaaataaaagaaaataaattgagtatgtttacaataaagtattaatggctatataaatagttgttatagataaataatatttactatattttctattttttggaataattatgcactgcaaccttatccttctccaatttcaca

SEQ ID NO: 83526 - DNA, 699 bp, Cannabis sativa
ctcattgatgcgcaatactgacgaaaacaagggtttttaccaacaaaatttgtcctcagtaatgctcatttttcttgtagtgtatatatattatgtaataatatgcatgtatataactgtataaactacaaagctattaaaataaatatatctagtttttaattattaggattattaattaattatttgcatagcttaaaaaaatatatgtataatttgaaattggctaaatacatagaaggtttattaattaaattaaccttgcctaatcaactgctgctttctctatcaatatacatataatattacatcgattaattaattatatatattatattatatatatatatttatagttcttgaaattaattattttcatatagttacttttcttattagctacttattagttattacagtgaaaaaaaaaatgaacttatgataaatatatttcattttcctctatacctttttaattattttattttccaaaaattaaaaaagagtaaaactattttgttatgtctttagtattgacatatttctccacacataaagatcgaatatgcaaaattaattgttgtgaaattgattttctaattaatgaatttaaagaatatacatacatgaacattatgattagtaaatttttgcaagtatactaaacatgatatgctttaatttaatttatattacaaa

SEQ ID NO: 83527 - DNA, 688 bp, Cannabis sativa
tgtacacgtggatagtccactgtggcacttaactgtgatttttggacggaggtgtgcagagcaaaacggaaccaggttttatgtagtttagctgcgaaaaattcagtttttgtggttaagtgttacaaaccgtaaagttcaggtggtttagccgccaatatccccaatttttaacttattaaacttttgtaggggatcttagtgacatttcaaaatgtcactattataatatatgttttcaaaaacaaaaatttctctaaagacagatcacccctggatctgtactgattcgccatgaaacgacgtcgcataagtagagaggaaagatccacgcgcggtgacgattttgccaactagcgagtgtagagagagaaaaagcttttgtttttgaaagaaagaaagaaatgtgagaaggattagtttgatctctggcttcctctcatccctcagtggggctgcctcagccaccgcaccgttccttgccacacgtgtgttgtggaaaattttgcctccaccatctcaagtgaaaagaaatatgaaataaagaagacgttaggaaggtaaggaaactccaaaattctgaatcatttggagaagaagatgaaagagtaagggtttagttactcgataatgctgaagtcggaaattagtcaggggagattaaggttgtttgaggtttcaatggagg

SEQ ID NO: 83528 - DNA, 957 bp, Cannabis sativa
catttaattacttaagggtagtgtgtatcatttgttacctttcattttgtcatgaataggtttggcatcctgttttttttaattaatgttcatttaatattttgtattttaaaattacaaactttattttaaattcaaattttattaattagattgtaacatcactactttaagtcttcattaggcatcctcccacacaaactaattaatgggtctaacttcctagaatgacgattagccttgtaaattaattattttctaacgtactttgttatcacttacatattttatagtaaaactttttaggagaggtcattcatcttatgattactctagattaagcacacttaactttagtgttcttgagactaagtgattggttattgaaaaaaaaaaatgcatatctggttgatttatgcagtaccaatcaatccatttaaattattttcaactatgtcgtctatagttagaatcatcaaacttgacattcctcaaacaatgtaaaattacacaacttttggaatatttatccttatgaatgatcacgagactactaattattacataaatattatcattatgatcaatctccgacccttcaattatgttagaatagttctaaaataaaatttaattatttaattacataaaactgatagcagtgtttgataaaaatgattaaatttgagttgagactcaatatgtataatttcaaaatataaaatatcaaataattaagatttataattaagcattattaaaaatattaagtttagctatttgattattgtaattaatttaaaaattaaataataataaataacatgtaactttataataatcttatttatcttcacaatgatatttcttatttattaaaaatagtttcattttttaaaccattaacaatcaataatttgtctttctaaaattcttttattcaacaattatttcatt

SEQ ID NO: 83529 - DNA, 616 bp, Cannabis sativa
aaccaaaaatagtgatgagcttgaaaggtataacaagttaattaaatgatgaaacgtaagttaattgggtacataaaatgtattatcatatattaacaccattctcattctaatgatgatattgacaaagtagtcatttcaaaccacaataccaatatctttttcttttcttttctttgtttggaaagtcatattacaatttacaaggccttattcttataggtgtttaaagaccttcctctggtccagggactaggtaaggtaaggtaaggtataagggtaagctttctttagacattttctaccactaatattgcagaattcgaataatagtttttccaaaatagacataaaggaaactttctcacttttaaaaattataaggaaaaaataaaatgtgattcaacttttggaaccaaagtatatctttctttataaatattataacttgagaaagaaggttacaaaagtgttctgttttagaataagttaaaacagagtagtaatgatatatataacaacaacaacgtcaacagcatttgttctttctaataaaagcaaaatatacaatgaagcttcctatgattctgaataaaaactttcttttttacaaaat

SEQ ID NO: 83530 - DNA, 959 bp, Cannabis sativa
attgacttgtatgatttctaatataatagaattctaatgtgtaccgattttgagttgttgaaattcattttcttaatgaaattcacaaaacttctaaataaatttagtaaatccaaagtaatgaaagtaccccaccatttactaacatttattttctttgtagagataagctatataatcttcggtgccataatatagagaaatttttaataatatcacattctttgttgccagattgaacatgtagatccttatgagtaacattattttataattaatattgtaaaagacctgtagacatgtgtctaaattaagtttctaaagaaacttggatcataagatttttgataattttaaaacaaagtcactattatatattgcttgttcttgaagtttctaaatgtgagaaatcatcttgtctgtggataatgtttactcacagttactcacttcgtttggtttatttgtaagcctttcaaaaatcatgttgaataatcatctaaaataatcaactatgtattaataatcacaacaactatattcagtcatacaaaagaaattgaaaatttattggtgataatgaagtgtgatttacttttcttaatattgtacggtaaaaatctgtacattctagatgaagttatcagagtaaattttgaaatttctactagtaccgttgaaatttatgaatagtgatgtaataaaattatataattattaacatatagttttgaggtgtaaatgaatcatatttttaccaatgtataaacatagttaaatatgaaatcttattaaacaaaaattacttgtgggctaaagttttaatttaatgagattagatttagatgttaattatgatagatttattaaacaatttatgaaatatttaaggtttgatatttctatctcaattaaatatttgaaacatttaattgttttataaatgtttcaaaatttta

SEQ ID NO: 83531 - DNA, 628 bp, Cannabis sativa
  modified_base (43)..(59): a, c, t, g, unknown or other
gttatttctgatctttactaactaataaatctgattatattgnnnnnnnnnnnnnnnnnggcacaaaacccaacagactccccacggaaaattgccatagacattacccagggagaacatgcacacaaaattttctctaaaagatgaactacgaagtattataatctgctcaactatacagaaaagtcaagagaaagataaacttacacaatgaagacaatgcaggaatggaagtagtcgcacgacagtagtagttcctctggcaacgacggaggaagagtaggaggaaatctggggagtttggaattttgtcagaagggacataaggcctggaaatggaaacatggtgagtaaaaatcccaatcacaaagggtataagcttttataggcccttcagggtaagtgtcaaagctactcgagtaccatcggatggtgaaggttcataccgcccaaattctagtgattttacggccaggataaactcgtaagataaaaagaaaagagcgattgaaatgcttaagtacctctctgacaactacattaatgacggggttcatcaaataggcaggaatcaaatcgttgcctatcgatcaaaaacaaggcggaatgattataaacaataaatagc

SEQ ID NO: 83532 - DNA, 1391 bp, Cannabis sativa
ataaatggttttccttatagtgtggtaaatattttattcacatttatctattgataagagttatataatttaactagcccttttcttcttacccttagtcttaagttgtacaccgctgttccctgttgcaatgtgtttaatgattttaatcatctttgagttgatatctctttgttaatcatgataggcctggaatatttgaggtttgaacagcccaaagaggaagcgatatttacgtcttctcctcaaagactatcatccaaatgtgcttttcttacaagaaacacggttgggtggaggttcttgcactgccatctgccaaaaattctcctttactcatggatacgaagagcctagttgtgggttaagtggtggtctcatgttgttatgggactcttcagtggtgatatccaatattacatcaaatccacattatattagatgtttcctttcttcatctgatggggtccattcgtttactttttgcgggttttatggtgatccagttacatctaatcgtcacttttcttggactttattacgtcgaattaaggagtcgatccacggtccttggttatgcatgggggacttcaatgaaatcctacaccaagatgataaagttgggggattgctcagaagagaatctcaaatggatctttttagggaagctattgtagactgtgctctctccccaatgacctatactggtgaacggttcacatggaagtttagctctggtgcggatactattcaagaacgtttagactgggctttgatcaactctgaatgggaagagtctatacctttagctagtctaacacatttagacttttttgggtctgatcatagaccacttttattaacaattggtgaccttcctgaagttggcaacagttctttctcccgtaaacgcaaacgttttcgatatgaagctatgtggagtatagatcctgagtgtcatcaaattgtgtcatcctcgtgggaatccactccagcttcttctgtgacggaggttatgctccataacatttcctcttgtgctcaaagtttaggtgagtggcatgaaaagaagtatggcaagctgcctaaggatattcggaatactaagcgaaggttagctgaagctgaaaataaggatagttatgcgtatgatcatctggaagttaatgagttagaatctcaactttcagatttactagaaaaagaagaaatattctggcagcaaagatctagaatacatggttgaaagcaggagatcaaaataccaaattttttcatcaatatgctaacacaaggagacgaaataatgctattccaggtttgttttttctggtgattttttagcaacttctttattatcatatctatgtaagtatgttttgtttgttgta

SEQ ID NO: 83533 - DNA, 543 bp, Cannabis sativa
aggttttcccacagattgaaaagaagagtctaaactccttacaacagatcctgacctaagaatcggaggaatagaattcttaccttggccaagattactgttacattgcctgttagcttccatgaaatgcaaaaaatccaatcgaacatcttcctgtctctgtatctcacggagagaggatctcggtgataaagctggaaaagcttcttgttcttcgtcttcctccacatcagagaaatcgataggttcaattcccaggacagctgccattgattttgttttcttaacatcaccagaggatgtcggacctcgtttcttcactggtttggttgttttcgttgcagcaggtttcttccccaaattcttggacctcgtctttgccatggtgtcagctcgagagctgagagagaatcgcagaatcagagagctagttttattttttctaagaatcaatatcatgtcattttacatcagctcactctcacaatccttacataattagcataacacacagaagcgaatagtggtactcagtaggtttta

SEQ ID NO: 83534 - DNA, 667 bp, Cannabis sativa
atatagaaagtgtagagactaataagtctatatattatactatttaattatgagtttgttgatatgaaagaatataactacaacctatatattattagtaaaagttagatatataaaaaattataaaaataaaaattaattaagagatgatcatccctaacatttccaaaaatgttaattaacttaattattatgttacacattctcataaaatttgttatagtacattctctactattaaaaaatacatttcaaattatggaataatgagctgccataaaggaaaaaaaatgtacagttatgaaaataatctcttatttattatagattatcaaattaaattgaaaataaatagaaataaatttgaaattacaaagataatattgatgtaatttattaatttattattatttttttgggtaaaaattaatataataattattattaattaatgtttttttggttgttgctattgcatgtgggagagaggtattggacttgaaaattgtaaatttttttttttttttttaattttgtttgatttagttatttttgagaaaacgttacttttaaaaaatatatattgtttatttattttatttttaacaaacgttacttttgaaaatttgcatgcaaagcattttaaatatcgtggggaagaaatagc

SEQ ID NO: 83535 - DNA, 663 bp, Cannabis sativa
ttagagagtagccacaacatctttgattaaataaaattatgtattattcatgtcatattacttttatctttaagtgtgataaattaaactcaaatcagcatgtgtaaaataatctggaatgggaataaattaagaacattctttcagttctacttttagaagcttaatgtatgcctaagattctaaataagacttgtattgcatttatctcaagattgttaagttatatcagactaactaaatttaagactattttattttttttttaaaaaaaagtgatgaggtatctttaagatactaaagattatatttatgtatattttatgagatgaactgatattttagaaatttagttgactacctaagttgtgacttcactggatatattgatcacataaatcaatattcgattacatccttaagattactagtaagttgtatcgtggagaatcttaatttctatttccattattgaagtcagattcatttattattttgatgatacatctcgtatggtgtactgtagagtttcatactagacctagagtttagcattttatttttaggccattaggaaaatttcgtgataaattcagctacaatatttatggctaaaaactatttaagtaccggtcgaaactagcatatcaacattaagtattt

SEQ ID NO: 83536 - DNA, 706 bp, Cannabis sativa
aatagagtttcgatatagtagttcaattgtgttgttttatcctgaggatgacgagactgataatttgcttgcacaattctgagcagtactgtgattagtaaaaacgacctaacccacgattcaatctagattttaatttatatattcatttctttttattttctgcaacatttactttcaacatgtttttgactcagtatttaatttttaataaatttctagatggatcataacactaaatctcataattaactcataattaacactttgcataatcatttatcacaaatacttataaaaaaaatattgatctgtatatgaatatacatgagactttttctctcatcttataacatgtgtatatataaacttaataaatatcaattgaattagttgacataactcattatatatgtatattatttgattgttattttttattaattattaaaccatgttataaaatatagtatattaatagtggaccgacttatctcttatattttcaagatatatttatatggaatagtttattaagatgcaatgaactattcaaatattctcctcgatgaaaaattaaataatagtaaataataagagagagtataaagtttaatgattataaaataataagcatgagagactttttgttttcttacgagaaagatttgatctttctaaagatagaactaaggaaatataataa

SEQ ID NO: 83537 - DNA, 1679 bp, Cannabis sativa
  modified_base (1601)..(1608): a, c, t, g, unknown or other
  modified_base (1643)..(1644): a, c, t, g, unknown or other
aaaaaaaaaaaaaaaagaattagggagagactaaagaaaagctttatagattattattttttagcttagaaaaattagattttaggaagtaattttagagggaaatttgagtttttatgcttacatttagttaaaaaatttcccataaatacataataactaatatttgtaagatatgacaatttttatgatattcttaaaataccccccatttacatcaccccatttacacaattggatcccactcatcggaccccacatcggacacaatcggacacatcggactaatcggactccccccccatcggaccctatatcggaccaatcggacccaccatcggacccatcgaacctacatctcctacctcgcaaactcacagtttcattcgacccttatcggaccctatcggacctacatcaaaccctatcgaaccttgaccaaaatcacagatctgagattctaaaacttaaatatatccctaaatctaacaaaatctatctttaacactaaaatcacaaacaaaatcaataaaaaaaaataaaaaatggtagtggtgctttggtggtggtgcgtcgtgggtatcggggtttggcagtggttctcctccgtgcgattgaaggtcggaacggtgggtctccttcgtgcggttgtgatggtggaatgggtgggtgtgggttggaatggtgatggtgatgtgggcgaattggggttgcgatggggagtcgagcgaagaggcaaagaaagaggttagagggaaggagagagaaacagtttgggattttgagaggggtatttttgaggtttatgtaaaatggtcctattttaacaattacccatacttttggttttcctaaccaattataccttaaaacatgcataaaaaattaaatttcccttttagaacgacatgtcactgtcttattcctctgctatatatatagatttttattgataattaaatcataaaacttttaatatttttttatattttaataataatataactagctataaccacacattcataatatatatttatattaaaaattaaagaaacctcacagaaaattttattatataatttcaaaacttttgtttttattgtatctcacttgtagttattatagtactatatacattcatcgttaatattattattgtatcttaattatttgtaatcactactacatttattatcacgtataaattttaagtagttacaataaattataaatattccttttcttattaaaaacaaattatagatatttttttccaaaaatttcatgaatagtacatgaatatatttcttttaattataattttacttaaaattaaatcaaatattttaagaaaatgacattaggtatcttgaggattagcacgaagttacgtttaggttgcaaaacctagaggaaatttaagtgtgtcgagcctgcgtgcacctttgaaagtgcacaataattagcaccaatggatttggcgatgaagtttcttcaacattttcgtcgctcaaaggtgcactcaacaccactccttcccttggttcgaaaaattgactccttcatacagaagtctgttgggaatattttactaggannnnnnnntactaacaagtatattgattaacatcctaaatatnngaattctaaaacaatgaaataagatcggaagagcg

SEQ ID NO: 83538 - DNA, 656 bp, Cannabis sativa
gaaatgaatttcggtcggtttctacgaagcaagacatgagctgatacttcaaaaagttgctgaaactaaggagttcattgatagagaagctttatctcgagtaggaaggtatgcaaaatttagaatcaaagtcttttatagctctctaatctccgttgataaagttgattatgctcctaaagtttggcataagatgaacatttctaagtacagatttatttgttggcaagcatttaacgatcaacttttaacaaaggatcatttaaacaaagttttgacaattccttttgacttatgtccagtttgtgaagcagctagagaaactcatttatacttatttgtggagtgttattttaccaaaagtgtgtttgttgaaatcaatagatggtttggcttgcattcaaaaattagatgaattggtattccaactgatttctaatttgcaagatagtgtcattaatactgccatgacaacagccttgtatttcatttggttgaacaaaaataattgtatctttaatcttacttgtaatactatcaatcatgttagtagggaagttatgaagtctgttaagtttagatttgtgggattgagtttgaacaggctcagggggttgatttgtatatttcttatgttgttctcattggtagttttt

SEQ ID NO: 83539 - DNA, 986 bp, Cannabis sativa
tactagtgcatcaaatatggaggacaagaaatgaaagattctggttgcaatcccttgataatccaaaaactattgtacataaagtgaaaattgcatgtaaaaaaatagaattcatagtgtatgactcaaaaaagtttcaataagagatttagaatggtatattacattataaatacagttatacatagaaaattgtattagatgaaaagttaatctaggcctttcttaaaaggtgttgcttagtttgtaaatatttattggagtaataaaaacactgctgaatttcccaaaaaaaaaaaaataattataacaaaaagaattatataatttaatttttaacattttaattgtaatgcatattacaaaattcatatttttttttaatatgcattagtaaaagcaaatatttaactgagtattttagttatatacataattggtcatatataagattcccactatttagatatattttacacaatatttatataacttatatattgcctagtactttttaaatcctttagatagcattaacagtatttgaagtgcttatttcattatcaccatcgagcaatgagatagcattatatttgatctagttttcgccattgtattcgtcattttttgcttttaagtagataaagaacttcctagtagtggaaagtctagcaactgataatatgttttgctctcgatattatgaatatcattaggaaagatattaacattaatatattaataaaataaatgagtttaaataataagagatacatttgagatatagatgagttgttctattgcacaattcaaaaaattctctacatttttttcgagtaaaatgactattataaactagtatgatttgttagttgaggttagaatcaatacctaaagaagcacaatcaaattctaattaatttaggtaacttagtatgatatttataattctagtaaatttaagaatactgttatccaaatttttg

SEQ ID NO: 83540 - DNA, 1228 bp, Cannabis sativa
tatgtaggcatttaacatactcacgcatatgtgggttgataacctgcaagctcttaaagaacttattatctaccatttccagtgatacaactttgagctgttacatctgagaagactcatatcttttatgttctcatcatatgttgcttatctcgtggttctacgactaatgtataatgcgagacagatatgactcgttatttactatctcttcgaggtaattcattcattaatgatttttttatgatgtctattacattgatatgacacgtgttatctttatatatagtgctcgaaatatgggcataacagttgctaactatatattaaagtacttttagaagtaatgttgttaaaaataatgagaaagagaaataaaataaaatgttataactttttaaatgatataaaatttgttaggacctttattattggaaaatgctttctagatgccttataattctatacgtttagtagaactagtacaagtgactccgaagaaagtgcttgtgctgccccctaaatgtaccccctaaatgttttctaagcaaaataaatatcataagagaccaaatagaagattaaacatgaaaatttgtggtaggtgaactggcgattgccgaatggtgaaggcaaggtacgtgagtatatggaataggaagtagaactaccaaattaagtgacttcttactagttccaatcaattaatttgtcaaacatatgagtaatgggtcaattgactcaatcatgccaattaataggatacaaaaataaatataattcttttctatttatattgtttaaggggttatggtaaaccgtttgttttgctatctaaaaattttttaattgattttttttcataatctataaatatttaggatcactaataatttctttttataaaattttaaataatttttagtgtcaaaataaaatttaaacaatgactaactacaaatataagaaaaaatatttatacttgcaataaaatatttaaattttattttagacattgtaaattatttaagatttttgaaaaattcacttttggtcctaaataactatataaagtacatgatcgtaaaaataaattggactaaaaaatattcttagataccaaaacaactatttagagtggagtagacataccctatactattataggagagttttataatttgtgagttttattttcactccataaatttttcaatacaccttattt

SEQ ID NO: 83541 - DNA, 2382 bp, Cannabis sativa
tctatccattttgaagaggaggtactccccttcctcttttcttaaccattcctggatcttgaatctgaaagtcagcatcagtttcttctgtgtgctcctgcagaatgtcaaaaacattctcagtgctagttttcccttgttgataaacttctgttggtttctagccattagttacaggtttaaaaccttcagcatcttctacaatttctttcttcccctctactttcttctctttcaccacccattgttgctttgcctgcactcccaattttttcctgcaagcatctgcactatgtcccaagcctttgcagtgtttacacaaaactagtttccactcgtacttaactcccacagaggcagtaagtccatgctcatcttcaaattcaatcttctccacaagctcttgattcatagaaacttcaactaacactcttgggaaggttaatttctgcctttgcttagttacttcatccaccaaaattggctccccaatctctcctaccagtttgaatagagtattttgcccccaatacttcaattcaagattttcgagttagatccagatggggactttgcgaatatcttcctttctcaaattagaatcaggatgccaagccttcataatcactagcctcttattgaaaaaagtataacccccatttagaacagagtccctgtcttcaatagttgcaaaccttatcaagaaaatgccatatgaaatgagcccaaccttgtctactttttctttctagattcgcctagcaaacccttccaacacctccagtggaggattagctcctaaataacagacaattgtagagctccaaaatgaaacctcctcttctatatcatccattgttatttttacattaggttttcccacagattgaaaggaagaatctaagctccttacaacagaacctgatctaagaacaggaggaatagagttcttaccgtgcctaagatcactgttacattgcttgttagcttccatgaagtgtgcaaagtctaatcgaatatcttcctgcctctgtatctcgcgaagtgaggatctaggtgaaagagctggaaaagcttcatgttcagattcatcgtcctccacatttgagaagttgataggttcaattcccagtacagcttccattgatttcgttttcttaacatctccagaggatgtcggaccttgtttcttcactggtttggttgattttgatgtagtaggcttcttccctaagttcttggacctcgtctttgccatgacgccagctcgagagctgagagaggaagagttagagaaaaagctttatataaagcttataagctttgtgattttattgatatgaatcagtgtaattacaatttagagagaatttatatataggtagtaatgagttgagttagttatgaaaacaactaacttggctcttaatagaatttgaacataaccaagaaggttcaatgtaacagtcgtgaagacacccaagaacatggaacaagggtaatatcgtaatacgaagaaactaccaaagcagtatcgattaggtatgcccaatagacaaggggtaagtgagattgaaagcacaatgctcttgcaatgttaagtatgtgttgatgttttctttccacaactgattttttttgtgggcgttcaacacaagaatggtagtaagtaatgcttttggaagcataaaaggatgacgttgctagttctttggcactgtcagattgaatagctttaattggtgtagaatattgagtgcaaaccatgttgtaaaacatgggaatcacagtgtggagatctgctttagttttaagcataaatgtccaactaaaccaagatgtatcatccacaattgtgagaaaatatctatatccttctatgcttgtaagatggaatggtccccatatgtccacatggatgagatcaaatgcatgtttagcgaagttgttattggatataaagggtcgtttcttttttcttgcaaggtgaaaaatgtgacaatattgattcaaattaatggaaaaactagaatcaatttttttattgaatgtattagagatgtgtgtatgccattggcctacattattatgtaaagaaaagaaacaactagaattaagcataggagtaaactcttgatgaagaacatagagtttcctgagtcttttagttgtcccaattaccatgctcggagaatgagcctatattaaacatgaattattggcaaaaaaaaccagattagaactactgtcaagaaatgcaatgattaaaaaaaggtttctcttgaaagtgggaacaaatagcacattatgaagtgcgatgtgtttgtttatttagacaataccaatgcccttgactcatatgttagtgccataaattgggga

SEQ ID NO: 83542 - DNA, 691 bp, Cannabis sativa
tcgggttcgggtcaaacccgctcaaaatgttcagccctacaattaatattttgactcatccttaatattcgtaaggtaatacctttaatatttaactgttaatagtattttttgaagtgctttaaatattgtatttatattttttttggacaaatcccattttatttttgagtttttgtttacttgttgttatcatatttattacttgaaatatgagtataataataaataaataaatatattttaagtaataaataatatttaataatagtatgtttggtataagagtttcacttagggagttttagtcgagatgagttaaaattaagaatgtcaaaggcattaaacaacttgaaattacttcaaaaataaacttaacactaaaaacatatcatagatttgattttatattcctatcccaaaaaacttgaacccataacaaattttgtataaatgtagagcataacaaataaattttaaaataaaaaaataatttaaaatagtgtatttttgacttaattccttaaacatactatatttttacgtcacctacctattgtgagtcctattaatataataattagagtaatttgcggcaaaaccccctcaactatcaatttacttgcaaaaaaccatccaacctcatattttggtggaaaaaccctccaaagtactgttccgtttacatttt

SEQ ID NO: 83543 - DNA, 855 bp, Cannabis sativa
  modified_base (28)..(45): a, c, t, g, unknown or other
  modified_base (811)..(826): a, c, t, g, unknown or other
atctttattaattagtaaatatgattannnnnnnnnnnnnnnnnnttagggcataaaacccagcagtgacatggtttccctctgaatcagggcttgtcccttgtgtcagagcatgatagtgcacgcaacaccaaaaggaaaaccttcctttgtccaacatcacgtctccacagaacacatgtgtgacgcccattggatatctatcacagactgcgtggtctccaggcatacgaataccttcgccccacgagctagaattctactggtgggctctaagtcatgtatttattccaatagtgggcctaatttatacaaaaatcctagcgggtcactggacttgactcctagcctataaatatctctttataccttcatgtaaagggttagaatctgaagagtgaaaaaataatatagcaaaaagttagggttcttaagcttggaaaccccattataatacatcaaggttattcgaccaaatacaagtgattcataaatcaaggttaattaatacctgaaccacgtaaaaatctccatctccatcctttactaatatttttaatttcttagctctcattttaattgatattcaaaaatctcaataaacactaccaaattctctcttcaccatacccaaacacttttccatttgagcaatttttggggtcatttttagtgaaaggtgaacaattttttatgaagcaagagtcttatcataactttgttgtggagacaggaggcaaatgtcaaaattttccaggttttagaaatgagtatgtgatttttgttggaaattattttaccagaatcttannnnnnnnnnnnnnnntgttgattaacaccctaaatatagatcgg

SEQ ID NO: 83544 - DNA, 502 bp, Cannabis sativa
ttttctctccagcaagaaaggtaatgttcctgccaaaaaacatgatctctgccacgtggtgaattttttcttcacctttgtcagtgttgcaccatcattatgctggcaaaagtcatttacattggcgttattagttgccggtaaaggtgagtgtcgcgagcaacaagtttgcaccttttaacataaaccgatgcaaatgcgttaacaaacattgtttcacaaacttatttgagcaaccgtttgccgactcaagaagtcttgcagtactagcaattcttcgttttgctagtgcagctcagtaaaatatcaatttttatagtaatggtaatgtgtatattataactcaaaagctgattgagcctcaagtagtgatgtttggtcaaagttcatagcctagataatcttgatcgatcataacaataataatgagcttccatgaacaactgcctttccctttctatatgtatcttgttattagtgggttgttgttgtcctccatttc

SEQ ID NO: 83545 - DNA, 1259 bp, Cannabis sativa
caattagaatattattttagaatattattttcttggtccattattttcttggtcccatattttcttggtcccaagtgtcccaagtgtattcttgaatagaggttctactgtattaaaggggaaactaattatattagagaataacaaatggaaatttacatggtttactaacttttgttatatttttacaaaaatactgccagacggttttttttacttttttactgtgttttttataagtttcatactgcagtatactgtgttaagttttcactgttattctactagtgttttttagttgttctactattattttaagttgttctgttttgtgttctactagtgttttataaaaatgcagtatttttaaaaaaaattccgtgtgacagtatttttgtaaaaattaaccttaatttcaatatttttgaaaattttcctaacaaattaacaaacaatgatactaaagccccataattctaattctaataagaaagtcaagcaaagcccattagaagcattaacaagccaatgcccatcaggcccattggacaaaactaaaaatcatcttttctcatattgtacaaaatttgaaaaccacacaacatggactttaaggatgttcattaaaccactcaaactattcgcactgcatcgcaccacaagaaaatacagtttgaaattctttacggtgcagtcgcagtttaaattgcgaatcccccgtcccaggtcatgggtgaccccttatatagaggaaagagtcggtgcttctcgctttaggagacgcgaccaacgtagagctacctcaaccatctctttggttttcgaaggtagttgaagtctgatttttttatgataatatcctgctattttcgtgagtttataactatctttgagcttcttgtgggatttgaacatttgaactagtaattgacgatgagggtctcccaagggtgtgacacgctcgttgatcaccttcggggataaaagctaacacttgggggcgacacgacactcccgagatccaacttgaggagggtgacaatcatctcggggtgaccccttgtatgttgttagtagtcataatgttatgtggatgtcctcatatacctttgagtgtatccttatgtctatggtcggggtagtgccatctaccccttagactaacttggcatgtaggtgtatggtgattgttcaccccacctacgaaggtgttagttcatcgtttttttcttcttggagatgcctaccttactcaagct

SEQ ID NO: 83546 - DNA, 947 bp, Cannabis sativa
taggggccagagttgaaatcagagcatatttgggagacgacgcctaaccccactttaacatgtcgtaaacgattgaactgatagacatgacttaaactacgtcttccattatcgtatatataaattagtcaattggcatttcgatgaagtaaagcatcccacggaaaatcaacgcaattcacaattaagacatacacacatataccagatatactactcaaactcccataaaaaaaatcctatacaaattcaaggagctatgacaaactatatttaaaatttaccggaataactgcccgcgaaaaacctaatgatagataattctctcaatttctcaacaataaatgaagaacaatagttcgaaagttcaagtccaacatttccattcctaatttgatctagtttatgcataaaagagcgtgatatatacagaaattcaacaataaaagagtctaaatgttagagaagatcagatccgacttgagagaacgcaccttgataattcgtctaagatactgaatgaacattggattacttcgagaagtagaggccgaagacgaggagcgtcctttcgaaaccgtaggcaacatctttctccttctctttctccttcttcttctttgtcttcttcttcgattggaaatcgaagatctcagaaaattaaacgaaaaagcttcgctgtgctggaaatggcaggtagcaaactttacaacgacttctttcccttatttgtctcaaaggcccaacttttagttctactctcaaatgggaaggcccacctttcaatttttactagaacccattagcccattcatctttagggcttcttagaaaaaaagagcccaaacatattaaatgtagtgttacatgagagtttcaattatattgaattaaatctcatatgttttgttttcaaaaaaaaaaaaaagggaaatttacacagttta

SEQ ID NO: 83547 - DNA, 784 bp, Cannabis sativa
gtgtcaccatcatgcgatgccatgccagagtgctaaaattaggataacataatgtaagacaacgcaacagccaccaccccatttgcaacaaaattttcactttaccaaacaagcccatttttttctttccaaagagaccaataaattaacgagcatgacaaatcaaagtcatcagaaatcttatggacaattaataaaaccatcttgaaaaaatctatagccgaaaggttgcaaatagtgctatcaacccgctaccaacaagctttggctaaaggacactcaatcaaaatgtggaggattgattcatgcataccttggcacaccgagcaaataacgaccgcatcaacatgctgacctttcaactagattagtgatggtaaacacccataacatgccctccagagtaagtctttaaccttaggaggaattttgagtttcctttatgccctcgaaatgcttgaattattatcttctgaccacctaccatgaagaacttagagaagcttgtaagcactcttcactgaataaacccttgaaatatctttaaaccaataccaataatttgatccaagattatcattcaacatgatactcttaattaactgtcggtcataagcattgcacaaatccttaagaatttcatcatcccacacccgagctcctcccaccgtaataagattggccttcgacccctccaaactaggatggaaagaagttgtaacgccctaacttatagggacgccacatctgtgattttataaactagtttaatactaatagaata

SEQ ID NO: 83548 - DNA, 1246 bp, Cannabis sativa
agagaaccgataattagttatagggcgtcaactcatagtgatgttaggcaacgtcttacgattagttagtatattctttaaaaattattttcttaaattatatgttacttaatacttaattatagtatcttttaacattaattatgtattattatcatcaaaaattaaatttaaatatttatatgcgaaagctaaatttaaatatttacgtctaacaaaaaatattagtatatttattttctcatcaatatacccaaattacccacaaagccagaatctccagccactgacaactgaccaccaaaaagtaacaaacggagatcaaagaaatgaagagaaaacgccgggaaatcctcccgaggacggccaagaagaagtctcttccattgataatggctgaggaaaggcctgatgtctttgactacacaagtagtgaagaaccagacacacccaaagtgagaaactttttttccgatcccatttcatttttaacgatttttcttgattaaacatgggttattttgagctaattttatgcattttgtgatcattttcatctttggcgtcgtgaatttttgatgcattttggggaattagagttacgtgaatttattggaagtgtttgatcaagatcaatttaaacctaattttggaaaatggggtgaaaagattagcacttgattgtgtttttgttgtggggttttgttaatttagctttctatgtatatatttagtaaaaattatatcttttttgtagttttaatgtcttacatggttctcttttattattatttgctgaaaatgtgtagctaagatcatttgaggggtatggatccatcaaatgcatgatggtaatgtgtaacttgcaatcttgtactaaaagaacatgttattgtatagaaaggaagaaaagaaaaacttaagactacaatatttggggatgagagagtgttataacaattgttaggtagttgcttagggaacttaggtagtttggtttgaaggaatgaaaatataagaataagaatgggaatgagaataggaataagaatgggatggaataaaatttaaaatgcataaaataggggattaccccatatactagttttgactttttttcggtttgggttgctccggtagttgcttcgatagtttttatgtgggttgctatgtggattttggttgcaatttaggttgttctgttggttgttatgtgaatttcttgtaaaattacaaaaaaaaaaaa

SEQ ID NO: 83549 - DNA, 892 bp, Cannabis sativa
  modified_base (142)..(145): a, c, t, g, unknown or other
  modified_base (175)..(178): a, c, t, g, unknown or other
  modified_base (214)..(217): a, c, t, g, unknown or other
tacattctacaaaccatacaaattaattgttcaaaaattaattgtcttattatttttttaactttaatattaataaaataatattatattcttattatatattattagtagctacaatccataaagcaaaaaacaaaaaaannnntccataaagcaaaaaacaaaaaaaaaaaannnnaaagcaaaaaacaaaaaaaaaaaacttaataaattnnnntatatgtatggtcggttgttttttcgatcgatttattacccaaaaaaaaaatagaccgttcaatggcagtttttttagtttttaattttgccggtttcgatttcagttccgccggtttcaattctagcggtgttcggcaggtcggtttgaacaatatttttttttagttttctagattttatgctcaaccctatccattatatggcttggttaataagtacttaattatactacaaaaaaataagcttcaatgaggataaatttcgtcagcgaaggttgtttttttgtcagtaataaatgtcaatggcgacatgtcctcactaaaaggttgtcagtgattattgctgaaagtaagtatcaatgacgatattcaaagtcatcactaaaaataaacatcaatgacgataatgttgtcattaattatttgtattttttttaaaaaaaaaaaaacattaaactattaagccgtcactgatatgtgttagtttttttttaaaaaaaaataaaaataattataaatcaaattattttttttttttataaaaccctaattttcaaaacccaaaataaacacctcatctctttccctctctctttcttgattcctctctccccttctcggggtggcacccagcgagaaccaacaacctcgaccccatctctctctctctctct

SEQ ID NO: 83550 - DNA, 992 bp, Cannabis sativa
gctccttgacgagttgtatggcgccaaagttttttcgaagctggatttgaaatcggggtaccatcaaatccgggtgcgacttgaggatgtgcctaagaccgcctttcggactcatgagggacactacgagttcatggttatgccgttcggactcaccaacgcgccagcaacttttcaggccaacatgaatgaaatctttaagccgtatcttcggcggtttgtgctggtgttcttcgacgacatattggtttacagcccaaccatggaggcccacctttcccacttacaggtagtcctggataccttggctaaataccaattttatgctaacaagaagaaatgttgttttgctcaacaacaattggaatacttgggtcacattatctctgcttctggggtctcggtggactctaacaaggtccaagccatgttagattggccgctgcccacaaatttgaaaagtctccgcggtttcttgggtcttacgggctactatcggaagtttgtgaaggggtatgggtccattgcaaggcctctcacggagcaattgaagaaagatcgattttgttgtaatgataaagctaccgctgcttttgaagctctctaacatgctatggttaccattccggttttagctctttcagatttttctaagcagtttgtgatcgaggcggatgtctcgggatatgctttaggagctgttctcatgcaagaaggtcggccacttgcgtattttagccaagtcttgaagccgcgagctcaacttaagtccatctatgagaaggagctcatggccatagtgttggcaattctcaaatggcggccatacttgttgggtcggaggttttttgtgagaatcgaccaacaaaacttgaagttcctcttggaccaacgtttggtgtctccggaacaccaaaagtggttggtggagctacttggatttgattttgagatacaatatcgaccgagcattgctaacaaggctgctgatg

SEQ ID NO: 83551 - DNA, 859 bp, Cannabis sativa
ggtgttggcatgttttattcttgtttgttctatttcccatgtgatatagctctaatttttaaggaacttgtagaagagtatgtttggatgtaaattttttgcacgactcactatcgatcatgttaacacgatcatgttattcaaaatgcagaactaagaaagtggatatctacctcaatgtttctacatatttaatcgaatgtgcttgagatcaacaagaaagaggtaattgtatttttcgtaaaattgtgaatctaaagtatgtgtaagatttgttaaggatttagtgtattgttattgtgtttgggattcaaggccattttgttttggtctatgtacaatgtttttgttcttgctccaattagttacaatattatatttattttttaaggtcgagtgatggaatcgatattgtgtagagctattttttttttttttggtaatcttagcttccttggggtgtttcttctccaaatagagatcatgaacataatgttctctaattaatttgatggtattctatttcaattttctatgaggactttgtaatattttacttttgcctttttttatagatgtattttaataagatattggttttcataaaatataagaaattgttgcttcaattcttaactaataacgaagtgattcaagtgatcagtaatattgtaaattttattcgtgtatatgaatttaaaaaagtgttcaatttattcatcactttttcataacaaaattgatgtggtttaagttgtagccaatcttaaagattctacacttacaggacattctatttcttattcttagaaagatattaattagtgttattattttcttaaagaagaataaataaaaa

SEQ ID NO: 83552 - DNA, 1533 bp, Cannabis sativa
actgctgcaattgctggactggtttatagtgtttggaagctgaggaacaacataacttggcaaggggaatcattatcctctaactgggttactgaggagacaaaatagaatatcaaaactcgtattgctctgtttacacccaagaagactaaagaagtagataaaaaatggttcaatgaactataatatagataagatgtgatgtataaattgattgggcccgatttgggtgcctttagtttgtaaataatgtttgtgcaatataatgtcctgatttatcaaaaaaaaaaataatatatcaataaatgaagaaaatttcacatctacctcaatctcttttctactacaatgaaaaaatcaataggatcttgtgtttcatcacatatgagtgtcacattctcttccacataaacttcatgtgactcttcatgcacgaactcatctttttattcatcctcaaaatctctcctctcattcggtataataatttataattcttcttggcggatggttgaatcaagccaatgataatccattaagtaaaacaaatatatctaatttataattttaaatttcaatcacttgtaacgacgccaaaaacttgatacataatttttactgcaagggtataatattgttatagcaaagttttaataaaaaaaaagttgtcaaacccacgtggattgattattaaattttactaattattatacttctttttttttatgctttaataagacaattaaaagtaaataataattaagaacagaataataaaataattgaaaaataaatagacaaacaatgattttaataaaaaataaaggctcagagcattgatttttcaattttaaactatgaacctcaggtttaccaattatcctaattcattgtataatttgtagtttaaagaatcctaatataatatattaactcttctctagtgatgataaaattaacttaattaactaacacaatatctctattcagtattaatcaatcaagcaatataattctctttaaaactcatagaattagtggaatctttcaatctcatacttttcatatattatgcaattctaagtctaattttagattacctctcccaagtgttaaacctaaaatctctatactaattaatggtgacaaagcactaataaaatgataattaacacaaaattgcataaacaaataacaagaatatgagaataatctaaactctttaattcataatctaaaacagtctcattaacactctagaaacagtgtttaaatcataatgacaaacataataaccacgataatcatattcataattaaagaactaaataaaaaaaataaagaagaagaaaatgactctaatgaaagttgctgatacttaaacttaaaatctctttctcttactcttcaatatgttttctgatctctaggtttctttttatatctctccagtcgtccaaaggttatctacatcattctttatataggcccaaaaagatagaaaatatgccattttgaattaggatttaaatt

SEQ ID NO: 83553 - DNA, 1214 bp, Cannabis sativa
aaataaaagagtgagtgcttagtgcgtattgtggtcaagttaaagtgttcaagtcttggtgtaattgcttttacaataataaagtaattacgtttttgacgtgttgtggtgtccaacatgttatagtaaaaatatatgtgtatatgaaaattaaaattaaaattttactttttttattggatggatttagtccaatccaataaatattgaatctaaaatattcgttggatttgattcggccggtaaaaaaaaatactaggtctaaaatattggataaatccgtacaataaatatatatgaaatacatcgaatacatagaactgatccaattgatcgtgtaattgaattgattggatcagattgaatagtaaaatttaacatctaatatataattgtattgaatctgaatatgcctaaaaatattggatgtaatccaataaacaccttaaattttaatattagttctcacacattataatgtaataaataatatgaaaaattattaccaatcataaaatactaaattggtatgatattggacatttaagtatgagttgtacatagataatttattgaaaataataatattttgttaggttttgctaagtcgtctccaaatgtttaatgatcttggctttccatacgaagatgcaatgagtgagtcaacaactatgataaactccctaatgtgctcttatgttttggctccaaacttcaacaccacttttaccccaggtatttataatatatgtacacaacacatatatcatgagcgttttaatttattagtcatcataatcatcactgctttattaagacttattatatataggtggattattggtgcaaagagtagaagatggggcatcactactggaattggctgcaacagcctctttcctgagcaagttgtacagtgactatctccaggctataagaaggtctggtggaaggtgtagtagtagtactactactactcatcatcaaagcttctccactcaaatgcttaccaatttctccaaatctcaggtttaactttcaattatatgcatattattattgcatatagatgaaaatcattaggtgtttttaatcattcatttttacaaatttgtattaaatgggctattggtaaaaaaaaaatactctaaagataaataatatttttaaaaattattaaaaaaatatgtatatttttaaaagacaattttttt

SEQ ID NO: 83554 - DNA, 1076 bp, Cannabis sativa
taaacgccaccacaattaacttaactatttatatatatatatatttacatgtattggggccctgttaaattttgagctgactctaccataaataacccaaaatctaattatcaaaccattggagaagtgattataattgattaaaaaatagtcaatgattttattgctcttaaattcaaccaaagtatgctgttttcaaaatcattttacatatctcttgattttgctactattgatggagctcattggacaatcctttttttttcataatataaagtagttggttttgtttggtaggagagaaaaataagtacaatggatgaaaaaatattattattttgcttaggattgtcaattacactcagaaactcatatcatattagccttgtgttatgacatagttattcttgttatattttttatttattatttaaataataaggttattatttcttaatttttattggaagattattgactgatattcattggtagatggattctgccagttgttcattttattggtaggtggactctgtcagatgttcatttggtttgaaaactttgcatctatcacacttctttgatatttaatcattagtggtgtattggacctttaattgatgttattgttagagttgtcttcatcttcattataaatggcttgcaatgcttatttttattgattttgctctatgagctatatttttatgtaatagatttgattcgatttgccttttatagatatttttgttttctctctcataaaagaaaacactcatataaagattgttgctttgttaattctgtgtgattttgatcaacgcgtcaaaaaaaaatattactattaattgatagaatatttttaattaatttttaaattaataaacaatgttacaaaaaacaacatctcaacaatttagtatttgcggtaatttttttttaattaatatcactacacataatacatatgattactattaaaaagaaaaagaattactttatatactattttttaacattttatttttcaaatttacagtttagattgctaaacatacatattttatttataa

SEQ ID NO: 83555 - DNA, 563 bp, Cannabis sativa
ctttgtctaggcctagcgcctcttgcactactttgtgtgtgtgtaacgacatggcggggggcctgagcccgaagacatcggtgtttagccttgcccccaaggagttcgctggctagatctgagctttaaaggaagggtatcagtgcaccaggtgttttgagactgcttgtggccacctttcttgagtagactgaggcatcaagtctctttctgggaaacaccttggatctccacatctatggccttccgccagacctcgacgaacagtcaggaggtcttcttttttttttttcttgcacgggcctttttctgggtggttttgctccagtaactgtcctgtatatttcctttcttcaactcttaatgaaagcaccaaatgtttatcgagtttttcagaaattgaataattatagagcttgagaaagtaataaaagcgtaaatgataggaatataggtagctgattttttacgtagttgaggcgttaattatccttagtccactagtccatattattaggctctctggttggtgaatgttgatacaaatacaaaatgaatggact

SEQ ID NO: 83556 - DNA, 520 bp, Cannabis sativa
ttgtaattcttgatcatgcacattattttaatattatgccattgcgttccatgtgttaaatgaggttgttaatttgtaagggcacgttggtttattttactttaagtaaattagcccctcaaaataaataagtttattattgggtaaaccgtaaatagaaccattaatattatggtcatatcatattttatgtatatatatagtgagaatataagtggattgcaatggatattatggcgcaatggccaaaaaaatagaaaagaaaagataattaagatcaataataattattaaagacttcaacttgtgtggttataaagctaacatataataaataatttatgtatttatttagtgtattatttgtataaagatatacccaatacgtcacgcttgttgcatcttgcatacgtacattttacaacaattataattatcaaccaatctatgctaattattgataaacctcttcaataattattttgatacgagtatatataaatatatattatatgagtga

SEQ ID NO: 83557 - DNA, 1013 bp, Cannabis sativa
tttataatgtttgataaatcaatattttgttgactaaaatataaattaataattagaaactgatttgaaattatatatggtcccgctgctgcattattaatctatttgaaattttagtgtattaaatctatacaaaaagaataaagaagaatttcataaataaataaatcaaataagttggaaaaaaataaaatgaggaggatggatagtgcggacacgtgaaattcattgccgcgttcgcgtataataattattattactgccagatcaccaccaaccttttttaattgttttctttccctccaaatattttatttattagtaatgatgtttaatatttttaaatagattgctttacgattaattagtgatatagaaaaatatttttttttgcttaacgatacaaaaaggtactaagtattactgatgtctaatactttttattgacactttataattcgtttgtaataattcttaaaacttattttcttaaagtatatgaaactcattacttaattacactaatagcagtataacactaagattacgcttgattaggaagaatgaaaacaaaagaataaaaataaaaatagaaataagaatttaaatggaatgtaatagaataaaatttcaaatacatctaaaaaatttaataaagaaattattaaattttttctaattatacaatttttctttctatttcaaaatggattagtcattctattaaaatgataaaaagaccattctaattttttaatatgactaaataaaaaaatagaatattttttcttttttacattctattctattttttctttttttgaatgagaatttaattactaagcgacactaggcacatccactaacaacatagcagcagcacaattcggtaacaaatcagtccacaactcggactcacaagtcaaacgactccaactaactaaaccattagcaactttattacaatctctattctattttattactattaatcagacccacttaataataga

SEQ ID NO: 83558 - DNA, 1160 bp, Cannabis sativa
aatctctaggctcaaaaaagaacgataatagtacctaaactcgagattcttgtaagtttgttagtcctcattttaacatattcgttagttgttccgaaaataccacgtgttgatattaaaatacagtataaatcttcaaaaagtttactttaatgcaaataaatatccaatctaaaaaaatagtggtaatagccacaagctcaaaattatagttagctcataagtatcaaatttaactgctctatttgttactcccaaaaaatccacgtgttgatatttcaacaaattatgatggggaataaattgatttgaaaggggggtttgtctaacgtcatgtttgattacttttatttcaaaaacaaattcgttggaaacaattaaaaataaaaggtaaaaatagaagttgagatctttcctttccttcaaaattatcaaaaaacatccaatttccaaatatattcatatatttagaaaattatactcaaaataccatcaataggcatgacaaggaattaaagaaaagttagaaattaatattgaagaatgatctttttccgtggcatcgcttgttatgtcgctctatagtgtaaatgctagattatgagttttgcgacaaacatcacatgtgtaatgcttcaacggtactaaaaaaaatagatttctccacagtttaaaactgtcacgtgttgtatagtcgtcgatttttatgactaacgcctatttgaccaatgcaatactggataaaataaacttcgatggaaatagtcagcaactagatatatggacacttcaaaagtgttggcaatggaggatgacttgccgacggttttaaactgtgacctatcactattgcttacgattttgtaccattgactatagtgttattactgatgaaaaggttagagttggtaaaaataggaaggaaacgatttgtttcttctttattgaatctcaatgtgatctccaggcataacttatgcaagcggtgtgagatgtgaagatcatgaggagtatcaaaatgtggtgctttaagactttttcatggtacaccatttgtataactgcaatcaaattattcaagaaaagttctaaatagtatctaaaaatctctcaaatcacacaaacagttaaaaaaaaaaaattagtagcaacctcagatc

SEQ ID NO: 83559 - DNA, 634 bp, Cannabis sativa
aaaaaaaaaatcatatcttagttctataattcaattctctctttattagtaattataagtatcaaatattataatatcaagaatgaaacgttttgtctatgcttatatattattggttgtcttagttctattaccactatcccattctcttcaaacttcttcttcaacccattaccaattacctcaacaatatcataatagaagatcacaaaagcttctggcttacgttcgaagaagaggcggcagcagcagcggcagcggcagcgttggaactaatgggtttggagccgctcgaactgatactactcatgctcgaggcggcgtaagaaaatcctcttcgccgccaattgtaaaacgacaagcgaattttcttcatgccttcttgtctatgacacttttccttggtgttgttttgctctagtttgatgcatgggagggtcgagagtgttcgtatcgacggctcgtacgttcatgttcatgccatattgtgttttaattaaatatttggccctttttcttgattaggtatagttatgttttatttcctaggcatgttattatgtgctacaagagatgtattattattattaggctaatttgtctgctgaactttgatgtgtaccaaattatgttt

SEQ ID NO: 83560 - DNA, 812 bp, Cannabis sativa
actcccactaagtgacttctgtgaagatatcaggaaaatatcaaccaacaacatgaaggagttccccgatagggcatacgaatttatcaaactttaagaagccatacgacagacctaggcggggcatgtcaatagcacgcagtcacaaggcacccaatagcctcatgaccaccaagttcacaggcgggcaacgataatgctgcccaaacctctagtggtaaaaacactatatttaagcgcagcaccaacagatctaggaggaataatggcaaaaaggggaagtttaacacttctctcacggcacgaaagaataaggaggagaaatacacctgcttaccctcctaatagagaagtccgagaccatcttcatggctactcagggaatggtcccatatcgaaagcccttttccaatcaagagggagatgggcaagaggaacatgtcaaagctctgtaaataacaacaacttcgaccatgacactaatgagtgtaaaatctgaataggaagattgagtacctgataaggcgttacaatccctacttgcattgttatgtgaaagatgaccagatccaggcataaggaggccgaaatggagatcaaatgccaccacccgtggcaggacatctagagatcataataggcggaccccacattgttggagaaaccagcaaagccagggagtgctatgcttggacactcctcacgagcccaaaggaaaagtcctggctatcaaagattagagctctaaacaacaaaagcccatagagcccacgatctcctttggcaaagaagatgttgctgggctttgtgcc

SEQ ID NO: 83561 - DNA, 631 bp, Cannabis sativa
aataattattctattattaatttgagaagataaggtgaatatatatgtgcatcatttctatccacatatcccacttgtctataaaattactctcttctctttcctagaaacatccaaatattccaaaaccgcgttttctttttctcttttttccatgaagtttctttctttttctttttctttttcttgtatataaatgaatgagtcttattacatcaaactcatcactttacttcacttcactacaatcaatcaataagaacacatttgtttagagatgaagaaaataaaataggaacaagaggaaaagggaatgagttttctggaagttataggaatggggggtttgggcaaagctttaattaatcttattcatatatatatatatgtttatatattaatatatatagcttttcccaacacctcccattccattcattttcaggccttcttcccttttcccttctctgttccaatattttacaatcttattattctttcctctattctcaggtataattattattgttgttgttattattattaaaatatatgtatatagttatacatatatgattttatgatttcattttcatactattaactatttgtgtgtaataatttagatcta

SEQ ID NO: 83562 - DNA, 1016 bp, Cannabis sativa
aaatttgactctctcttctaaagactctctatctagaaccaccaagaaccagacttgaaactcaatcttctctcaaggttttttagtaagatttgaaggagagattggatagcaaaacaagaggtaagccttagaccttctttctctttaattttggaagaaatggtgttggtttgagtttgtaatttgttgaattaggttctgtgcgaacctagggtgttttgggtttgctttctaagcttgattaaaattatttatagcttgtttgaatggtttttgatagatgtttgaggagttgagaaagtttcagaactcaaacttgactcaacgatgatgtttttaaaatttttgagttttagttatattgggtatgcttggatgatgttctatatgttgtaattaaatattctggagagttacatgtgatttggtgtaaaattgagcttaaattaaattaagttttatgagatttctgtagaaaagtggaggccactactataaaatacacttttagtgtcggttcagaagtcagttaatttagaaaactgacactaaagagtagaaatgcaagccagaatccaacaacaatatgaagagattagaagactgaggcagaagggtcttcatgttacgcctcctcaacaagtactagttgctccctctctagtgttgccaacagaacagcctgttgctggtaacttaatggagccactacgtaagagattttagcagtaagggcctattggaaatttattttatcaggatcttaatttactactcatgtatgttggattatgattaatctaacatcctaatatggaaaatcttaaaataataacgaaacatataaagggatgtagaaattcttatagtggttgcatcagaataaattgtcttattccgttcagatctctaaccattgattctttttgtcgtagagaatgaccgagatctgaacttggatcttctcctcctttgattgtgttaatcacaatgttagaatttgaggaataaga

SEQ ID NO: 83563 - DNA, 1016 bp, Cannabis sativa
aaaaataaagctttcatttttagatgatatttgtttgacataattctctctaaatgttaaaagcatgaaaagcctcaaagccttaatcaagggatatataaaatgagatgggaagaccggtgcgtatcatattatgatatattaatcaaataatatttgccacgtgactgtcccaaacaaggtaagaaaaatgagatagcgatagggattagtggggaaaaggagttgtttacagaaaggaaaaagggagaaaattgtccaactttaatatatttaagtggacaagttgaagtttttagagtgcaaatatgaaaattcaagaatagaaagaagaagaagaaaaaggaaagaacattatcatcaagttgatcataaaataatgttttgaggacaaaaatgatcacaagttgagcttatttttgtgtttaataatatagggttggtcacaaacaagttgacgcaaatagaaaaaatactagagatgaaaagtctggtagaaccctccacttaaactcattcactttgttaagtcaatagatacacactatttttttttcttctcttacttggtgcccagctcaacactcgacccagttgcttttcacgaacattaacagtatattgcttgtgtaagaattatgataacgaagttaaaagttaaattacatgaaatgaatgggatgtgaagtgttttgtttggtcactaactcaataattaaatgtcctaccaattgtaattacacaatatatgctgactaatgatccaggttttcaaaattttcccaaaattctatctgaaaactatcaattgagtactttcacctagtacaaacatgttttttttttcctgaaacacaagcagatttaatggtagtaacagaggaaagctgcactaaaataagaaggaaattgatttttgccttgaaaattcaatactatactaacatgcactaatatttttttaaaaattttataatttatataaataggagctaaattttttaaattaaaaaaaa

SEQ ID NO: 83564 - DNA, 573 bp, Cannabis sativa
tttcacgacatcttgcaatgtcgatctgcgacatgtttagtcttgatgtcatctaacattgtaaatattttcgtaagatatggttaaattttttgttgtgtgtttggtataggctgttatagttcgcgagatgtgacaacttgattgtcgatatttcgcgacaacgtaggggatgttttctacagattatgtgtatgtttttttgcgattactatcgataaatggagacttagtttgcaatatgttgcgattcattttacgaaattttgcgacatgtttttcatgtgtttaataatagttggtcttttttgtcataaatttgcagatgcctcctgaactgaagctaccagtgtccgagcatttcacagatcgtctaacctattggggctcaaataggtttaagaatattaaagtcaagtttgaagcaatgaatttgactgaaaaggttttggccagcactttcggaccattttgggaagctggagaagtgactttctcgggcacattggtccactgtctactcttgtggaagatgaaagttgaaacagagaaggaagatgagatatggtttta

SEQ ID NO: 83565 - DNA, 1145 bp, Cannabis sativa
ctatgttagttgaaagtgatataattaaaaattaaaaaaaaatattattagttattaggtgagattattattatgtgtatttaaatattatagtttataaaaaccagtacctctcgcgactggttcactcacactactttttgactttcaggctttcaaaaccctcttaacaaaattccaaacttccccgatttccttatacttttcctcctccgttgctaagcaaagtattaccattgtgcaacatcctctacctttgccttgtcttcatggtgtaagttcttctctctttctatatatatatatatacattttctctttgttcactagggcaagtggtaacaaataatagttccttctttcttgagggaaatcatatgcatattatttttggtattattattatttcctaagggaagcgagggctgaggtcctctgtccctctttccttctgcatttctggcggtttaagttgttcttgcacattcctattcttttctcttgatcttcccacattgctttgatgctttgcacccgatgtctgtcattgcgaatcgctagattcccttcgacattcatctagaaggggtctctttccagcggttaggggacccccattcccttttttggcctaggatttgattgaagccaagtcatgcctattggagacaactctgtcttattaactattcatgcctattggagccaagtcatgcttcttcccaagagagtaattaaagacattgaagcaatatgtaaagccttttgtggaaaggccagcacctatttcaaggtgttggttccattgcttgggataacgtatgccaaacaaaaacagcagggggaattggattcaagagagtcaaagaatggaataaagctacaatgatcaaatatgtgtgggctatagcaaaaaaaagaagaaaatctatgggcaaagtggattcacaatgtctacatcaaagaggaaagctggtggagctaccctatcccatgccatgggagctggtactggaggcaattagtagctctgaaaaaccaagtttgctctctcactaatactcagcaatatttggcagagaaatactgaatttctgcaatgcaagatacacactgcattgctcttgtaacgccctaatgctaag

SEQ ID NO: 83566 - DNA, 810 bp, Cannabis sativa
  modified_base (775)..(776): a, c, t, g, unknown or other
ttacaccgttacaatgtaattacatggttagacaaacatgccaaattgtgtaattaccttcaattacactcaaattgtggctttccaaacgcaccctaagtatctaaccataaagtaaaaaattacacatctcattttcttattaatgtatttcaattaatttttaaataaataaaaaaaaataataacatgaaccaatgagaaaatgttacgcgactgttgacttaatactatcaagtatttaggaaagtttaaaaaatataacttatgtattattatcataaaaaattaaatttaatatttatctccaaccgaaattaaaattaagtaatttatggcgcaaattacttagttaatttaatttgaaacattatgggtgcgtatacaaagaaaagtcgtactaaaaaaaatttcatttaacaaaattatccatttcaaacataaaaaattattttttcttttaagtttttacactttttttattctacattttctttactctttttctttatccactaaaatttaatgtatcctgttataatataacttctggtttatttatttatattttttttttttgagaatttctggtttattttcatgcaagataaaattagcgatttactacggaaaaattaaaaatactaaatttataaaaaaaaaaaattacacaaaatattagttttgataaaaaatttacacttttacattttgttagagaattagctgtatattaggtgtaaaagaattagggtaacttgtatttagtagtttnntattttgttggtagtttcctatttcctagtctcc

SEQ ID NO: 83567 - DNA, 733 bp, Cannabis sativa
ctagttgggtgaataatcctcattttaatattgtttttcaatttattattttggttgtaatttctttgacagaaattgttggtgatagttcttacaatgttattttgcgatctgtgaatgatgttgcccacacattaactacttctgttacgagtagtgttgggaagtgtatttggacagatacttgtcctcgatttttaagttgtcccataatgttgattttcttttaatgaaatgtgatgcttttcttaagaaaaaaaatggagactccaacatatatttggcactattaacgtgtctagggcaccttgcttttccaatcacaacatgtgttttgatatttacaaaattagtatgatttgtgtaaagaaattgtcaatcttatgaaaatcatatgatgttttatgcatatataataagaaatctttgatcttatgaacatcatatcatgttttatataataagaatcgtccatcttaatatgatgttctatataataatgaatcatcaaatatatgatgaacatcatatcatattctatacataataaaagaaattaataataagaccacttgcatgttttccttgtccatataattaataagtaatacattgaataagcacatatgaaaccccacatagaaataaaatcacaaaaataaaaaatttgtaataacacaagaagtatatttaaattttttattaaaaataatattacacaagatatgataat

SEQ ID NO: 83568 - DNA, 668 bp, Cannabis sativa
aaaataaaaaattgattaaaaattattagggaaggcacccttaaaaattattgaatatgatagtcaagtcaatactccattaacaataacactaatcgagcaaaatggaccaataatatatttgtttagtaatattgttgatttatgacttttatattatatcaatgtgattatttattttgtccttaagatataccaatgtgatttagtcaacattatgcaactgcaatgtgtgacttcacaaccttgacccatatataatataggttaacaaaaactttaatttcgatgttcaatataatggattatattaaactttaaacaaaatcatatgcaactgcaataaactctaaaaatatgtatattatatacaaaaaaaaatcataaattatttaatcaaataatatgagcctgattttgtgcatgtagtaatatttatgtccaaatttttgcgttcacaaaaataaaatatttatatctaaatttaataaaagttataatttaaaagacatgagttaaaaaaatatattttagattttttttttagattattttttttttaaattcacactaagcataaatgtttatttcattattaaaactctatgatgagatatggcttggtaaaatattttagattttatcataattatttatttattaaaaaa

SEQ ID NO: 83569 - DNA, 547 bp, Cannabis sativa
gtaaaataatttccaacaggcacaccattcaacaacatctgctgcccgtggaggttttccaccatgtttggtgttattcttaatctactacatatcttacaaaatcacaataaaatactcaaacacattttttccataccttagaaagtcaaattaagaaagaaagcacatcctattttccctccctaagaagatcagcttttaaaccacttacctttcaaactgctcaaactgccttaaagtgccacaaagcatggataaagttctcccaaacattattagagaatcttatcattttgctgtagtgccagggatagccacttttaacttaatactcaccattttgctctagtaccaaggaatcttaccattaatgtccaaaccaaaacaagaaagtttaagaatgacatcagcatcaaacataaaatcttcatcccacttcccatctgaaagcttcaaatcagccacataaagttgttcaggaaagtttggtcgatcaaaaatcttgaagtagtgaggtctaggtagccatgggtcttcacaaatt

SEQ ID NO: 83570 - DNA, 1134 bp, Cannabis sativa
atttatagggttgaagttgcaaaaagtgatatttgtgaaaaatagataaaatagttgagaaaaatgacaaaacccaaaccattgtggggccattatgtcactactacaaattatactatttacgtcggtcaacgctactattcatagcgttgaccgacgtgaatagtactcaaataattgaggcgtctctttaaaagtgacactaataatatgttatttgcgtcttttaggtatatgacgctaaaaactaaaccgacgagaataagtagaaaaattaaaaatttacgtttcattttacgtcttttattaacagtcgagtattgtgttagcgagcttttaaaaacgacgcaaaatataataatgagagttaataatcgacgcaacaaaaactgaaatccctaaaaaaactcaaaatactcacctcagctcgtgcgattctcttcagatgcttcagcctcacagtcgcatctctctctcgtgcgattctattcagatgcttcagccctcctcttcagatgatttcttctctattctcactgtcccctttagtctccaagaagcccctctcagtcgacttaaacgcagcccctctcaatcgacctaaacgggaaggtttgttcagtttcctttcattttcattttatctttcaaagttttttgccctaattttttgcccttacagtcgatctctcagtcgccagcaatggcatttctcgtctcttcccgccttcggttttaaaaggaagcccagtggatctcccagtcgcagcagtggagtttctcttctcctcctctagcctccggtggtctcctctctgttgctggtggtaagtaataaataaataaataataatataaaattcactcatgaacttaacggattcagcatttacttgagacttgagagggtgaaaagtgaaagcagacaacaatggcggttgcttatggagtccattccacagagacactcaatctctgcaacttctcaaagcttccttagtcaaaggaagggagaccatggattccctttctatggcagaaggtttcactcatcacaaagacgaactgggcttcatcgatttccttctattcaatccaagcaatctgattaccaaggtcaattcttttcttttt

SEQ ID NO: 83571 - DNA, 789 bp, Cannabis sativa
ctgatgtggtacatacaaaaatgtatgcagagtgcaactcaaataattttccttaacagaaagatttaccaaaacgaaaagttgaccaatgttctgttgaaatttgtaacccagaagaaacgagatctcataggtcttgatttttatttcatttttgttacttttcttacatgttttagtgatataggtatcttttccttttcaaatacttacggtagtaattagtaaaaaagaacaaaagaaagccttgaagcgatgcgataactattgattggctaacgagtgttgaatctttgacaacgtgtaggtgtggggtgtgtgagacccttttaaattactcgaaagctggattgtttttctacgcaacgttctggtaaaaaccgcagcaggtttttaaatacattccaatccaatcaatcaaccagtaaccacaaccacaggacgtctcaaagttttggggcttgtttatttttttattattataaccttctctcttagggcaacgtaacaatggcgcttttttttgttcatttgttttaatcatctttggttttgtttatattgttctgtttcctctcgaaacgacatctttctttcccattaattaattttttattttttgtttacacaaaatttgctctatatgttcctctgctcaataacactatctcctaccataaatacttgttgggttggggcaacttttgcactaaattattgcagatggtacccatttcgatactgcatctccaactataacttcagagtactacatacgggttggtgcaa

SEQ ID NO: 83572 - DNA, 689 bp, Cannabis sativa
tcactttgtcaaaaaaaaaaattataaaattatgttaaatattaaattttgataattttttatataattatttttaataatatatgtaattagtttactaaaatttttatttttttactctagacaaataaaataaattaatatgttaaatttaataattttttatttattttaaatttaaaataataaattttagttaaacttatttattatgtaccattgatattattaaatggttactttttaaaattgtatgaataaattaaattagaattacaaatatatatatatatatataacaattgaatttttttaaaaaaactcattattttaaaattgttgtcattaccctattttatgagtatcttaaatattttaattaatttatttaatttttttttattttttagaatcatttaataaaagagatatgaaaggtgagagaagtaggaaaaaagagtatcactaacacactttttttaaaaaaaaattactacgattttctattattatcactctatattaaacgttatttattaaatttacatataatatgtttttggtatatataattttaaatagaatttagtatacgtgacttgttgtgtaatttttatctagtatatatatgtgtaaatttttatataattaactacagttaaaaaattaagaaattaataaacaaaaat

SEQ ID NO: 83573 - DNA, 757 bp, Cannabis sativa
aaaaacaatagtattgtgagattaaccaaaaggagagagacttagtcctctgtacagaaatatgtgatgaatattaccaaaagactatactgatcattacaaaatgatcactcagaatgagtaaattatattttcatgcatgtcaactgagtatgagaggagaacattcttttctgctataaaatgcaagaaagctgtaactaaagtgggagtcacttttagtaagaatggacaagcatggtgtgcatggaaatgttctttaattctcaaatttgcagttgattgccttgatgtaaattagtacatggtttggttatatgtgatcaaatgtatgtatgtatgtatctatttaagcatttgatatccaattttcattaagagccatttaactgtcaaggacttgtagtaaagtccccacaccttcgtcacagaatgtcttcttatatatttatttatggaacaactctgacaaatattggaaacagaaagaccttctcacttctcagctgtcacatatatcaatcgagtacttctgtttgtgttattgcttctgtttgctctaattatacaatatattatcatattgtataatattatattaaattatgatatacacatacaaaataatatcaaacataattaatactatataaaaatagggatatgattttgtcccgtgatgtactttcacggattgtattccgtggtacattagatgggtctcagggtacatttaaatgagtgtcagggtacgttt

SEQ ID NO: 83574 - DNA, 722 bp, Cannabis sativa
aagagcgcaagcaatttcaggatgttgtcctagatgatatgtctccatcaaacatatatggcgccgaacatttgctaagactctttggtatgcttcaaatggattcaaaatatgtcctgcatgcaatactactgagattattcaagttactatgggtttcccgaaagtaaactatgtctttgatttgtgtacttcacatttagaattttaatctgattatgaagatttctggtgttgcagttaagttgcctgagttattggcgtatgtaagcatagaggaggaaacactgacacgcttgcaacagaaactgactgattttcttaagtacgtacacttttcaagtttcatactcgttctaatttccaattgatttcgttattccagaatgttcatcttgatcttcttcgtgcaggtttttgcagaaaaaccagagtacattcttcctttcaacctatgatagcattaaaggggttgaaggaaagggcaaggggaaagacgactgaaactaatctgaaactagtccccggtgacaagtttgatgaccatcttactcttttttgtcttttctttttttggaactcgaaatccaggtagatataccttccaattgttgtactagtagcattagttcattcttttgtttccaaaagagattcactcattaagttactcacaatcacaatgatgaagtaactcactgttatatgctgcataacatttg

SEQ ID NO: 83575 - DNA, 773 bp, Cannabis sativa
accaaggcaagttaaaaatgattatgcaagtctatttataaaggatgtgtacttatttggtactaaatttagtgctttgtgctttcaataatgtatgtatctggtacctcctacgttttgatactctgcattttgaattgtacattttgatatcttgaattcaatttaatcaattaaagatttgttaatatgatcaatgatcttcaattagttgagttttaaaattaaatttaattatttaattagttttatcaaagctaattatttaattatgttagtaagagcaatttggtcaaagttaataataatttttttgaatttgaagtaccagaatctcaaaatatatgataatagcattattgaaaatactgataacaaacctttatatatatttatttatatgtatatatataaaatgctgggtaacaatgtagtatatttccctattataaattccaaaactaaaaaacttttggtcccattccgcattttcaaaaagttttcaaatcagaacttaaaaattgaaaacctcacttgaatccctaaattcagaaaccctattctctcccacgtttcacttttgtctcctcttcttcttttccttcacagtttctcctcctctttttcttcttctgtaaaactccatcctccatggaattgatttgaggtatccgataattgctgcattgatgagacaattttttttttctgttcttttttattaccttcatctggtgggtaggcattaaatggtttaaactgagtttcctttt

SEQ ID NO: 83576 - DNA, 1444 bp, Cannabis sativa
ataattattaattttaatctcatacaatctcatacaatctcatacatactcatacataaaccttaattatacttaattatataataatacaaggtatttatcatatgcggtctttacagttacaaggcgtgaagctcttttctcaatcttcgggtctcttttcgaatgaggagaaaactacaatgtactgtggaggtatgactgagcaagatgtgcagagggtcgtgatgatttcagggttttaacgaagtacattaccttttaggtatcttggtgtaccgattcgctcttctagaattttagctaaagagtgtgagattctaattgataaaatagtaggaagaataaaacaatggagcataaggaatctattctttgttggaataatcacattgattaaatcaattcttatttcgatacacatttattggagtcaaatccttatgattcctaaaaaaattctaaaggctataaatacaatttgctgttgttttctatggcaaggacaagcgttcagttcaagcgctggaagtataacttgggaatcaatttgcaaaataaaaaaggtgggtggtcttggtctgaggaatattgtagcttggaatatacggctgccatgggaaaatatgtttggaccattacctctaaaaaagatgatctatgggtcaaatgggtccatagtgtgtacataaaaagtgaggattggtgggcttatatactgcacctaagtagagtaattggtactggaggaaagtagtggttgtcaaggatgtatttcaggatttaacggagcaacatcatcgtccgatagagcactacaacaatcaggatggatatcgtttgattcacccaaagaatgaaagagttagatagagcaatgaggtatggcatagatttaatagtccaaaacatgctgttatttcttgattggctattcaaaagagactgaaaacaagagatagattgattaaattcaatattatgcatgaattgacatgtttattatgtggtttggaatctcaaaacataaactatctcttttttaattgtactatgagtatgaattgtttaagggctgctaaagagtgggttgaatgtcacactcgttctagcattcttgttgcactttataggtagatagctcggtccaagatgagtaaactcaaaaagagttgtttttcagctatcttggcttctttagtttactatttgtagcgaactcgaaatgaaattttatggtttcaagagctaataagattgaatagtgttaaaagtagaattttattgatttggactaaacatgttagtggagaagacagagtttagttttattatcttatgtaaagtaaggtgagttttatatagattatcaggcttttttaaaaggtgctgatagtttataattggtttgatttattgcaatacaataaaaaaaaaaaaaaaa

SEQ ID NO: 83577 - DNA, 806 bp, Cannabis sativa
aaattaacaagattacaacataaattttttgtaaataaaattaaaaagatcgtaaaaatatttaaaatttcgtgaaaccgcatttttgtaattttttttttatttttctgaaataatctctatattataagaataataattaagttgctttaatttttggtggtttgagagaagaacctttattgagtgagatgaggtagaattcaacttccacaattagagtatccttcacaatatccaaaacattttcaaaaagagcaccgaaacaaacattcttaggacgcttgaaaaaataactaactgcacaaaaaacaatgaaaaacattacttccatgatgtccaacttcacataatatcaaacttaattataataaaataacctaaatcatcgtgggaacgatctcacttacctgagtattacttgttaaaacgatacgtatacttgcgtgttggatttatcacaacaatccatttcacacgaggtattgaattcaataaagagaaaatgaattcaatagagagggatgatgaataggattttgctttgacttttgagtgataaatgagcaaaaatgagtttgggcttggactttacctgggcttcttcattttctttgggctttcgtcttttgagcatttggcccattgttgttcttttttctttttcataacataaattaaaaatatttccaagctttttttttcttcatatttttaatttattaaaaatgaaattctatttttatttgtagacttctaactttacgattacttattaaaaaaaaatatctcattttttagatgat

SEQ ID NO: 83578 - DNA, 751 bp, Cannabis sativa
tttttcacctttttttcttcacaagaaaaagatttcaaatttaaattctccttctcctagtatcaatatatatataaatttttgtaaaaaaaaatcaaatttaattgtaacaaagagtaaagaaaaaagaaagtaataaacatggccggacttacataaaagtaaagaatttgtcaacccttgaaacaaaacatcatgaaagatactgttagataatagttctcttcgagataggacaaatcttctaaaatgtacttttcgagtcagtgccaaactccaattgaaccaaagttctacttacttatttcatattttataatagctatacaattacatatttatagtgattcacaccctttgcaaattactaataaactcttacactatttcatagtgtaacatatacatataatttagttagttagaacacatatttattaacaaatattaaccttgttttaatggttaaactacaacaaaggatcaagttccaataagagtaattttcgcctcctctaattctgttgaccgtcaatcatttcttctaccacacctatctcttctagtcgacaatatttttcgatagaatctagcactcttatgtaaattctatcaataattttagagaaagattaagagcactttaagggatcaaacactataaaatgtgatatattattattggtgtattttattattagatcctacaattttaatatgaatatggaaaattgctaataacttattaggt

SEQ ID NO: 83579 - DNA, 1834 bp, Cannabis sativa
  modified_base (1538)..(1538): a, c, t, g, unknown or other
aataaataaacccataaaaataacataaaattaaaaaccttatatttatcaaagaaaaagttatatataatttcatattacttttaagtagcatcattaaatggcattaaatggcaagtagaagagttacactcaaatattatgtgtgtgtatatataaagaaaaggaattttatgtatgtatacagtatatttatgggattaattaattgttgtttctcatatagattcaactgccactaagtattatacataattaagagtaattaacagctgataaatatattggttgtgtgtggctataatttgatgagaatatgtcattatataattttatattaattatgattagatccatagatcttctaattaattattgagtcctcttattataaaatgatattaatatcatgagattttaatagcaactgcaagtttcctgcttctactttgtttaattaattaattaattatatattatatatatgttgttgttagaaaattaaataattgggtcaaaattaatgtcattagtatattaattaatctccaagtttttcttcattatatacatcgattatcaatttactccttttagaatttatttcttattggattatatacttacaagaaacataataatgctaattcattataaaataaaaaaaaatatatttatttaattgatttatttatcatttatatatacggtgggttgagtaatattttttttaattaaatttttgtttttttaattaaaaaaataaaaatattttccaaaaacatgttctatataaaactgtttttactttttaattaagaatcaaactttttttttttaaaaaaaaaatatcactttcaaaaaaaaaaattcttaatcaatattttggactccgacccttacttggatcttgggaccccattgaacccaaatctcgaccctgaccccagtctggatcttgcaacccagactagaccccagaaccgaactctgaccccaatcccgacccaaactcggacccgaccccaaccctagacttgaaactagaccctcgaccttatactcagttttgaccccagactcaaacactaccctcgaacccaaccacaaatccgaccccaaacccagtttcgaactcaaatccgacttaaataaaatcaataaattaaaataaaaaataaaatttacaaaaaatacttttgttttctgttttaaaatttaaaaatcaaaagaaaatacatttttattttttaaaaataaatttaatttaaaaacaaaattattacttttatttttgtgatgaataaatttaaaaaccaaaaatgccaactaattaaattttgacattttgcatgaagcacgcctgcaagaaaaatcatagtggattgaatcatacgtattcatacaaatataatatattaagtatttaatatataactataattatatagtttatgcaaagacaaattaagcaatcaatttattcgttatatatatatatatacaccgccctcactataataataataataataatnataataataataataataatggtcttaattttgttagtataccagtcatgaaaaattgtattatctatggatatttttagtattttctgtgtataaataaatattgtaactgtatttataatatatactatagttacaagagaaattaatttttcataaatttttaaaaaattactattactttataaatatgtcaaaattatgattcaaataattattagacatatgtttgtttcttaattctattaatttagatattttaaattatttaagagtttattaaaagtttatgagac

SEQ ID NO: 83580 - DNA, 1215 bp, Cannabis sativa
acgagaatttgatataattacaagtaacatattttaagtcagtttgaaataagccattatagaaatatacagttaaaaatgtcatgttttgaaaactcaattagaaaaataacatatgttatattaaaaaattttcaaaaattaaattaaggatcatatctatactattttataaaaaaacatgctatattttaatatttaataaaacaagggttcgatcaataatttttataaaacacaaagttttttaaaaaagtattaataaccttttatcttttttttttttcttttttcattttttgaaaaaaagattgtaatatgataatcaaatcaattattataagagtactaaaaaatctccaacaacatccgttcatgttttttttttttatcaaattaagatttttactttttttgttttgcaatttatctcttgagttttatattttaatttttacaagcaattgtttggttattatttagtggctattaaatgtcaaatttagaataatttgtagcaaacatcattgagttgaaacttgaaattcatcgactcccaaattgagttgagtggttgactaatattatgacatgaagcctaccaaaaaaaccaatatagccttatatgtgtttatattgaaaaatatatatcacaaaccaaactttttcttgatgcttttgatatatgaagttcttgaccaaatatttcaagactttccatcaattaagtgatattaggctttataagtcaagcaattcggcactttatcatttttttttaaatatttttataaaatatatacacaaaatgagatcataaacattatttgagaagaaattttagatgaattggtcaatactttaaatcactcaatgaccaatgacctagggtacaaggaagatgatattgtcttcaaaactgtacaaatttttccaattatgataattaagggatgccgattaaaagaaaactcaatttttttttttttttgttgagaaaaatgaaactttttattaattggcaaataagataataattcattatgatatatcactcaaggagcataattaacaaagatagacaaatcatatcatttaaaaaaatatgaatgaaaaccctaatagcacatataactaaaatactaataaatcatcagtattgaatcaccaaagaaaaacaaagaatgctacatatacacgtatcaataattatca

SEQ ID NO: 83581 - DNA, 1539 bp, Cannabis sativa
gcctgtgaatctcgaattgaaaagttagacaatgaacttgatctcagtgctcacattgccttcaatgcagtagatcagcaacttgaagcaaacaacaccaacttaaataaatttcctcgacaaccttcttatggatccaactatagaaatcttggaagatctcaacaacctcgaggaaactttcaaggtgttcatcgttctttccagaatggaaatggcagaggtaatttcctgaatttttctccctcctcatttaactacagctcactcaattttggtcaaggtttcaatactgccaaaggaggaggaggaggagggttcagctcaaacaacaacagacctcaatgtcagatctatttcaagattgcccatatttctcataactacttttatcattttgataaaagattcccaactgaatctacatcaactaccaattcttctagcaaatcgcctactgtctaagcaagttctctctcctcagaccatacagctgacaacaattggtatctaaactctggagcaacatatcattatactctagaagcttagaatgtgctcaatagctaatgagtacaatggccctaagagaatgtatgttggtgatggaactagtctggcaatccaaaaatcataggtaattcattcattacctctcatcactcacaaactcagcctttaattctcaagaatttattgcatattcttgaaattaaaaaaaaaatatatattcttagtgtatttaagtttacttcagaatacaatgtgtattttgaatttcatcctaaccactgttaggttaaggaccatatgagtaaagctattttgccggtggggaagcacaggaatgttctgtgttcttttgactccaaagaaatttagatggtttctggtgtctctaatgatctcctctttgtcaacccccagtatcctgcctgaaaaactactattagtgcccatattgcaactactcagtctgaagatgactctatcactaataagagttttgttgctcatttttgtgataattataacaataattttcttactgaggttgatatcagccataaccgattagcacatcccttaaaaagaaatgttaacacagttcttaactcttataatgtttcaatcaattaaacatctcacaatgtttgttctgtctgctatcttggtaaaatttacatgctaccttttcctaaagcttcttctattgtttacacaacacatatacaacttgttacatcagatttatggggcccctcacatactggatcttcaaatggttataaatattatatcaatttttttttatgcatattcaagattcgcatggttctatttacttaaaaaatctgatgctttcgaggtgttcatatagttaaggcagaattagaactacaattgggtaccaagctcatggctctacaaactgactggcaaggagagtaaaatttattgatcctttgagcaagattggagttcatcacaggcaccaatgtccaactacttctcaacaaaatgaataggtagaaagga

SEQ ID NO: 83582 - DNA, 1249 bp, Cannabis sativa
atatatgaataaattaattttaatgaaagaactaagacaaaattaattaatataattaacacatttttaagatattatcatgagttcatttacttaagtactagaaccctaataactcaaacgaatgtcttgttgaaaatcgagttagaaattgatatatactaaaaatcatattggaatccaaagttaaaagaaaaactattcaggaaccaaaaattttaatttggcgtgggggttgtacaccgcccaagtatatgttcaatgctaataaaccttgtacttgcgaacagggtccaatatgcaagtcctgtttttgtatacttctttacatttcgttgtcacatcagtgtcatttgtataaataaataagtaatttcctttcttcacttgtttttgtttaagaagatatgaaagcatacatctctctatataaaaacagtgtgttttgagctgtgaagtgggagagaagggattacataattgaagttttaaattagacgaccctttcatgtcaaattatgatatggtaatcaccgtttatacggaagttattactctattctgaagtcgatgttaagtttcttagttatcggttgtcttattaagcaatgatagtgatattagttgtctcatttgaaaatgagagtttgcagatactttataagtacccaaattaatttttcttattagacaaatacttgaacttgttatttttatgtgatactaaaataattattttgaatatgatcgtgattatttgatcattcttcattattactatacattgtatatgagtttgtattgtaggtaaggaaaaatagaaggtagatgagccatgagtcaaaggtttttcactgttacaaaaatgggtttttccgacacttttaaatagtcgtttaaagtattcccgtcagtttctataatcgtcgcctatacggccgtcgtaaaactggcataataggcgacggttcaaaaccgtcgctaatgtgggtttctcgacggtttgaaaccgtgccctatactataggcgcctatagtagagggcacaatttaaaagcgtcgcttataccctgttataggcgacggttttaaaccgtcaggaatgtaaaagaaaaataccgatttttctgccattaaatctacattttcccccatttttttcctccattagctttataattttacctaaattaaaataaaacaactaattaatttttttacaatgacaactttaaaacacattaaattt

SEQ ID NO: 83583 - DNA, 872 bp, Cannabis sativa
ttttaaatttaagtaaaaaaaattaaaaatctgacatgaaaagtgactaaaaatcatcaatcaatttttactttttttatatatatataaacatatatattactaagctaatttagcttgctaagaattaaaaaaaaaagaaaagtatgcacagtaaaattgtaataattatcgtgtgacagtaaaaaaaaaaaaatgagaaaaatcagtatagagtgtaaatttccctatttattttaggtaattttagcccaaaatattttagaaaaagcctcctgttgtaaaatttggagaaaagaaaaaaataaaataaaataaaaaattaacatgtggactgccatagcaaccattaatcaacgtctttgtcgtcaaagctacacccagactattctcgcgcttacctggttacctgtcaaagttaaccaattaaaacaccccacgtgctctctcactttccaattcccaggcaccgttaacacaaatgaagaatcaatatgtaatatgagatcgtcctcttcacaattccggtgacccagaagaactcatacaaccaaaaccactactttccaagtacttttcttcttcattaggggttttttcttagttttctttagtttcgcaagtattattttctttaattgcagcaatcatgttgttttcttattgtgattttggcacttcaatattttgggtgattattttattatttcttttcatttgtaatttaaatgaattcatgtactgggtattttttctattttgttttatgtcttttaaaatggtttatatggaagatctttgggtccattcataccaaaatacatatatataattattgataactcaaaaagatatacgttggatcattttgt

SEQ ID NO: 83584 - DNA, 912 bp, Cannabis sativa
ttcacactccaacttgagggggtgtattagactttcctagtttacccttaagtcggttaagttagtttatgattatacttcagtcggttatgttacttagtactgctgtgttttatctacttgtatataaaagacattttctcattttgtaaccattcagttctaataatcaataaaaaatttcctttttttctgctttctgctctaataatatcatatactaactaaagtagtgagtgagctaatctccacctataaagatgcaaataattaatcttatgcaaattattttgtcattggcaaaaacacaaacccacctaataaaaaaccaaaccaataattgagaattccatgtatattaattaaaaagttacacattgagagccaaagagccaagccacaaattaactaaagctcagctaagccgagtgaagacctcagaatagatgatgacaaatataaatcataaaaatgtgaaaaaaagattttgaataaatttgattatttatttctatcatcttttaatatttatctctttgaaactaacgaagccaccataccaaaccaagcatgagtcaacaagttgaaactccccactctgcctctcaaaataaataaataaataaataaaactaattttaatttttatttgaaaataaatttttgttataaattaattttaatattgtgtgacaaaagagcaataaaatcccaattagaatattaataataaacttcgaactccatttataaaacaccgtcttcttccttcttcgactctctctctctctctaaagactctattaaacttctcaacattctttctctctctaaaacgctcgtcttcataagaagatgactcaagtggatttggaaactctagtttcggcttgtgcaggcggcggtggaggt

SEQ ID NO: 83585 - DNA, 1673 bp, Cannabis sativa
tatttatttatttatgttagggtactgttgcgtatgcgtacttgaaaatagatcctgtttatacgtacgtactagcgtatttagttgattactgcagtttcactgttatctgccacgtcagcacctccacaactcactctccatttcatggcgcgtgtcctacaccgaaaataacaacagtgagaaaaaatagcaaactcatcgagtttgcggcgttttctaaaagcatattataaaatcaacttcttcttcttcttttatttctttctcaaccttctcttctctattaacaatttttttttttttttttaatttttgattttatttatgtatttatgttttcaaaaaataataaaaaaaaagcatgaaaatccgagctgccatcactactccacaatctcttttctttcagtctgagtctgacaccgaatttagcagactttattttatcttttttgaaagacatgaatatgaatgatgttgtaagtaaaaaataataaatatattttgcagtgaataaagtgaaatagaattatacaactctggcctgcctttttgttgggccctcatctaaaatgcttggttggtatactcactacttctgttgtgaaagattttgtaagaaaaataattcataactatatattttcagataataaaaatatttgaaatgatatatacacatgtcacgagaaatgttagaggttgaattagtaatatttagtctattttaaggtgtggtatggttattttaataaaattaaatattaattttcaaataatttaatttaagttaattaaaaattttatcctttaaattttaatatgtactaatttcattcaattttactatttcagtaaatcatgctccctaaactttgatatctactaaattatgcccttcaaactttacatatttactaaaatacgcctcctgaactttcatctatattagaattttttactaaaattgaacaaaagtacttaaattcaataatctcaatagttcagaaaacatttttaacgactttaaaagttcatcaagtataatttagtacatgtcacaattcagaaaaaaaaaaaattctaattaacttttaatttaataattaaagtgtctcttttcaaattacaatgtgtacaacctctatctatgcaatcttttcatctaagttcaatgagttaataatgggtgtcaactcacataatgaaaggtatcattacacagtcaatattggaggactcacacatgtgttcatgtctacaatttcattactatattattaagatatgaggattattgatttgattttttttttattaaagtataatatataaaatacagttgtaatcatactcaaatcatcaaatgaaatttatgaaatcagagtggtttacattttagtattaatatttctcatcattttgaaaaatatcaatctattaaacaaccattattattattattatatttttaaacgaaaatattatattaaaaagcacaaaacctaaaaggtcacaaagtaaaaaaaaaaaactcaaaattaaacaattagatctataaagagtactaccaaccactaaacacgagacccacctaaaatatgatcttattttgctaaagaatgagtaatgatatttaaagacctattacaatgagaataagataaact

SEQ ID NO: 83586 - DNA, 588 bp, Cannabis sativa
gaccttagaaacctaactaggaccaagtctcgacctcgaacccggtcccagatccgacttaacacaaatcaataaattaaaataaaatttgcagaatatatttttatttttttgtttttaaaattgaaaaataaaataattatagaacacatttttattttttaaaaataaaatttttgttacttttatttttgtgattaaaaaatttaaaaataaaagtaatttccaaaattttgaggtattttacatctcagctattttcttttctttttagaggacaaaacagccgaacctagataagtttgtgtttcactttctgggtccttgtctctgttgtcggaagaaacaacgattagctcccatggctactagctcagctacccgaaaacgacccaattcggttccaagctcaaacatttgaggtactccatcctaattctacagtattcttgtttgggattttctgcctcatcttcttatctatgaacataacgaatcaattgagatgtgcctttcgtttatttcctaacacattgtgaggtaagaagatgaggtgtgcctcactgaggttgtgtcttaatttttggt

SEQ ID NO: 83587 - DNA, 784 bp, Cannabis sativa
taggttgtaattaggggtttaaacgtactgaagcagcccttgaacgccaaggacaaaattcaccattttcatgcacattcatccacgttcttgaacaatcttggattcaaacgtgctagagtcatttatgggttaaaataagtttatgtttaagctcaagggactcctagaagacattttgaccagaagaatcgaagctttaagcccccatacgaaaattgccatttttggctccatattggcggttacaccggagttggagaagatgactctgatctgatgtattgaagttgttatgttgggcagttcttgatcgttttgaggttctaagcactgtggaaagctttcccaatcgaaaggactcgtcaagaggaatcggcgataaagttacactttgttggcaatgaaaccgaggtggacgccggtgaccacgatctaggtagttctgaggttcctcatatcgttttttgtagatttcgattctacatattatttaagggtgtttggtaaagtttcataattttcttacaactatttgatttatttgttaaattaattaggaaaaatacttagattactcagaataatctaggtttattttatatgataagttatgagatataaactgttacaaaattgatagatttgaattttagtcaattttgtatttttcatgaattatttatgttgttcctaaactttattatgaaaaatacctaatgagctcagaaaattcaaaataaattatttgtggcttattacagattataaacggtgttagaat

SEQ ID NO: 83588 - DNA, 579 bp, Cannabis sativa
gaaggaggagtgttttttaaagggtaccttatggggcttgtttcccgttccttttgtttctagttttgatgaggttgggaaggatctacttttgcgtttccaggtatacatggtatgttagtggagtttacattgaggctcgcggtggctagggcttgcttcaaggtagttaaggcttcttgcatccttttgttcgtctctctttgctctgctagtttggcattgtattttgcattttgtcgatgtaatgagacaaattcagcatactcatcctcctcataattctcagggtaaccatctatcgagtaatttggatttttggtatcactttcctctcctctaactcgggagcgcacttctttgtgcgggcgttcttgagggtctagcagtggaggaggtcgttggttatttaaagttatcaccatcgcaacgaaagagtttcaggtgaaagctttccacaattctcgataaaagcactaaaatgttgactactatttccaacaactacttaatcttgttttttttagaattgattatgcataaggaagaatatttttacgtagttcaagtgttaattaa

SEQ ID NO: 83589 - DNA, 1808 bp, Cannabis sativa
ttttttttcttccttaattatgtactctactctcttggttttttgattcttcacttgtctgccccattgttatttttaaaattagtttttgcaaataagaaagggaaaaggaaaaggtactaattgatacaacattgtagatacgggtctaaattggctcagaaatgttgtaatattaaaaattattaatgagaaacactcataattaatgggttcgcaatagctttcaatatatatttacagaccggtattttttttaagagaaaaaaataaggttttttaaaaatattggattttggacaaaagtttataattttgttgtaacatgaaattttattacaaaaatactattttttttataaataactgtaaaacaacaaaactaaacaattaaaacaacagtagaactactaaaagacaaccgtgaaacttaacacagtacatagtataaaatttacacaatatttttttttaaaaaaaagatagtatttttgaaaaaaaattctgccccatagtaagaaggtaaaaaaattggaaatttcagtatgtggtgtaaaaatcctaaaaaataacattatttttagggtaaataccattttgtaccctgtgttttgtaaaagttaattaccgattggactctctgttttgttaaatgaaaaaatgcaccatgtattttccaaaatggtaaaaataagacctgagcttaattttcgacaatttttattttttaatataattaacttgaagacaattcctaacacgaacagatacagaaaatataaataattttatcataactcctttaaatcggatcattattaaattttattttgaaaaaaaatcagtttatagttctatttgtactattttaaaaaatacaaggtttattgtgtcatttaacaaaacggtccaattaataacttttacaaaacacaaaataaaatagtatttaccattgtttttatattgctgcagcctgcaacattatacaactgcatcgtgtaaataatgtcttttttagaacaatcaaaaaaacaatagtttataaggtactaattgattattttaattggcagtgtcgacatccaaagtagattagattatttagaagaatgaatgaggcgatgcatgtcttaattttattccacattaatatttatttctttatttcacttgttgggtcaagtatagttcagcccttcttatattagtattattccaataaaatttcttaattaatttttttataattattatataaaatgtaacagtagtagatttgcttaactaatcccactaaagttctttcgtgataaaaatgcctgaattataatgaaattctgagtcttggtcttggtcatctcatctcccacccagttactatatcatctgtctatatatatatagttcccactaattagttactaattaaccactttgaccagatctgattgattccacatctggtgattctccattagtcactgttggtgttgataaagtccctaatcctgttgttaatcaacatcttatgactactagaggcaagtcaagaattcgaaagcctaaagctttttatgtctcacttgaatctcgctcacttatagctagcttctttgtaagattccaactagtttgcagctatggatactgaaatggtggccttaaagaaaaatgatatgggttcttgttaatcttcgtgaaggtcatgatgtcccaattgattgtaagtgagttcataagatcaagaaaaatccagattacaatgtatcccgatacacagcacacttagtggctaaaggctttca

SEQ ID NO: 83590 - DNA, 622 bp, Cannabis sativa
tgtgtggatggggttacagtcagcgccagccccacaagcatagtccagtgtcttctgtaacattccctcacttaatccactcttgcatacacaccaattcgcacctgtaaaagtttcatcaagttgtatatttcagcagttaaaacatacgagggtcaaggaaatataatcaaattagtagagatcaagggagatccatgataaaccatgaaaaaggcagaccctttatgaccaattatgagagagagagagagagagagagaaagagagtgtgataaggcagctaataaagaaattagagagcagaaggtgaaaggataagcaccatttgagtacctacccttttccccattttagtttataattacaaaaaatatatatatggaaaaatcttgaaatataaaaagttgagctggagagaaaaagatcagagtaaatgcagagcatttagtgttgagcatttacagtttctcacatgaaaataaagggccaaaaatagcttgttttcataagaaaaaaaaataagactgtcatgaaatatgagctgatgcttcgttatcttcaaacccagatgaaatatacaaaagggaacacatctcacaagattattatgttaccaaca

SEQ ID NO: 83591 - DNA, 548 bp, Cannabis sativa
gaagaaaacggagaggtacctaaggaagttctaagagtataacggaaggtatttttaccgccaaaaatacaacttaagtatttatctgctaacaacataaaacttaagtatttatcgcaaattactcaattgattatgaaaggaaaataatcatcatacgtggcataaataattacttggagaaatgtagcacgtaacatattgtactgcatttgtagtactcagtgtactgagttttgtttgaagtgatgtactaaaagttataatggtacttctgatctgaagagggtaatgtagacatttaacacttgatcatatctttctttctatataataagtagataactgaagacctacaaacataattagttagttgacttcactcatcgaagttgagatgaaaatgagagaaataatgcaatattggagtgagtgtatagagtagtggaaagctaagaatattgaatctcgaccagccgagtagaaatatcaaatatatatctcttatctctgtagttggtttcagtctctttttttttttttttttt

SEQ ID NO: 83592 - DNA, 549 bp, Cannabis sativa
gagtggttgaggttgacccaatagagaaaagaaaagcgcaaagcggaagtagacaaagtttaacacgtacttaaaatacctttttatacgcttacaggattcgtcctttcttctttgaatccccccataactctactcttcctcaagattccttcaccatctccaccctccgcctccctcaatctctatttctttgacttctttggtcccatctgtttaaagagtatctccttcatcggtcacgaaggtatctccttttgctttctcaattacttttttcacatgaaatgggtataaactttgtataagatttgattttagtttttgttcatcattaatactttgattatatgttttaaggctgaaactgattgtaacttgcctcttccaattttcaagagtcgaaaatggtttgaccagtagatagatagatagttagtcttttacgaaactgacaatttttaatttaaatggttgatatgattttggactcttgaagagttttggaccactaaaccatgttcttcaagctattccaacaattgggtc

SEQ ID NO: 83593 - DNA, 1425 bp, Cannabis sativa
atcctaatgccataagaaatacataaaaatttcaagttttcaaagataaagataaaagataagtgaaaatataaattttttctctttttcttggcttaataattttctaaaattctaaaatacaagagaaggggaattcaaagtcttaattctattgggaattatttgaaaataaaaacaattatctatgattgtcaaaattgacgctcatctggtagtttcagagaaacgggcttggttcatgtcatcaagtcaactccacacaagtgtaaagttgacttggaggtaaaatgttaacctagaaactttccttggtgaagtggacatcaatatttgacacgtggcaacaaagaaaacgtatcggagttaggtagtcccgtgtcatagcagtcgacctaggagggctccctagccctgtgccgaagttgactccaggaactccagaatggaagtttggattccattaaattgtttccaactcactttgttttagtatttagtaccatgaggacatggagcaaacaagtcaagactcggaagctgaaaacacacgatactgcacctcaaaatcaacccgagcacctagggtttcacccagcacccaggtggacaacccaactaggatttcaatttttgagaccgtttaagtgaaaatggagaaaactttacattaggacatgaactagacataccatgaacatatttgatgcatcagaatcagagtcggagaactttaatttttcagcacctggacactcaaggaagaaaacatctcagagttttttgataagtcttctgggcatgaacttttaagcatcagaactaaaatctgactcgtgcatcttgttcatcttcatcaaaaacagggaaatatgtactttcggggaaaaaacaacacatttgggtgccagaacaagggcccagggcccaggttgaaattttgtcaacctaggcctattctaaggagttttatgagaagtcttccgtgaatactctacgttttcaacaaagattaagtttcaactatttctagggacaaaatgaaacttccaaatggccaaaaactggacccagcgcccaagttgacatattgtaaacctgagctatttccaatgagtttcacaaaaaagtgttcagtgaattatttccatcatcagaaataacaaagataaaagaaaactcaaggagaaaatcacaattgtaagggcatgaaaactgagcccaacacccaagttgacctagtgctgggcctagcacccaggtttacaaccaacctcgtacgctggtttcgatcatccaaatgccaatcatggtacaagaattctctccaaaatggtcaaaaactgggtaggagacctcgtcttcaagttcaagaacctatgaagtagaaaaacattccgaaagctctaaaataagcacgcatcg

SEQ ID NO: 83594 - DNA, 2709 bp, Cannabis sativa
  modified_base (1001)..(1006): a, c, t, g, unknown or other
ttccttgctaagtaagtttagagcgaaaagagaggtttttggcttcgagtttactgaagtgccctcatcaaaactgctcatttggcttggcgtattctgaatcctgacttctaatccttgagtaagttctcgatttcgtttatgtttactttgcacatttactttctgaatgtaccttcgactttgctatagaagatatgtaggaaaccctaagtttagaaagtctccaattttcctttgtcgtggttcatgcaatttcactatctatcatgcttgatttttgaactgcataatgcctgtctttcatctagtttattctaagcttcatgaaagtttttgccctaactcgagaaaatttcaaacatcctgagttttgacttttttgttaaatattcttattctttaatctgtagagtactcctggtcggcatatttgcttgttttaatgttcgatattctgaccaaatactcatcttgtgtgttgtcttttgtagatgaacccaggtgagttttggggaagcgaacaccgaatcgaccaggacttgcttcaactcttgcgcgaggatcatcctcgtcttcattcaaacccaacttcttcgagtgaaaggcactgttccttaaatcttttgtccaatcatagaatgatggctcgtactaagaagacaatgcgtagggttgacgcatctgaccctcaagtggcccgacacgccaccttacctagcatcggacaagatccagccgcccaggaggggaggatcatgaaggggacgctgaggtccaagagattgaagcgcaagacgatgtccgtcctagcagtcccttcgaggcggaggaagcggaggaggttgcacccccaaactatgggggatacaatgaggccggggagacagtcgatgctgatgacgacatcctcgttcagggcgtggactaagccagtgaggaacttactactgcggttcctcatagaaggcaaggtaccttgggtgccaggtgggtgagcnnnnnntccaaggttactgaggcgcgcctacgggatctcgaataggatggctacctgggcgaattggactgttacattctagctcacaataaccaagccacaaaccctgagaggggaatgtgcgcttggtggggtgcccatgcccagcaaggggcattgtttcctttgcaccgtattttaggaatgtggcagacttcttccgcctctgcgtgacccaatttactcccaagggaattaaatatctgtctaccctcttcgtcctttatgcctctgataactcttgaataaagagttatttgctctagcagccaattaccataacagctggtttggttggttgcaaacgcttgttggatcctgatgtagacgctaccataataaatactcacaaaaattgcacttctcaagcaccaaaagggatctataatagtcaccaaggctaacaacgaaccagttgttccaatgcacagagcacctgacaaaatatatcattttaatcccaaaaaaatacaaactagtatagtgccaaatcaaccctcaaagcacgagaattatggcatgtagacatgagtgtgaacttttggaaaggtgagaccaggccatgaaagatgctgcacatagtggaatggagcttgaatggtgttcgactgagagatggtgaatgaagataggtgttcaggtgaggtggtgagcttgggcagctatggagggttttgagatggggaagaagatgggtgaaaaagaaaaaaaaatatgtggggaaatagtgttaggaattctgggatttcattttttttcatttaatttattttggggaaaaactaattaagcatttgcctttttctttttcaaaaattactacagctctcaaaggaaactcaaacatgcttgctgtagcaattttttcgcaaaaattcagcaaaaaccttcttgactgctcatttaacttggaccacttttgctagaaaaatgctgcagcaggcgaagttttccaagtcaacgattttttttttcatacccagtttttgttgtagcaaaattgaataaaaaatttagccaaaacttcagacccccaaatcacatccaaaactctaaattgttctccgaaaatacctaaagcaccaaactaagtgtaaaatccacacaaaaataaaaatgtaaactagaaattgacaacaaaattaaacataattattattttttttcaaaggatatcaactagagttataagattaaaaataaagttgagaaacataggttgcctcccaagaagagcttgatttaaagtcactagcttgacttttggagaaatgctcatcaaagagcggcttccgcccatagagagtggcatatgccctcacatatgggtctttcttttggacaccctcaagcttggcgagacgtgaaatttgcgagctccaatgttcaacttgactcttcttaattgactgagcataatggaagccaaggaatgacgctaatggaggtggattgtggggtagcaaatatggatctccatatgtgttcttatccatgaccattttctcactatattgatacccattacttgttgtatgagtgatggtggtggaattagcgtttcttcaatgctttgctcaaataatttctcaacaccttgggtagagatagaattcaacaaatttgaatttattattttctctccattttcttcatcattttggattgaa

SEQ ID NO: 83595 - DNA, 775 bp, Cannabis sativa
ttcgagggtagttatcaacgctctcaatagggaggtctcccaataggagattgagaactatgtctcattttgtattagatcgtgtccttattttgttagttgtattttttctaaaattagtaagaaatgtaattttatcgtccataatgtggctaagtgagcgtttatccaccagagattcgattgtattccgatttcctctatcccaaaaacacatgttttgtaatgaccgaggtctaactacttttgcttcttatatatgcacgcttttcttgaaaatccatagcatttttcttatttttttgttttattgaacacttttagttataaatttaatttgtctataaactatattgtgagaattttattataataatgaattacattagttagtaattattacaaatcgtatacatgttacctttatggtgtagtttgtgcatttttgagattaatatattgcgagtgagatttggaaaattgctaatcccccaaacttactatatgaccagtccgtccaatatattaatcaagaccacaccactcacagaatactcctaaatcaacaatcacgaaaaacttattatttaaaattacacccaatttcaattatatcacatctgtacaaaaaattgaagtataacatatatatttttcaaattacataaccttcttttaaaaataaataaataaataaataaaaggagaattttcaaaaaattattttttaatattttatttataattttgcaacctcaaatttttatttacaaaa

SEQ ID NO: 83596 - DNA, 705 bp, Cannabis sativa
ttattctagcatgtttggtaagttggcctatctcttgttaagttacatgagttcaattcttgacacgttcatttaataataaacacaaaggaagaaaaaaaaaatatatataaagaaatatttagttatgttttactgtcacttgcatatcaaataaattgtcacagtgtgcatttaaatagcaaataagttttataacaataaattattatattttgatgatattgatgtcttattgcatgtcttataattatctaaatttgtcatagactattaaatttggatgagatcgacgataatcgagatcattcagatattttttagttcaaaatttttcatttatttattatgtatttttttatttgacaaaaatatattattcaatttttttgacaaattttttcgtttgattattattattattgcatgtgttattatattgttcactattatactatgtaatacaaccataaatatatattaacaaataaaaatttaagactttccaccacaataattataaactttaaaacttttataatataagaattgttccatataataaatcttaaagaaatttaaattattgttttgaaaaaaaattcaaattattaaatacattaaaagcttaaattaaaaataaataaaataaaaaaaatcatatcttttcaaatgattgaactcaagccattgtacttgatgtaa

SEQ ID NO: 83597 - DNA, 530 bp, Cannabis sativa
agatgagtagttgaggtaatatcaaattattcttcttttcttgggctgtaattaaaatcacagtaagaggacaaggttttttaaattaatgtaattttatttaaaaataaaaacattgtttctgtaattgaaggatgggggatcattttgtgcttttggtggatcggctgcttacagagtctacccttgaagcagcaatagaaagaaaaagtcagttgcagcagtctatgatcatagcaagccaagatagtatggtttcttcacataagatagatttaaatatgagttcatcttctagtaaattggttgagtgtaggatttgccatgatgaggatgaagacttgaatatggagtcaccatgttcttgccgtggtagcttaaaggtcagtacaatataacttgttatgttgctattatcttacttacatttaattcctagaggaattaacatttttctttcacagtgattgttcttatatccacctaatggcagtgattgttcttgtgattgctctctctctctctctctc

SEQ ID NO: 83598 - DNA, 903 bp, Cannabis sativa
agacttaggtataaatacaatctttagatgatgatgactaaacgacaattgtatcattattattttctgttaagtaaagcatatatatattcacctctaactactaaaggacatgaggataatctgtttataactaattgtcatttatatattaatgactgcttaaactgatttattaacccctttcaaaaaaaaaacactgatttattaatgacaaaacagtacactactcatatgaccaggaaaatgatttaactaatttggttgcttatataatatattttctgaatatatattaccttatttttggggccctgagcctagaagtgaaatcaattaatatatatgaaacaaaagctggtaagttaaaaaaataaaaagaaaaaacaaccatattgaggtttagtagtagcatgcattcacgtgattggttcagggcactgccatttatacattattatcattattatataataaaaataacatatttttctttatattctacatgccacactatactgcaaagcttttatttacccagttaaagtcttttggaatttgtctaaagtaaattactacgtttcaaaaaaaattactaccaaaaaattaaaagaaaaaaaaaaataaaagctttccaaaagctcaaatagctcatatcatacttttactttttaaaaaaatatataaaaaaaaatgctagctagaataaaaagtgttctaatataattcagattgtctttttcataataactcagaatacatacaaatgtacattacatacagtgacagacttaggaattttctcttctaggagcttaattattatataaaataaattatgtaaagcccgcttagtttaatttagaaattagcagttaatcttgattaattatgaaattattt

SEQ ID NO: 83599 - DNA, 831 bp, Cannabis sativa
ttaattataattttatgagctattcgttcatgtttataaattttatggtatatttacttaaaaagaataggaatgaatagtatatattatattgtttataaaatttttgaaaaggaagaaagtagtgaggttcacaaaaattagaaagaaaataaaaggaaatgttctcctctatttttataaggaaaatcttttcatttcctaacctattttactttaattataattttattaattaaaataagaaaaaataaatatactctttaaaaatctataaacaaaaaataattacatgttctaataatgataattttatcaaattaaaacattccaacaaaataatataattttaaatttctttccaaacaccataataaaattttatttttgattattttttattttaaactgattttctcccattaatgatatatttatatttctattgagaccacttcaagaaatgggaaagcaagtggtgcttaaaaagttctaaacaaggtaagtgggattggtattaccatttcttttataaataaaatcaaacatcactaaattggtacgtgtcggctttaaacaacattaataataaatttaattatatgaaagtcttttttttttattattatttttccattagtgaagatggagactaactgaccaacttttttatatcctaagagagtttgtgtgattttttttcactgtataagctctttcttgcatccatttttttctttttcttttcatgaaattgactagaggttaggcccttctttttacaggttgacacttgtctagtatatatatcattatcaaagatgccattga

SEQ ID NO: 83600 - DNA, 679 bp, Cannabis sativa
  modified_base (278)..(287): a, c, t, g, unknown or other
tataaataattccataattaatcataaacagctgctaatttccaaattaactaagcgggctttacaaccattgatacttctacatccaaaggcctggtaagggttggtggagaaagttgtggctaacaaagctcacttctaaaattaaagtgtaatttggagggtagcccatgagatccttccggcttcggtgatgctgcaacaacgtgttagggttttatgcccaaattaaaatcccaattaactttgtaaccctcattattattattattattatnnnnnnnnnnattattattattattatcaataaagaaaataataatttattctaagaaagaacaatcacattgttcacgtattttattcatgattatttatttaatattaaattctattaaatttcaagcatgtagctactcataattattgtgacgtaaatcatagtgggcaaacattatatttacatgatcaaaatattaaatgtcctaagatcagtcagtgtactgggtttatactaattagctaatcaatgatagaatcttcttatactagtaaattattaagttctttccagaactttggtaaagtggatgtatttgttacatcggactacctcgatttggacatgatgttagataacagagagtatgttggctaaataatttagtcagatcacgaa

SEQ ID NO: 83601 - DNA, 1017 bp, Cannabis sativa
gctgccaacactcaagagtttggtctaaattgttttcccccaaagtttccttcggtccgaatgtgaagagagagaaagagagaattgatttcctttttgattttcagataaaagataataatagaatagttatcttttattaaattaatctaaactaatgaaatttaagatttactataaaatctactatttcatagaagacaaactatgataaaattattaatttgatattttccttcactaagaagtagcttagaatctaggggtaatatggtccaaactcataatcttagatactcctaacattccaaatgtctaaaagcattagcccactaaaaccaagatactaaaccttgtctaggtgactttataggccaaacgttgcaatcctctattagtgggcataagaatatataacataaatttcacatatatcatatttaatacacctaaaatttgaatatatctccctaattccataaataataatcaaaagtctaattccaaaattaagccctaattatattataatttacataatcaagctaagcgatcattataattatccccccgttaaaagaattttatcctcgaaatctaacctgaacaaatctggatattgagcccccatttcagactccaactgccaagtagcttccttcaccttactgtttcccctaattaccttgactagcactgtagttttattccaaagggtttcattttttctatcaaggatctaaactgtttgctcctcatatgaaaaatctggttggagctctaagttttattaactcaacacatgagtgggtttgagatgtattttcataacgtagaaataggaaatacattatgaactgcttacaatgcttaaggcaaggctagatgatatgaaattaatccaaccttttcaagaatctcaaaaggccttataaatctagggcataacttttcatttattctgaaatgtttaatccttttcattggagatacttgtaggaatacatgatctcctac

SEQ ID NO: 83602 - DNA, 889 bp, Cannabis sativa
gttctggtggggcggcactgagactaccaggaaaatccattggaaaacatggtcttttcttatctattcaaaattccatggtggtcttggcttccgttctatgaaagccttcaatcaggcgatgttggccaaacaagcttggcggctactccattatcctcattcgctagtggccacactacttaaagctcgatacttcccacacactagctttcttcattctggcaagggccatagaccttctcttgtttggtctagtattaattggggcaaagaacttcttcagtcaggccttaggaagtcaattagtgatggtactaccatcaacatttacaatgatgcttggattcctggttatggcaaactgtcctatttaagatatcattcacatgccaatatgacagtggctgatcttatcacacctcacaaacaatggaactatgacattatccaatcccttttccctacagacattacacaatctatactgtccattccccttcatacaccttccactccagacacacacttctggtccttcaccccacatggttcatacacggtcaattcaggttaccaccttgcccacagacagcttcaccacaccgaacctaccccctcaaatcacaagtcctcacatgactggtggaaagctctttggacccttcctttacctcttaaagtgaaacacttcctttggcgtgtctgtcatgatatactccctacaagccgaaaccttttcaacagaaagactttaaactctccccattgcagtcgctgtcaatatcacgatgagaccctagaacatgctctcttcagatgccctgctgcccagaaggtatggaaattaactgattttaatgcttttatttctacacactcttcactt

SEQ ID NO: 83603 - DNA, 665 bp, Cannabis sativa
ccgcaacacccgcctgttcaaaagaagcattgatagtagatgagacttcagcaatagtagggccagcatgagcacgtttgaggatgttttgcaaggagtccccaaccacaacaatttgaggaagaaaagcattccctttgacaccagctacagctttacccttagccttctcagagagtcgaggcagaggattttcaaagcttgcctcatgtgtggtattttcatgaaccatagcagcaacctgatgagtagtcatagcaggcatatcacaaaggaccccagtggggttttcaccgaagtgggcacgagtttcagggttcatagcagcagagtgagactggttatcagaagaaaaggtgacctgatccattcccaaagatctattatcactcacattacccaggggagctgagacagaagaccccgccccatggtcttccgtggacagaaattgattaacagcagcagccaaagattggtccacattagagttaggatgagtaagttcatcaagagggaaggaattagagagatcgaaaggattccttttgaagttggttttaggaggggctttcaaaggaattttataaggcaaaggaggaggagccgagtgatcatcacatttcttgagatacctaatgcatttggtaagggtgtgatcaaac

SEQ ID NO: 83604 - DNA, 1279 bp, Cannabis sativa
tacatgatccattttgttatttaaaaatataattgaacttttacaaaacacggagtccaaaatagtatttacccaagatatatattctacaatcttacttacgcaaaaggaatttgatagaattttgccctgtaaatttcaatttgttgcaaatattccctccaataatattttgttcattttttaaaacaatttattgatttagtactaatataactttaattaaagtcacttcaagaatccatacaaaaactaaatacataaataacatcaattttgagaatagaatagtatatacatttatgtttaatgttagtaaaataaatttcaagtagcttaaaattgttaaataaactttcgtactgaaaaaaaaaaaaatattcgcaacattttatatagttctagaaaatttttctagaaaaaatagttaaagaagcaaaagtttacaaacgtttggagaaaattcttaatatttttaatgatacaccaaccttatcatctaattatatgttgtatgtaggttcagggtcatctaaaatatattagaagcactgttctaatttttaaaattaagcccttataaaaaaatatttttaaatattatcatacgattatatattttataaaacaccaaaagctccaattattttattaaacttgttattgattccaataccacaaaaattaatagaaaaaaggaatatgaaatgtttgaaaaaagtaataaataacaatttttttttttttttttgcttaaaacagtaacagaattgaaaataaactttgaaaattgggatggaagtatctaataataaggttagccccttaaaaagttgagttcatcaaaaaaaatttaaaggcattaaaaaaaatttattggaccctttatttttttaagagcccttacagtaatccaacttgcacaccataaagaccggccctgaataggttacaataatgagtaaataagtacatattcgaatttgatgcttcttttcatcttacttattagttttcgtgatacgtatatctaaatattatatataaaaattcttaatcaaataatgataaacaaatatgacatttgaactttttttagcacttttggaggttgtatcacatctttcacgagtgaaaaatagaaaaatcagtggccaagaacatgcatgggaaacgaactaacaacaaccatggaagggaatagccaaaggggtcagcatgtccacgagtaagagaatgagaatctccgactcgtgagttttactattcttccttcttc

SEQ ID NO: 83605 - DNA, 810 bp, Cannabis sativa
taatttgcaactcaaattaaatttgtaagagtatcttttcatttgttatttatgttaattgaaattctatttttgaggttgagttgtgagatgcaatatttgattatatgagttatattcctaacatcatgaaaaatatgatttttccctctatgttctatagtcctaaacattatgtcttttttattattatttaattataaattggtctaataataagagtatagtgattcatctatacagttcataaaagagctcatatcatggcattttctataaactatacttatctaatagtaattttttttaatattttgtattcattacattttacttcaaaagtaactttccaaattaagttaattagcttcaaattttaaggagtattatttaggttggtgtaatggaaaggtaatagtaacaataatgaaataagaatagtaatagaaattgattataatgtttggtttggtatgagaatgtaattgaataaaatgtgtattgattaaaatatttttgttaaaatattattttaacgaacaatgtatttttattactattatgattaccattgaaccaaacatcactttaatttgttcattatcttaattgaaattctatttttgttaaataattttatcttgtcttttgcttgtttagtatagtaacacatgttatacatataaaattaatgataaaatctgattttgtgtttcagaaaatgagaaagataaagtgcttgaataatgatgtattcttcgaagtgttatccctattacctacaaagacattatttcaattgaaatgtgt

SEQ ID NO: 83606 - DNA, 1437 bp, Cannabis sativa
atgaacaaagacaaaaatgctaaaataagcttaaaaattaatcatacccaacatagaagttcatagtcattcaagcctcaaaaagtctagctcatattcaagtaaaaaaataaaattcaaactaaaaactatttctccatagttgctgccctttgtttacaattcaacaagttttaatatctaagtaaaagaaacaagaaaagaagagaagaaagaaaaataataagggagagtaaaagaaaatcaaacacaaaagcttggttccccctctctttccttcctctgctgtacttttcttctgcaatcaattcttctttgaaaatggcagctgcatcatgtagaagaagaaggtttacttggtctcctccttttagttgttggataaatagggtacaaaaatgacaccctaaaaatagaagctcaatctttttgcactttggcccactaggtttagtcctcttcctccacaacatcaagctggtctaaatgctgaattcgctgtattattgcttcagcaatgcttctgcaatttagccctgtttcagcttttgttcccactccttgcctcctttccttttttctaaaaatttaattcttctttttcaacaacaaacaagcacatttaattaaataaacataactaaaaataaatttttttacaagacttaagagttaacttattaaatcgaaaatgaaactaaaactaattaaaattaagcagacaaatatatttttcactactcttctcacaataatttcagtttaaaagaataagaaataactctataccatagagttatcaataatcaatgcgaccacaaatctttgttcttttagaagttcatgttttttatttttctttttttttttaagagggaaaaacattatgatctaagttcgaaaataataacactatcaaatctcattagaaaatagatttaattgatgaatggctgatatcgtaccatgtattcataaaatacaaagataaatgactaatatattatattatttactaatttttaaaataaaaataatacaagacttggtaaactgtgagagagatgaggtttttcaaaataatacaaaaataaatgactgatatcctgaatataaatatattttctaaaattaatggaatgataactcatttcattgtacatataacataccaacaaaaaattgaaaataactatgaaaattatcatattgaataattataaaactaaaatcacaatagtcttttaaaacatgtcatatttcttttttgctgtatggacatatatatattgtagaaaattttatatataaatagtatgtgtcaatactcaagaaacatatggcgtggatatagttgatactaatgtgtgcattaattatatttttaatttttttaatcataaaacatatttcagttatctttcaaataaaaaagta

SEQ ID NO: 83607 - DNA, 1127 bp, Cannabis sativa
ctgtagttagtgtacggtcataaatctttcttagcaaaacaatttctaaatcatattaatgacgtcagaataagtgtagcatgatgtgagatcctagttgtccttttagctttagcttacgtggctcctaatatttatataatagaatctctaattatgattatgagccactcgtacttaatactaccataaagtattgttttataattaattttaaatatttattaaaataaaataattagaacttgatattaaattatactaaaagtaacattatattttatataagcatgttaagcattatgggtatttttagtatttttttttaagaatacaatatttttattaggcactcctgatatttaatactttttataagtgatgccttaaaattaattagtaatattttctaaaatttatttttttaaaattatataagagattctatacttaattatacgaatagcaatatgacacttagaaaagtattacacgtgcctttaagcatttctcttaagaatattatattcaaaagtaacctttaatttattattaaaaaattaagtctcaatttttcaaaatctcgtatgaagaaaaaatatatctctataattaatacattttaataaaatatatagagtttataaatatatttatgtagaattaataattaattctaaattataatatatgtataagtaagttttgttatattttatacaatgtaataatctttatacaaataaccattaaagatatgtataaacataaataattactattacactcatttatatataaacaaatatgaccctaatttataaattatacctttattttatatcattcctttattaaaaaagatttgaaagtaaaaatatttttgtaaatacactactcgattcctattgcttttttaaaaataaatcatgcaaacatcataatatcttttttatttatattacaatgaatcaaatttagtccaattcaatatgatacatatatatttatttctttatatatatatattttatgataaacacatacttaatttaaaatctaatgtgaaaaaacttttaatctctcataattgaaatcttacgaaaaccaacatttttatactcatg

SEQ ID NO: 83608 - DNA, 1003 bp, Cannabis sativa
atctagcataaaatttaatatacgtgccttgcacgtagttttttgctagtatatatatatatatcaatattaagctgcaaatagtaagaaatggtagtgtgttagtataaaattaagatgttgcttatacaagatcaaattagcaccaacaaacaaattagaatagctaggtaataaggttacctcaaatgagactgagactgaagctaagctaagcaagaagatacgtataaatatttagaagaaaatggcgtagactataataataaaagattgcacatatatatagcaaggcacgtgatattcatttatttaaatggagtggttaggtagagatcatgtggtgttggttaagttaagtatcatgtatggttgtaatgaatacacgttcgtacaaccacatttggatattctatgaaaaaataaataatatatagaatagaataattatttaagtttaaaatacttaagtttaatttttagcggtaataatactaagttatatttttaaaattatgtatgtatctaacggttaaatgttaagtcattatccacgtcttatttttcccttttcttattggtataatgacttagagtaatcaggaattgccacgtggcaatttactaaaatacttaacagtcaggtacctaccgaagctctagaattataacttaagtattattaccgctaaaaagtaaatttaagtatttattcgagatttaaatttaagtatttatgccgcaaattactcaaataaatattctaaataataaatggtcaacaaatagtgtaattagagttttttttttacacaaactatctttttttaaattttttacaacttaatatatttaattttaaaaatatgcgattttataattttaaaattatagaaatcgtaatttctctctaaaaaaaaaaaagagaagtttataataatatatatatctattctatataaagtgtgtctatataactaaaattcttggtttttgagaaatt

SEQ ID NO: 83609 - DNA, 915 bp, Cannabis sativa
ttctttttctctttctttttcttggaacctatcctaatgccatcagccctctcttctcttctctttccacgatgcttcctcttggcttggtgcggcgccgaagtctgcttcgatttggcttcgagaccaactgtggccggcagggatgtgatgacattgtttacagcgtttaacggtgatgagatctaaaatcaatagcccaaatttggggtctcgtagcagcacgttaggccattggttttggccatggaccaccatgatttgggaggctcttcttgatttgtctcaatcacaccactgttcttatatgtattttgttttttgttgagattaaagaaaagaaaaaaaaatgagaatgattgaggaagagggagctcgggaggaggattttctagatttatgggggcggagctcgtggtggattttttggatttatgggctggagcttgaggaagatgggggattttctaggttgatgaagaagaagaaatcttcccactttctctctgatctaatctgatactagaaatttttgttcatctatttctgtgttcatttattatttattttttattggaaaataggaagtgggtttgctgagatcttgagggaaggagaatgaggcaatttgattgatttgggtttagttttttttttggttagggtcatgaaattttgttcacatttgattgatttgttctaggaaaaagaaaaagaaagaagaaaagaaaaggaaagaaaaaaaaaagaattttttaatctatttttcctaatttttaacattttaaaatattttattaatatttatattattaaaattaggcggactaataaaaatttaccacgtgtacacttgcgtacactgtggtagtccactttgctacttaatagatcaaagtggacggaaagactaca

SEQ ID NO: 83610 - DNA, 788 bp, Cannabis sativa
  modified_base (735)..(739): a, c, t, g, unknown or other
tggactaaggctcattaacgcccgaaccacgtaaaaatcctcatctcgctttcttacagctcaatattataattatatttaatagttgccgaaaatctcggtcaacaattatctccttaattttgttgagagttggattaaataaacaatgcccccatgttttgcattaacatcttccttcttatttcagtttttcagtccagatattgcgattcaaccatagagagaaattcatatcaattttcataattttgtttatttttatttttgattttagagcaatatagcatttaagtgtgtatgtagtatttgtgttatattagttatataatgtgaggttaatatctattatatgtacggtaaaatatgttcaaagtaacataagaataggacaatttggtaactaatttgtaacactttatcacaattttaagtggataattaagtgagatattacacaaatgaatatggaaatcaaaattatcattacacaaatgagtagaaaaacgttgagaattaagttgggttgaaggagttacaaaaatttaaaattgtgtatgctaaaaaagtatcgggcgacatatcacctggagtgcatttttccgacttaaatggattttaattccagcttttctaccaacgtctgtagcatctaaaacactcgtttatgtgcttataagagccatagagtgatgtgtattggagaacattgtcccacatggattaaatgtaaannnnntgagccatatataagaacatgtgctactccactcattgccaattggttt

SEQ ID NO: 83611 - DNA, 738 bp, Cannabis sativa
  modified_base (691)..(703): a, c, t, g, unknown or other
taactaccagaaatatctgtaaaacaataacagaattaactactctgatgacagtacaagaatgaacccatatcgtgttacattccttttatttaattattttatgataattatctagacacactacaggattagtgaagtttacctcttaaaaatacacaaatactaactaagcccataattatttatgatcactttaaccttcttattctattacattgaaagaaaaagaaaagaaattacactttaccaattctatcaaaatgactacccttagatatacatatattagtcttaggataccaaaaaaataatctcttcatcaatctaatggctcaaaatatttgtggttttacattcctcacaatactaactgaggttttacataattagccttttcataaatagttataaactatctttagcatgtaataatcctatttgatgaaatccacacattaacaatatttcctaacatttctctaccctttgatgaataatgaacgtacaataaaatatctgcacggtaggaacataaacaatgtacttaagatgtatcttatatatattattggatgatcctacaatgcacttcttaaaaatggatgtactcatgcaccgtctacttattttagcatccagaaaaaaattttagcctaatttttttttatattcatatacgttatagctnnnnnnnnnnnnntacaaaattttgaaaaatttggaataatttacaat

SEQ ID NO: 83612 - DNA, 1040 bp, Cannabis sativa
agggacacgataccaacttccaccacacaactcttaagggtggatcagagacccatttcgggtaccaaacagagaaagagggatacgattccagaaagatctagagagaacttccatttcttttttaaaatgactatcaagtatattattatctagcataaaatataaatgccaataaaatgcttgacaacacaattttaaaagagctcagtcaatcaaatcttgaactaaattttatatctcacttgtgttatttaaactcaaaaatgtaacaatcaactatgtatgtgcaaaataaaccaaagtaatatgatggcttgaatttaagctcaccatactgtgtgagtggaggccgacggttctaaatccaaaagcatttgcatactatctttaggtggaattattggtcgctaaactagtggtggtaatggtatgaacattcctttgatgccatgtcaacattaatgataagatcaaatataaaattacaagtgttttatttatttttttttaaaaaaatataattttgaactttgtattttgtaaaagttacgcattaaattttcatttgttagataataaaataaattttatattttttaaaaaaatataaaatagtactctagactcaaattttaataattttttttatcattttgaaaaatataaaatttaatttatcattaaataaaataaaaaattcactgatgacgatagcaaaatatatgatctaaaataatcttaatttttctttctaagagactatgttaaatctttcaataataataataataaagaatttattcatcaaaaataaaaaataaaaataaagaaaattattattttattaacatatactaacaaaattcattatctattctacaaattatatacattaatacttaaaagtttggtttacaatttgagaaatggtaaatatttaaatggtttttgtggtgtgcaatatcattatgaagtatcatatactgtaacttaatattgaatttatttatttttgttaagggtatatggtctgtact

SEQ ID NO: 83613 - DNA, 734 bp, Cannabis sativa
aagtaatataatgctaagagcatcgatctctaaattggtgatctatttctaaaatatatattttatattttatatggtaaaaagttatttactttaatttagtgccaaaaaatgattgaaattttacgtatagtgaaaattgattcaaatttagattacaattattaatatactacttttatgtcattttaatatattttttttaaactttgttattgcattaaattataaacatttgacatttattttttattgttttatatgataaaattaataataaagttattattattttatatttttaataaaataattaatcaaacatcaaattttgcatcaagttttgtaattgtgtattgaagcacaatactaaaaattaatgtaattaaatatatcacaaacttacttttttgtgtgaagtataaaacaatttttacagcacctattaaatatggtctaattattgaattgtttctctattaaattttctcgaaatgatcatatggaattaattattaattttacagcttatatttgtttttaatttccacactattaaacagtagtattattagatactattggtatttagtacttttaaatgtgtcaataattataattgtaaatggttaacatactcaaaagttattttcattaaagtatatagaacctgatatttagtttgactaataatacgaacatatatgtacaaaaatatttgacaccactaatat

SEQ ID NO: 83614 - DNA, 614 bp, Cannabis sativa
taaattactctaaattataatatcaaatgttatttttaaaaaaggtgaaaaaagaaataaagcaaattatgaaggactaaattgttaaatatgaaaaaaagaaaggagaattatgagaaatagggaaattgttgagttatgtgggaaggtgtgttaattggtgaggtttggtgtgagtgtgatgtggtcccctgggagagaggttccaggattgttaaagtgggacccagtgcagcgggtcctaactccaacgtcgagccctgtgagtgactttgatagtgggccccactcttgtcgccttgtcgtttggagaccctttatttcatatcctacttttaccatcatttctttttctctttttaatttctcctgagatattggtaatttgcttggctctatttatttattttggaatattatttactgccacgtgtctactttgaattgaagtgtcacctgtatcattagctcgttgatgaaaacaatattatcaaacattgtggttattggttaagtttttgtattaatttgtattgtattggatgatattaaattatattatacatcataattttttttatattattatactaaattttaatttatattaaaat

SEQ ID NO: 83615 - DNA, 933 bp, Cannabis sativa
aagtaccaacgagagcattactatatattgagcaccagtggtgcccattaccttctataggtagcggcttatgattggttaacgatattctttaagttatataagacccgatacttaattacaccaataataatatgatagcgagaaaagtactaaatactaataacattttttaacaatttttgtaccaataatattttttagcaagaaaatattgaaaacaccgacggtggcaaaattattagctaggcaagcataggtacatttaatattattaaacgacaagggggggcctatcatatatatatatttatatctttaaaataaacaaaaccttaaggtgttatttcccacatgagatcactacatttagtgggtttttaactccttttgagaacacaaattggccttattcttacttcattatactaacattggcatctctattaattgaatctatacacattttatgttgatttaatttacccaacaatataaatatatatatatataggtaataaaggtcaaattgagaatcttagatctacaaattagatgatacctccttgatgtgtgtgggttattattatgacttctctctctctctttgcttactttttggtgtaagtcaacaaaaaaagttacaaaagtaggctttgaattactcatgtcatgtgtggtctttttaagttggtaattaactagggctaataatgtgtgtatatatatatatatataattgtgtatgaattattgagactatatataaataagcattgatattagatattgtcaagagtgttttataataataattatttgagtaatttatagtataaatatttagggttaactttcagttataaataaatatttaagtttaattttttgcgataattatacttaaagttatatttttagaaatttataggt

SEQ ID NO: 83616 - DNA, 607 bp, Cannabis sativa
atatatgaatgattggatagtgttcccacgtttttggaaatgaacacgtgtcactacctaagtggtcaaactcggcacattctcccattgggctgtaactgtcgagcccacgaccattgggctgtaactgtcaggctcattgggccataactatcagttcagttgaagaaagtgtcttcaacgaggccgccaccttatttatattgtcagctttgggcttaaacactcgtagtttcatttttggacacattcttaaaatacctcgagaacattttattcaatgtaacagttacttattatttcaatttgagatatgaattgataccccaacacctctagttccacagaatgacaaccgtggacccgtttcttgcagagggaattagacgtcccacaagctacagtcttacttactgtagcttgttcgccccaaacgagtaacaaagaggatttcccgaaaaattatgacttgtaaattagagctcatttctttaaatttttctcattaatagttcaattatattagaattttatataccctatccaacaaccgactcatctaatttggatttttaagaaaattaaaatagcttaacccggtatccaa

SEQ ID NO: 83617 - DNA, 1009 bp, Cannabis sativa
taaaaaattggcatattttttttatgtgtaaattcttggtataattaaacaccatttgctattttttagcataatatatcaaatttcctttttatttatttatatatatggttttgttttcttaccaaagtcgttacgtacaaaaaaattcaatgaaatgggacctctaacaaaattatgcaatgaaattttctggtttagccgcaggagctcttttcattctctagctttcatatttgagtcccatttatatgtcaaataacttgtcctcatgaaaaatagtaatataaattataatcattcaatgaagataatttcaacttcatatatatatatgggcccctttgaaaagcactagtgcgagtattcttatatattataattcaattcaatttattataattatatgatatgatgtgtctaactaagatattacatggattttagtctgaaactacgtattagtatatatataaatggtacgtatattacaagtattactaattctaatactaaatctaagtctgtataggaagaataattgtatattatttgttgtgaattaaaataaacatgctggccagtaggccactaatacaagttttttttgtttgtttgtttgactttgattgttgttgttcaattccaactcttttaaaaacgaaaaaaaagtgaactttggtgcctaaacaactgctgatgataagattttaatttttgttagctaaaaaggatatatataatactaagatgaaaaggacaaaatggaataatcgtgcttaaaaacttattacccacttccacccacctaatcctgttcatccgttgaaaattcttggtggcttcaagtgattattattcatattgtgtttaatgacaacatttgaccaaatttgagtgttgattctaacaagtactaaaatgcttttcatgtttatcttttcagagtttagtttcaggcttatttgatttctaagcaaagaatatgacagtgttaattgcctacttt

SEQ ID NO: 83618 - DNA, 998 bp, Cannabis sativa
  modified_base (37)..(66): a, c, t, g, unknown or other
caatctcaatagtttaaggggaatttttaacggccannnnnnnnnnnnnnnnnnnnnnnnnnnnnngtcaaagttcgagggaaaaaattactaattatccattaagttataatgtttctcatatattttcaatatatatatatatatatatatatgaaactatatctaattcaccttcctcaagtttaagtataagagtatgaatataataaatgatctttaagaaaatataaggctgaatatgatatttaaaagaatctcacaagaccaaattaagaaatttgtgggtatacacattaaaaaatttgtggaattttttaaaataagttaaagacatcaacactaaaaactagcacacattggtcgaaagtcccacatgaaagttaaaggctaagaccgtgaaaactttgaatttttctaataccattttaagaatgaaaaagtgttgttagaaagtaaaatgatgtgaagtgtaggtaagatttatggggttctatctcaaaattaattggcatagagaggtataacgcatgcatatggtactctttaacaccccacttcaagatggtgcaatttttttttttttgcttgccaatcttgcttttttgatcggcgacacttttggcacaatggatattcttggtttactatccccgaatcacaagcaattcctttggctcatgtttttggactggttgaaatttggtagtgtggtggacaaatgtagaataagtgtatggtaagatgcatgagattctatcttaatttcttaaaattaattggcaataagaggagtagctcatgcttcttatttatggtactctattcccacatattatcaacgtggaactctctaacacaaactattaaaataatcattttggtttgttatttttattatttaaatattttatttaatctaatcattttagatactaagttattagaattaaaataattttgatcaaaaatatttttcatgaattttgtgcaattca

SEQ ID NO: 83619 - DNA, 692 bp, Cannabis sativa
aagacttattagtatttattacacttcttatatttttagttaagcttcaagacttagaaataaatattatcttaatgagaaggttttgtagtgtgtggattttaaagtttacatactccaagttagaaggaaaaaaagaattcacttcacttcttcctcgtttactctttttttcttccaaaatatgttttttttttcttttaaagcacgtcttggattccctagttcaagtctgtcagaagctttaaacagcatgagataatagatctaatatgatagatcagatttagagtcctcttttttgaagtcgtacataatcttattatgcaacttttttttttctttttcaatcttttggtttcttgtaagtgtctttgctatatctagcaaaaacatttatgtgattcatacttctaaatagtagtgagtactgtttagtgtttaggagcaagtttctcattctattatttttttctggttaataattacttcatagattcttctctctctctctctttgtgtaaaattaatatttcttctaataagctgcttatatttacttcatactaaaaggagtgggcaccaagtaccaacaatgattttaatatttggtctaacgacaattaacaaaagaaaatgtaaatttgatggccttgtttggtggataggataaaggaagtgagagagagaaa

SEQ ID NO: 83620 - DNA, 1252 bp, Cannabis sativa
aaccatggaggcttttggatttgaatccagattcatccaactggttatgaaatgcattagctctgtgtcattttcgatcttactaaatggaggcccgctgaaacagttctgcccgggtagaggccttcgtcaaggcgatcctatttcgccctatctcttcattttgtgtagtgaggtgctttcaaggatgctattgcgaaaggaagagacaggattgctctcgggttttaaggttagccctcagagcccctccatctctcatttaatgtatgcggatgatatctttgttttctgtaaagccaatcttgaagaagtgggggttgtgatggatgttgtccaactctttggttcttggtccgaccaatgcctgaatgtccagaaatctgcttatatttgttcaaaaaatgtcaatgaagacatccaggctgagttatcgcagtttctggggtttcggaagcttggcaaggaggatagattcctggggaacccgattatctggtcgaatagtaagactaaagacctgaggtacattaaggacaagatttgttcaaagattgaagggtggagatgcaagctcttatcccaagcgggtaggtccactctgattcgcgctgtagctcagagtaccccggtgtattctatggctacctaccttttccccaaaaccttgtgtcatgagatggaccaggctattcggaagttctggtggatgggtagtgagtctaaggatcggttcctagctctttgtgattggaactctctttgcttacctctggatagaggtgggctaaatttcaagaagttcggagatgttaaccttgccttggtggcgaagcttggttggaaactcgcaaaggaggaggattccttatggtgtaaggtctttaaggctaagtattgggggaatagggagcaggctttttggaattcggatttgccaaggaatgcttctttcggggccaaaggaatcatggcgacgagggatttgattcgaaatgaagcttgttgggtccttgcagacggggggaaggcggatttgtgggcctccccatggataccttggttagattgggataagtctagagctgccttcaatccattgtgtgtaccgaatccaattaaggtctccaccctgattggagcagacggagagtggatagctagttcggttcaaagatggttcgtaccaagtgtggctagctctctgcatctaattcagcggttgcccagctctcaagatgatcttctcgtg

SEQ ID NO: 83621 - DNA, 1418 bp, Cannabis sativa
ttgtaattttattgattcacatttttctttatataattcaagttttgtaatggcttgtaacgcaatgattgttcaaagttgtagcataaaataatgaggaattcatctttatcacaatttttgtagccattaatattatacttgtgtgtttttataatttgatgttcggcataaaactggttgtaatgctttttgtttttttggttttttttttttttgaacaagcatatatctgcccaaacacaatcccctaaactagtaatagaggttgccagtgtgtagacaacaccattcgccgatcgcgaaatagtgctgtaacgaccaccatcaacaacagctaataaagaatagatatctaataaaatagactgataactaaaattaatatgaagcttattaattcacccaattgccacagtagaatcactattaataatagaggcaatgaaaccaaattgatgcgcaagagacaagcccagacgaatggcaagcaactccgccacattagcaggaaactcacctaacacacctgaggaccacgctaactggaatcacacccgctgcatcccgtatcactctcccaatccgacaaagcccttccccggaaccattgaagcatccgtcgctagagcaaatgattcaggaggaggtggcatccatcgagtaggacggtttgcaattgggcttgcaaggcccaaactcaaatgaagccctctccgaccattctccttaaactccaccggatggttatggactaaatctggaataacatctaatcttgattgcttgttgccaaataatattgagtttccatcatactacgaccaccaaagagttgtaatcatcaattcaaaagcctcacatgatagcttctcaaagagacataagagaatttcatgcattggtccataaacacatcgacagagtactgaccacacccccaactgatgccacattagaatcaaactagagtaggaaaacaaagcatgctcaggaatttcagattcttctctggatcgtgaacaacaaagaggtacctgaactttctgggagataagctgtgttgctactagcaaagtcaaatagaacctacgccaaacaaaaactttcacctttggtggcatattaagattccatactccattctaccaacgagttagcctggaagaatctgcgactctctcctcaacctggagtgaccacgccaatgagtagccactcttgacagcaccaaccatctttttcctcacgtctcgctaatggaaaacaaagcatgctcaggagtttcagattcttctctgcatcgtgaacaacaaagaggtacctaaactttctaggagataagctgtgttgctactagtaaagtcaaatagaacctacgccaaaaaaaaacgttcacctttggtggcatattaaga

SEQ ID NO: 83622 - DNA, 975 bp, Cannabis sativa
gggccgggccgggtttgtggcggcccggcccgactgacattcctacaccgtacgcacaattttaaatttaaaccctaattctaaatagattctttctatcttttttgggcctatataaagaatgatgtaattcgactttggggacgactggagagatagaaataagtaactttgaaattagaaaaaacattgaagagcaagagaaaagagattgaaagcaatcatcatcaactttcatcattagagttcattttttcttcttctccttcttctttattcttttatttagttatttaattatgaacatgattattgttctagtgttattttttcacctagaaactcgagatcaggctcccataaggatgacacgtggactcacatccctcgaggattggtgatctgttagaagaagacctctcgagaataaacctcacctgaatcagactcagcgagatgatgtgaccttgacagagtccagttgcattattaccccttgcgtaatgtaggaccaagaaggaattatacaagttcacatataccaagatatatgcgataactatgaagacttctcctgcgatttagtaaatatcatttctttacatagcgagttggtccgaatgacctaacatgttcgatgactcgacaatgactcgcatatcctaggctgtcgacgctgagaaggtatttgtatacgcgactcaattaggacacagatacctaagcgcaagacccattggcctcgttttaacagaatacaccctaagcatgtgagcttgtgcgagtatatgaacagacaactttgcctatgaaaattgcatacgttgatgtatttagtaaaatagatttaaactgttcttcatttattttatttacatttttctaaatttaatgctaatattcaatgtaaaacagttcaataattaagttctgtgtaatcaagggacactttctttgtatataaaggagtgatcc

SEQ ID NO: 83623 - DNA, 1217 bp, Cannabis sativa
  modified_base (94)..(97): a, c, t, g, unknown or other
  modified_base (216)..(224): a, c, t, g, unknown or other
gttcactcagctatggtaatttggtattgcatctctcttatttatttatttattttttttttgaaacaagtagcatttagtttttgatattaannnnattaagttttaaaataaaataaatgaagttaatgtttttttggccctccacgtatccatatttatgagttaatagaagaagtagtaaaggtgtaagagaattgtaacattaggtatttnnnnnnnnnaaaataaacattaggtatttaaataaataaaatctgaaatattagatttttatgccacaatttactctttatttaattaggattatttataaaataagaaacaagccgtgtttcaagtgcggttatatattgtttaatgatacatattaaattttaaattttgaaatttttttaataatatgagtaactattttactaatttttttttatttagaaatgtaaaaaataaaaattattatataattttttatttaatagataaaaaataaaaatatatcttcaaatattatattgaaaaagaaaatttgaaaaactcttacgaaaaattgaggccttaaaaaagataatcaataaatctataaaaaaaaaatgatcatatatatgatctcaaaattattgtatcattatcttgtagtcagaattacgttaattcaaaattgttgtcattaccgtatctcactatgattgtcattatattctgagttattattgtcattaccgtatatcacttcaccatttataaataggttacataggtcatatttagattttattttttgacacaatattaaacgggttgtgttcagtatatatttgtaatacatgtgtcgacacgaacatgacctatgaacacaaattgccacccttttaatgagaccagactatcctcaacctatttgcatcattatttatgttggtaaaaaaagaatactttatgacaaaaaaaaaaagagaaatattttttttgaaaagttgagtttaggagaataaaaaaagttacaaacaaatatgaaatagtatgaaattattagaggtatacttatttttatttatttttatcttaattttagagatagacttaattagagagatttttaaaattcaaattataatatattttttattgctataaaataatataaaatagatgagaataaagaagaagaaaatgaagagagaaagagaaagtgaatgagaatttctcagttgttt

SEQ ID NO: 83624 - DNA, 1057 bp, Cannabis sativa
atcggtccattattattttaaaaagagtaataggcattatgtgaccatttttttaaaaatatatactatatatttttacaaattctgaattattttttgacgaatttttttaatgatatttttatgaagcaccgtgaaaattatgtgtaaagtgtaaaacaaaatatgtaaaaatgaattataaattttattggtttttatatttttctttatgcaaaaatatgattttttttttttcaaaagattattgtataggaaaattagagaagaagttaaaaaattaagaaaattaggtaaggggaaccagatagccttatggtaattagaggggtaactagttaccataaaagataattaagtatttaaatttaaaaaaaaaactacatttttacaaacttatattttaataaccataaaaatgaaaaaaaatgttaacaatccttatttttattaaaaaaaaaagagagaaaactacccattttttattttctattttaatttttatatttcttttattactttttaatttatacccgattttataagtcatttcttcattatgtgtattgaggattctaattttaatctattctgtggttatatctaataaaaaataggtttattaattaaaattattttataattatatttaattaatatgtaataaaaaaaataataattttcaacttatccttttaaaaaaacgttacttcaaatccataaaaatgttaaaacaactctagaaccatattcttgtaactcttattgccttaaaaatataaatgttaactaataaaattgtagtttttgtataattaagctgtaaaatttgaaattaatgtttaaaatgtcatacaatatacgttaatacttttctaaaattttatttgagaaagtaacaagttggtttctaaaagagattccagaaaagaaaagaaaatgtttagtatattttatattttggttttaaaactagaaattaacagttctagtgtgaagaaataatttgccaaaaacagatagacaagtaatatctgaaatataaataacaagagat

SEQ ID NO: 83625 - DNA, 891 bp, Cannabis sativa
gttaaaccaaacatcataataccatttatattacaattcttattccattacattgccattaccattcttattacattacattacatcaaaacaaacatcaccttacatctaaccatctaatatttactaccactagaatacaaacttacttcagctacaaccttaagtacaacaatacagtagtgatggtacatatccccacctaaaccaagatagaaaaattacaaaatatcctgtacttttaggtggcgtttcattgggagaaatgaaaatataagaataagaatgagaatgagaataaaatttaaaatacataaaagaaattgataaaaaaatcattaatttttttttctcatgttacattgaaatggtctttctttccgttttaaaatggaataattattccaccaaaatggtggaaaagacatttcattggaatgttttctaatactttaaaatgcaaccaaataaaaaaataaaataaaaattgtttcctttaccttccatctatatcattacctccaaccaaacctcaccgctgcatatcagccccgttattcacaccttgcagaatctacctcttcattgttccacctcaacgcggttacaagaattaccgactatgagaggtaaacttctctacctccaatccaactaaccttccacccaattaccttatgccacgtcaacaactaaagggaacccttacagcactaagtgggggacagtacagaagaaaacggaattctaaaagagaaatagtagtgaatggccctttattcttttttagtggaacttaatgtccctttttaaaaataatatagcaaatgacctttattattttttagtacctaaaatacccttagttatataagggtattattaacatta

SEQ ID NO: 83626 - DNA, 1094 bp, Cannabis sativa
cagcctggaaaatttaaggccggtgtatcgaaataaacataattcacaagcttagtatgatagaaaggaaattgtaaatttatctttatgtacattagatttaagattgatcactcgtggcagtaatttaatactatttttactttggcgatatatagggcgagtaatgagaatatttaaattttttttagagaaaattctgtatccattaataggacgaattaaattttggaaccttaaaaaatatatataaaaaaattaaaaaagagtgttatgggattcgagacattgtataatatgttatacacctcaactaactaagctatgactatttgttgtttacaatacacttaattttactttaataaaagcttaatgaattttttttatttttttattttggactcccgaaaagagtgggctctaggcacgggcctagcccgcctatgcctagatttaatataatactatgcaatacaatataatgtaatacgacataccaaataaacccaagtgttatttaagcgtttatatattacaatcatgttttacctgagactcgaacccaagacctccaagacacacacacccacctatggccacttgaactagctccaagtggttgtgatagagagaatatcgcaacactataatatttgtttttcttcctttaatattaggattatttaaccgttatgaattttgtgtccttcattaggtccatttttttggccagaaaacaaaaaggtaacggtgttcattcaacacactatgagcataccaagaaatcaacatttcacatttaatgctcatatcatcatccaagatccaatcatctatttaaagcattaattataatgaatatatctctaaagtagtaaagtttgtcattccatctctttgtgacctctcccaatatgtagaaagacaagaacaaccaataaagagaaataaatgtaatggagaattttatggatagttacatccttaccaagtaagtaccacccttactatacccaatacacaatcatcaccatatatacgatacccatttaccctaacagttacaagtgggtttattgggctcatgcaac

SEQ ID NO: 83627 - DNA, 1309 bp, Cannabis sativa
  modified_base (1211)..(1233): a, c, t, g, unknown or other
ccaaccaactcataaagaaatataagataatattgttagccaaaacttctaatctcaaatctccttctagaaattctaattaactacccattaaacaatttgaaatgtgtaacacacttgtttttatttataaaaagtttagtgagacataattgtaatttgcctttgaaatattttgttagaggcagttaataatgttgatttaaaaaggtaatgaattgaataaaattgtttgtggggctaaaaaagaagtcattaaaactcatacaatacattacaatatagaccacttttaataaattgaaatgaaattgaggccaccttttctacatttgtctctctttgtcatcaactctatttatgacacaaaatataactctgctatgcttttagcatcaataaatatggctctaaattatctcacaactggtctaagaataccactcatccactcaacataaattttaacttgttaccatgagaaaatatataacacgagccaggctttttttttaggtcattttaacaagacactaaacaatcataattgacttttatctaatttcaatttaatttgttacctcttgaattattgagattgttcaatttaaggacttttgtataattttagtaaaaaaagtctaacacggataaaagttcagggacatgatttagtatatgtcaaagtttgaaggacataatttagtagatttcaaaatctcgagagcataattttgtacataaacaatcattgaaatggtaaaattgaatgaaattaaacaaaagtcattaaatctagcaatctcaatagttcaacggccaaaaaagttcaaaagacatgatatgatacatgttaaagtttgtagggtaaaaatcctaattagccttttaataattaaataatagttaaataattaaattttatttaatatatatatatataataaaaaatatacatttttatgtaatttataatactgtagttggaattaaaaaaattaatgtattattaatttaacactaaatttaagttttaatattgttacaaactatccatcaatttgagagaactagatgagacatatttttattttaattatattataatactataatttactttattatcattattattaaattcaactatgtaataaagaaaacaaaagtgatggtaatgaccatggcttatatattattattattattannnnnnnnnnnnnnnnnnnnnnnattattattattattatgtgatacccatacaaaacaaaaaagacaaaataaattgataataattaacctctttatt

SEQ ID NO: 83628 - DNA, 614 bp, Cannabis sativa
ccatctcccggtgatgacgtcatgcgatgacggtttcggcgactgtggggtcatccagaaccatagtgctgtcttgaatgaaatcacggggtctttctcaacaaggtccgggttgttcaacaagtctaccccgatggctcttccacactgtccgtagttgaaattcctacaaatttatcgttttttttttgttcataatgttaatatcattaatttcgactaaaacatatctacgtactttctaatataacaattaacttacatgtacataagagaaatgctataaaagacactactggtacttaccacattcttacgtgttaatatgtatcatataatttaatataataattttatgaagtatcactaaccaattacaaaatgatacgaatagaatgtgttaggcaccactggcacaagtacataataaagcacttatataaagggtactactggtacttagcacattcttacgtgttaacatcatcataggtgcaattaaatatcgagttccgtataatttaatataattttttttatggagtatccttaaccaattggaaaataacacatctagaatgtactagggcaagcaattgtgtatatatatataa

SEQ ID NO: 83629 - DNA, 1340 bp, Cannabis sativa
tttttttttttttgagatgaaataaagccattagagatgaccttataatctggtttaatttataaatggcaaccaaactaccaaattaattacgtgatgttctttgtaactactacagcccattataattttcttttatttgcaaaattaaccaattttttgttacccttgtctttttttttgacgtggtgattaaaatcacacgttattaataatacaacaatttataatggtattatctctttaaattaggatagcttatcgtctaatcaaatggcatgctttgccaaaccatgcgttgtaaaatttttattgcaagccacatggaacaaaactaaccttgaaaatttagacaataaaactataacatcctcaaacacaacacccccaactcattaaaaacaccattcctttgttgatagttgttatgaaagagctaaaattttgacttgtactacagaaatactacatgaaaaaaacaaacaacaccaagaaacaacatgcactagaaaagaaaattcttgaattaaacttaatataaaaccaagctagtttttgcacaataatttgatgtttttgatgcttttttaccgattttgtgttttttatagcttttgtgccttttacggttattgtgcaatttattatgacttgtccttaattatttaagatagttttgtggtatggttattgggcaagaaaattggtcattttgtgttcatgacttatattgcaatgacttttcagttttgataaataattatatcaaatctttttaagttttatatttggattgttttatattatattatgaattgttttgtctccgttcttttacattaattaatttttattacattttgttgtaatatagttttattaatgtattgttatttaatttttgcttggtttcgtggagagtttacgattattattaagactttgccgataagtttaattttactataatcaaaattacacgtgttttgttgagtattcttagttagttgcttttagtcgaagggttttagtttggatttcgttctctttttgtagttgagttttagtttttcaattaggtgtttaaatttgattttgttacccttgttttaaattgggattttaacatctgattgtggccaaattgttagaattcagtctagatagttgaaaaataatacctacaatttggtaatttttgttaaattttattgtagttatgattaactagagtttgctacatgttttcacataagtcttggtgtattatgtttaattgagagtaatgaaaataattgattaagaatgaaaacataaactaaaacatagataataaatta

SEQ ID NO: 83630 - DNA, 844 bp, Cannabis sativa
cacaatcgggtatttcgggccgaatcgggtttggggccgaaataaaattctgggattatttattggcatcataattatatgtgaataatctgaatttttattggagaatatttatattggaaatgacactcttacccttgaatgtgtatgagagtgttatttggccgtaagggcaaagtggtcgttttgaccattgatttatctttaataaaagaaaagaattttgagcaaaagagagttgcattttctgattttcttgaccctctaacctgaaccccctctctctctctttaacttattcctaaattgaagaaattgcttgagaaatttgctttgggaagctttgatttttggtggattcttggtgcttgtgtgtgcaagggaattgaggtagtgttcctattggttttaatttagaattcttgctgcatctgaaaatgaaattgtgatcttaaagctttagttgtctttgtatgcatgaatttgatattggtgtgatcttgatatttcatacttgtttgagtaggaaaattggtgaaggatgcttatctagcattcttgatgtaatttgtgaagttctattgtatttttagttaagtcataattgtgattttttctattgttgaagttgtgatttattgataagatgttgaagcttttaatgttagattcttggtgaatcatgctcaagtgtggagctttgaattctttattgcttaatctgaatttcagggttatatttgttggattttaaggcttgaaagggtgtttttaagctccatgtatgatgattaaaatctgtttgttggtttggaggttttgattaagttttagattgaattgg

SEQ ID NO: 83631 - DNA, 941 bp, Cannabis sativa
cattgaagagaaacgtaaaagaaaaatatgcccattaaattatggaagagatataggaatacaattgaatttctagttttctatgcttctttcctatttttctctaacaaattagagaattcaaccgatctcaccaccgacgcattacccaattgagtttgctaaattcaatattccaaattaaactagttaaaaagtctcaaactttacaattttcctctactttctctcagtttcttagtgacggaacacaaattaacacctaaaaatatcaaattaccatttccaactcaacctactccccaaattaaaaaaaaaaaaaaacaactcagaatgaaaaatcaattcaaacagataagtaaatatctactcctacagataatcattgcagaaacaactggctgagaactgaaaatcatagtagaagatctggaagaacaaagactccgaagaagaaattagggcttaaagaggtaaaattggaaaaggcagatgaagcgtaagagaggactaaccttggacttgaacgagtttgaaaaagctttattgtaagtctctgatcagcaatgtagtccctatatcggagcaagtattgcacaatttacaatggaagacactactttggtaatttactcttaagagttcacacttttcttatttttaatattcattgattttctaaaagaataagattttttctcaaaatattttgacatttgaacttttcaagttattaaaattattaaattaaaccattttttttatttaatttcattcaattttattaatatgacgattgtctatatatatttatagggatatgattttgtcgtattattttactttcacaaattgtaatccgtgatgtacgacagccgtcagatgaaggagttatttaatctgacggttgagaatgatctagggataattaaggttaaaaa

SEQ ID NO: 83632 - DNA, 1004 bp, Cannabis sativa
attttagaaaatacagtgtccattttgtcatttaacaaaacagaagattcaattaataacttttataaaatacagagttcaaaatggtactactaaatagatgtgtagtattttgatattaaaactacatcacttcgatatatatatcaaactacatcatcatcaactaattaatagtaccacaaattatatcatcctcacctaattaatgataccattcatagttaccacatagcattacttaattaacccaaaaccaattattcaaaaataaataaataaaccaaaacaaaaaacaaataaacatcttgaattgaagaaacaaaaacttaatttaaagtttaaacaacattctttttttttttttttttttgaacaaaatatagaaaacattttattactttccaaatcagtatttgagtgttttttttttttattttggaaatataaaatggagaaatgggccatatatggcaagaattgaatgagttccaatttgacatttttctttactaattaaatttcatcgatatggtggagaaataattctctgttcagaccaattaaccacaacatattacatagcttttatgacttgtataaataaattgatgaaaatgttttaatatataaacatgcccaaattgtactcatgatttatgacaatggtaatggaggtgcgaggaaataaatcccaaattatccaacagctttgaattgttctcacttggataaatatctggtaaaattcacaagagcacatatcatcaaatgcctttagtgacccatctaagatattccattacagaactgaaatattacaacaaaaagcttaagagatcaagcattgtgtttcaggaatcttaaataaatatccaaatacaatgattcttttgtgagattcaatcaatcaccaggttctttttgtaccattttcacaaaaaccaccaaaaatccattgccatttatatatcaagtgatctataggtgagcaaaaatgacca

SEQ ID NO: 83633 - DNA, 575 bp, Cannabis sativa
attaaaagttgcacaaggacatgatacagaacaagaagaacaattcattttattattattgaatccttacaagaaattacagctagggaaccgactgatttattataattggaagcatgaaaagattctacagaggaactagactgagaggtggcaaggtgacactggagctccacatttggagaagaaaagtgattttgaggaagcacatagagaccatttttaaccctcccttggagcaagactgtcctcgtgactttgtccttaattaaacaacatttggaatgaaattataagaaaacgttatatccttagttagtttaagaacactaacaagatttttagtaatgtcaggaacttttaagatagaatttagcagtaaaggttttgaagaaccagacaaagaatgattaccaatacgagagatggaaagtctcttaccattaccaacaataagggattcagaacctgagtaaggatgttcacaatcaaggtgttccatgcctaacgcaacatgattggtggccccggtatccgcataccaatcaagatcaatgttgggatcgggaaggcta

SEQ ID NO: 83634 - DNA, 582 bp, Cannabis sativa
ctattctcacaaagatgataaacagagatgaataaaataaccagaaagaaacacaaaaagaatgttaccatatgcatttccaatctcatccatgtttgagatagagtagacagatattaagcaaactaccaacaggaaccaattgatgacgggtatgtagatttggcccatgaacttcctagaggtgtgaacaattttaagacgagggaaacaaccaagtgccatagattgttttacgcaagaaaatgtggctgttgtcattgctcggctggcaatcaatgcagcaacgttagcaataaagaagacaggccagaacacaccacctgcaaacagagagtatgatttcacatcatatcatatctcttttatataagcatgaatagcccaacctgtacagaatctcacaaatactgtccacatcaatggatctcagtcttcaacagagattcaaaaatgacacttacttggaattgaatggaaaaaaacttggtcagccccagtctggtttgccattaggtatgcagcttgacccaaataacccaatgaaagacaaggcaatacaagaaacacaaaagtaagctg

SEQ ID NO: 83635 - DNA, 926 bp, Cannabis sativa
taaataaagactaacaatatttgttgttaagatttatatttgatatttttatctttatcaatcattatttaataattaattttttttttcaaaataaaatattttcttgaaattaaatatttttatgaaataaactcatatttttttttataaaaaaatcttaataaaatatcttaatataaatctaatttttgtaatcatcaattactttatagtcaaatcaaatctatttatttatttctcaagactaaaagaaaaattagtcaatttatttcaatcaaacgattaaacatctattggttgtcgttgtggccaaaccaacatcacaaaattcctacctacaaccaaaaaaaaatatatatatatataaataacacattatctagaaataagaagatcttttatttattattatttttaactttgacttaactttttacttgatataatacatcaaataataccaacggtaaacatttattttactaaaaataataccaaaaaacacaaactaaaaaagactgcaaaataatgatttttaatcccaactaaaagaaaaagtagtaaaattctaaatttaggattaaaagaaaaatgctaagaaaattgtcaagcaccatatattgttattagttggtgcaatttaattttagctcttatacatttttttttataaatcacatcaaacacattatatatccaattaccaaaactctatcgtgtgattatagcttgatagtttctgagtgtacaaaacataacatttatcctattattaaaactccataaattttgatttaataaataatattaaaaattactaaccagggatatttattaggccagttctatccattaaatgtatttcatgtatatctattggtttaatttaagtttattcgatattttagacctagtatttatta

SEQ ID NO: 83636 - DNA, 1088 bp, Cannabis sativa
tgtgacacagacctgcatgttacgctcacatgcctatttatgtttatgtaacatagacctacgtgttgcgctcacacgtctaaatacaataaggccataaaacggctcatctcggttctggttaccgagtccaacctggttatgcattgaacacataaccctgaatctcaatatactcatatatctaacatggaataacatttacacgacatatatcactagggtaataaccctagtctatcaaaccactcatgttagtgtaataaccctaatctcggttaccaattactcacatatatcatttccagtataagcgccactgcacataactctacatgctaactactgtcttacttgatgtcccgcaattatagagattccaaatccccaggtgctcctgaccaaatgtcggtaatcctagtcacaattttgggatttacacaaataggattaacccttgattccacatttataaagtatagacatggcatacaaaatatagataatcacatagagctcggaacgagctttccaatgatatgtagaactcccaaaacgaagttcgaatcataaatttatgcattttctaagtttgcattcgaatctgcccagaaacacgagggcgggtcgcggcactcaaaagctattatgtggtacctggggccaatttccaggtttcaaaatgggggcgggtcgcagcatgcaaaattagtgccacggcaccttggttcaaaatccaaaaaatagcagcaagaacttcaaatttcagcccctaaactcatccaattaaacccaatttacaaccaaaacctaaaaccagcaaatagattttctactaattatacagagagtttagaatactatttcatgcattaaaatccagctataacactctcaaaactcagattcaagaagagctcaaaacttgagcataactcatcaaaaatcaatttttacaagaacttaaactcaagcctcaaacaactaattctagagctcaaaaacactagtgaaatccttttaaaaatctgtccaaacctaacccaacacaaactcaaaggatccaagatcaatcatgctcaaattaa

SEQ ID NO: 83637 - DNA, 972 bp, Cannabis sativa
  modified_base (368)..(378): a, c, t, g, unknown or other
  modified_base (821)..(830): a, c, t, g, unknown or other
ttggattggattggatcgtgcagattggattggattggctattttatgaacatccctaatacatatgtgcttccaaaaaaaaaagaaacaaaataaaaggttatttattttgtgaagtaattaagcacaatctaatgacaccatctattagtcaagccctcttggtaatctagcccaaattcatttattaacaaatttcaagaaaaatgatatgttgctagctagtaatacgataaggggtttttgtttacacctactaaattttttttattattattttttttttttattgtatgatagaatttttttcaaaaatactgtgttttttttttttgtagaaaatactatgtaagttttatactgtgtannnnnnnnnnnttttactgttgttttttagttgttctattgttattttaattgttttacggttgttttataaaaagatagtatttttgtaaaaaattctgtgtgacagtacaattataaactttaaccaaaaattcaatatttttataaatttttttattttcaatgaaaatgttcttaggcccaaaagttgtcagggtcaacccaaattagtcttcttaaaaatcagaccttttttttttaataaaatcaacatctttattaactaaccaaatcgttaaaaataatagaacgtccttcagaggaacaatcctccaactgaagcacacgacctggagagaaacaagaatctctggctaagcagtgagccagcttgtttgcagatcgtttgacaaaacacaattcaacattgtctaaatataaaagcaacgcactaaaagaccaaaagaagatgnnnnnnnnnntttactttgaatagcttgtatgcacaccaagctgtctgattttaaaattacttgtccccaaattgtgacgatcaatccaacttaatgcttctttgatgccaaccatcttagcaacttcaggttgaaccctccccaaatgacc

SEQ ID NO: 83638 - DNA, 812 bp, Cannabis sativa
aaactctgttgatgacaactcatgacaacaagcccaagctaaaagaaaatatatggtatttagacacaggctgcagcaaccatatgtgtggaagtaagttatttttttctcatttaaatgaggattatcacaccactgttagttttggtgataattctaaaataaatgttatgggaaaaggtgatatccagatcaagactaatgatggttgtgttcaagttatgtctaatgtgttttatgttcctgatcttaaaagtaatttgctaagccttggacagctttaagaaagggatatgaagttaccataaaaaaaatggtgcttgtgagatatttgatccaaaaaggggtcatgttgctcaatcgaaaatggcccataatagactctttcctttgaaaatcaatacagtccacgcttgtcacatggccaaagttagcgatccaacatggctttggcattttcggtatggtcatttaaattttaatgatttaaaaactctatatcaaaaaagcatggtgattgatcttcctcaaattattcctactaacaatgattgtgaggagtgcattattggcaagcaacatcggcagccatttctacaagggaagtcatggagagcgaaaaaagttttggagttggttcactcagacatttgtggaccaataaattcaacttctaatggaggtcaacgatacttcattaccttcaatgatgattatactagaaaaacttgggtctattttttacaggaaaaattagaagcttttattacatttaaaagcttcaaggctcatgttgaaaaggaagcagaaaa

SEQ ID NO: 83639 - DNA, 581 bp, Cannabis sativa
agattctccatcagacgctagaccaggtttgtgaacacatattccacaaactctaaaaactccctaataatctccctcttggtcgttacccaaactccttccttattcaatatactctctacatcattacgcctattacagatagtggcggtagtaaagaaaaactttaaacatttgtccccctcctttatccaagaaacatgagatctttatttccaataaagagctttctatttaagggcctcgttaagggccttccttacttctaattccttggcccaacttctagtactcgttggcatcctctggatgttcgtgggttgcttttctagttggttgatactagtatcttgcttcccaaattgttctccattccacttactcaactccaaacgagtagctccaaccttcttaaaaattctagcatgagcccaatcatgggaaactgaattccatgggtgatcaacaaccagagtactccttgggtccctagtccaccaagcttcaaacaaaaacagacattttcctcttgtcttcaagacccatatgcaaacaaacaggggcctatggtctgaattgca

SEQ ID NO: 83640 - DNA, 878 bp, Cannabis sativa
ttttttttttttttttgtaggcatatatgttttgttgtatggtatatattttttgttgtgtatatatatcatttatttaaaactacgtagaaaatcttcttgttatttattgctattcttacaattaattactattcattaattctgcaatttatttactacagaaaaagttaattatttagttagcgaaaatttacgttaataagtattgttataatttttttgtggtatataattttattactacggtacattagtttttagtgatacgatatatcaaatactattatatatatttaatgatctaatatatttatttgtttttgttacaatatatattatgcaatattaaaaaatttatctaatttaatttaattattataaaattttttaaaaaagattattatgtattaaatttatttttatagtttttattagctaatttattatatttggtcattttgctaaattttatataaaaaaaatgacatttattaacttaatttttaaatttaagatcattttgcatctcagccctaaaataaataaataaattttagtattttatataaaatgttcatattcttatctatatttttgtaccttttttcaactcaatttttttttttttttttgtactttttcaaactaatattttcaatatatgcataaatttatttatattagtttatgttaactcctattgcttaatggtaatttgattgagtctgtttgttgggctgaacaaaaagtgggattgaataattgttttaacccatcaataacatgggttataaacttataatagcccataaaactttttttagtgtgacattttctaatttgatttagtcaaaaaaaagataatttatttgata

SEQ ID NO: 83641 - DNA, 844 bp, Cannabis sativa
attttataaaaaataaatataatttttttttaaaaaaaataatttttagaaacttgccataaaaaaattattggattattaccttattaattttttttaattcatgggtaatactcattacaaagtgttcgacatatatatatatataaaaaataatccactccaaaaaaaaattacacccccgccacgggctccaagcgtccaaccagtggatatgttgtctatggtattgctcatcaacatactaagggatttggttcaacattacgcggagaggtgagatctcgccttgcacaacaacctaactttttctcattttctttaggaaaagaaaactaataaatttttgaagggggtattttcatctctatgtgattttcaatatggaacggttatatatatgttcctcaatttctatctatttccctcaatgtccacacgatcgatactcgtcgtggcacgaaaaataggttgggatgcactgagtgtaggtgtgatctgcttaacgtcattaaggacaggtacgacctacctctataaaccagattacataggaggactacgttgttgttatgatcatatgagttcaaactattccaactactcattctttcttgcctgttaagatctctgtttttaatatattgatactaggaatagtttgaactctctgatattcaatatggtagttgccaagtgaattttattatttccctcctaacgttaataaatgtaatttaattatcagttatattgtatattaaataataaataacattatgtttggataaaacaatgtattgtattaattattacgatcaaattttttaatacaatgtatttt

SEQ ID NO: 83642 - DNA, 1469 bp, Cannabis sativa
aaaaaaaaaaaaaaataaattttgatatatagatagcgcatataaacttaaatatgatatttcttaaaaaaaaagcttaaaaatatgaaaaaaaaattattttatataaagaggaatgccataaatattttaaaattgcatttctttttcttttttgaaaaataacacttaaataaaaataaaaagatctcaactttagaagctatttgttttcttttttttgtttttttgtttttttagatagtgatgtaatacttaataactttattaaggtaataaattaataaattaatgaattctatatattagaagaaattaattattttattaaaagcaataaaaaactaatttcattaacatcatactaaaaaaacataatttaaaaatgatacaaactttaaaaactagtttcatcaacaataaaaataaaattaataatttcattaaaagaagcaaacaaaatagtttcatcgacatgataataaaaaaaattataatctaaaaacgatactaactttaaaaactaatttcatcaatattaaaagaaactaattgcttcattaaaagaggcaaaaaaaaaattaattttatcaacaacatattgaaaaatacacaatgcttaataacgaaacttttaaaaacgatactaaataaaaaaaccagtttcgaacatataaattttatatcaatacctaataactaaacttctaactttattttctattttgacatttaattttatatctataacacacaatgcgtactaataatctgaaaataaaaaataagtgtaatttttgaacttagaaacaaaataataaaaaaagtaacttaaaataaaaaaaaaaaatatgcaataacatcataaaatagaacaaccccattatagaactctcaaaacatgtaaaactagtatcgaacatgtgaacccgatgaaactagtttcatccctatgaaaaatcatagtttaaaaagtacattttaaatctaaataatttttaagcataaggcctggctcatttttcaaataaataagtcaccaaagacacaagcatattctactatatgctacaggtataagcaaatatgtataagttttaaaaataaattgttgttttacagttcacggtactcatgatatgctttgacattttgacttgcttaatcaactagttaatgagttaaaataaatatcttaaaatgagaaaaatattatacactctaaaccttttggagttataattgaattcccttaaaaattttccaactttgttctagaactatcattataagaagataattagattaatatgagttagcacaataaaaatttatcttatcgcccactttacattggtttagaactctataaaagtcactgccactagatacattttgcccgttcacagatttaatgatgtcactcaataggagtcttccatagatatctattttagttggttttagtc

SEQ ID NO: 83643 - DNA, 842 bp, Cannabis sativa
  modified_base (564)..(568): a, c, t, g, unknown or other
cttctgtcattttcgagccaaactcaccattgttgataccactaatactgacaccaccaatgctgagtttgcggcgcagtgttaagagctgacagttgtacttttctgttatgttagttacacaactaactaactttctgttagtttgttgttagcttttagttatggcattgtcatgctttgttactgtaattcttgtataaatattatacaactgtaattaataatagatgagctgtttcatgatatatttcatcttcttcattcttcttttttctctcttttctctgttcttagttttctttactgttcgttcattctcaagcttcaatgtccaggagattcaactctccccacactttttagtattatatcgcaaatacatcacaaaatcatcgctaaacattagtaaatacgcaaacatttattatcttagtcaaacattgcaaaatatcgttaattatcgctaaacttcatctttaatcttaaattcgatctatcattacaaataaatcgctaaatatcgtaaaaatttggaaaactagaaaaaaaaatgcaaaaaannnnnaatccaatttttgggcaaaatcaactaaacacaaacacaaatatgtagatctgttataaacaaactatatacatatagtttgggaatcgccaaaacaaagagcaagagaatgagaagtgagtggtggtgtgtagtgtgcgatagtgagtttagatggtcttttacgagagagagagagagagagagagagagagtttgatgaagaagaaagtgatagattttgaaacaaaaaaacaccctgaaagatgaagatgaatagagagagagaataatg

SEQ ID NO: 83644 - DNA, 648 bp, Cannabis sativa
ttagaaaacacaacacatcaatggttattgtatatcaatcattattattcatactaatctaaaaaatcattattcatttccaatccccaatttaaataatctatatatgacattgaatgttctttaaaagttgatcaaaaactaggataatcaagaaagttcaagaaaacatatatttgactaattagagtataagaaaagaaatgttgtgaaatagtgaaaaaaataccaaccgtgagttaaggttcaaaaacagagctatattcgttgattattaattagcttcttctggcttattataccaaactttttgagagacttttggaactaactagaacatgctcacctaatcttaaaacaataaaatgaacaagaaaaatccagctaatagtgtttttttttttgttttttgatttttttttagtgcataatgttttcacttttagataaacatatttatgagttggatttgttttaaaaaaataaagaataaaaaaaggcaaaaattccaagaatcagtgggggcaaagaaaatagataaacagtagcaattagcttggtcggcaaatatttatgttttatttcgtaagaattaaaaaacatttataaaataaaaaaaaaaaaaacatttataaaaaaaaaaaaaaa

SEQ ID NO: 83645 - DNA, 1472 bp, Cannabis sativa
ttttgaaattaattgcatgtgcatgttttgtccttcaagtttactattcttgttctgtcttcatctatcacctcaaataggttttgatttgctggtttgacctgcattttttttgaagcaactttaatacaacaaaaaaaactctataaaaacaacttctacagtttgtgacctctaatatcaacttactgttaatcgcaatgagtgtacatagttccctatgagtttttttttctgatgatgatgtcagtcttcttgtatatttttgtgcctcttttctattattgtatgtctactcttgcatttgtgctcttaagcactccattaatgttgtgactggtgtttcccttgctgctaaatttgttgagttcagtacttcagctatgttagatgtcattgttaagtacctatcatttaaacagtttttatcatcaatataatttttattccaactaatatgcaacactaaaaaaacacaaaaataacgtttttaatattagatactgtaatacacattatccttttttaaaattaattgttattgttttaccagttgtttttttgaatgatatcttgactatttctcatggctaattttttccagttacggtcttatgcgcttatccaagttgtctagctccctcatatgaaattcgaactctatttttgtataagcttttgcggctccaaagaatggacctctgaaatgctttgcattttttttttaattttgtttccaagtttggcaagaggtggaagatgcagtagccatgtgttatttctggaaaactattcttattgctttgatgatgctttcatgtctgtcagagattaggcattgatcttctcgaacccagaatgcttcttttatttttttttgaagaaccactcccaagctttatcattctcaaaatcaacaatacagtatgcaagtggagatatttttgattctgcatcttgtgtgttggcagtgagcaacgtgcctccatacgcggcctttaggaatgtcccgtcaacaaccataattggcttgcagtttggccaacctttaataacagcatttaatacaaaaaatgcatattggaaactatcatcttcttgtttctctatgtcaattattgttcctgtaattaaagcagtcatttatcgttaacagtaatatttagcaactgttattcaactagatagcaacgcaaaaacaacatttctagttcaacaaatgtatttcaaaaaatattttccttgtacctagatttgttttttgtagcatgtacaggtaccttggtaagagattgtatgattccttagtatttccatgtagatggctttgtgctcggtctttactacgccatgctttcatgtaattcatctttattccgtatttgtctttcatttctccctttatatctgcaggactacactttgttttcatgttcaagaattttggttttacgaaatctgctattaacttt

SEQ ID NO: 83646 - DNA, 1122 bp, Cannabis sativa
caggtatagaaaactactaatttcatgctggcttttaacaaagttttagctgttacttacttctatgttcattctgattggcagtgggaagatcgagtgatgaagggaatcttccgatatgatgtgacagcttctgaaattaaggtcttttttctaaacaaattgtatttttccttaaagcttaattacatagttattagatggttatttatttttgtaaatactaatgaactgtacaggctgttgaaggcaggaaaaagtttcttgctcagttgaatgaaggatggaatctgggtcattttccaaagccaggagagaaccagactatctatcaagaggatgtatgtccatttaattccgtgaaacagcatgatgaactacttttctgtgttgcaagcagcgaacaaacaaagcctgtgttaatttcttcagctgttgtgcctgataatgcctttttgatctttataaatgtaaggatttggttttagtaacttgtgtgtgtttatgtccaatttatccgcaaactttgatcctcgctatgcaaaaaaagctctaaaattgtagcttcctatttatgcttgtatattcttttggctagccagtgatttactaatctatttgaacttttaaaggcatctccggtggaatatggccatgtcttgctggtaccatatctcaataatagtttctaccaacttctggatgcaaacatcttggaaatggctgtcagggttgctgttgaaataaataattgctgtttccggttgttttatgacttttcacctgatgcttctcatctacattttcaggtataaactcacttaatccctttagtgtttttttacatagagtagcatcgtgtaattctctttgggataactggcgggtgtacctgcgtttcaatgtttttggtgggtaatggttttgatttattgtttcatatattgccaactcatgccttcttttattcaggaagtaaaaaacaagtgttgatatttttactaatgaacctacgaattataaggccttttattttacaagtattttgtaatgttatcatggctaacttttctttggtggagtgaggagtgtgtgcattactttaatttctgttatgtttga

SEQ ID NO: 83647 - DNA, 709 bp, Cannabis sativa
aattattaaaacgtgtctttaaaaattttggaatgtaaataaaatttctcttttattttattttatcaaaaatcaaaattcaataatattgtaaatttaaaaaattacaaactcgtacaaattatataattttacaaatatacattcctatttcgttttgctagagttttctttttgataactgtttttgtagatttttgacacattgttttttatttttatttataaaatacaacttagtcgtagtatcttctttgtcatcaaaaaatgaaattaccttgatgcccaatgactgaaataagtccaggagcagaaaggtaattgggctaggttaagattaacatggtattatagaagcccaaaacctaagcctacggtttattgcatggaaagattaaaaaaaatataataaaaaaaccaattctttatatatgttttttagggaattttttggggattttttttttaaaaaaaatattttttggggaaattttatttacgctttagtttgttaattttataaggcttagtgaataaagaagaaaataaatgaattgaagaaaaatagtgcaaaatcaaagatttaattgcaatcacgtggctagcctgccaaaatttagagcattgctattaggcaccagtggtgcctagcacctttgcgacatgtcgcgttacgattagctagcgatactccctaaaaactattata

SEQ ID NO: 83648 - DNA, 1336 bp, Cannabis sativa
aattaggatcacatttgttgcattaatgcccatatgcatgtgacctgagataaaaaaaatcctcaacagcatcgcaaaaatcgctcccaaccgaattccaataaagcttatagaacagcactgacataccatcaggccctagagcttttaggctacccatagagaacagagtttgcctgatttcctcggtgttcggcacggcaaccagatccctttgctcctcgagagaaaggtggtccgggatcaggttgtttaagctctctaaaggaccatacaccgagtttttaaaaatgcttcccaaaaaatctgagaattctcttccaatgtcagctctgatactcaaccacaccccatccttatttaagattgtctcaatcacatttttcctatttctgattgtggccgtagtgaagaagaacttcgagcacttatcaccatccttgatcgaagacacccgagatcttttttgccagtaaacagctttatgtcttaaagcctcattaagagattttcaggtttccaactcctcagcccaaaacctggtcccagctgactgaccctgaataaggttcagatggcgctcaagttgagcaatgcgattgtctaatttcccaaattgattcctactccacttactaagtgccaggcgagtggcccccacctttttgaaaatccttgccggggcccatctatgggacagtgagcctcaagcactctccacaactaagtcactacgagggtctctggtccaccaggcttcaaaccgaaaaggcttccgaggtttggagtccaggtccaaagtactgatgaaaagggggaagtgatccgagttgcacgtgtggctagattgaacaaccgccttcagaaataggcccagccactgaacattggtcaacgccttgtccaaggtcgatttgacatgagcatcaccatcaagatggttatcccaggtgagacaatcgcctttgactggcatatcaattaagccagcactattgaccaactcagaaatgaagggcaaaaattaatctctcccccttgagcccatgctttcagagctctttaacacaaagttaacgtccccaaagatcaaccaaggccccccaaaattgagaccaagctccatcaaattcgtccagaatattttcttttcattgacgtaaggcagaccataaacacatgaaaaaaacaagggatgatgcgcagggtccgagtacacaagaccagagatgtgattctttgatatacagacagtttcaaactcaaaccccgcattccaagccaggaggaggccacctgtgccaccaactgtaggaacaataatattaaaataaaa

SEQ ID NO: 83649 - DNA, 516 bp, Cannabis sativa
atttggatcaaaaaacatagcataaccactagttgaacgcctatcatcaagacacctagcccaattggcatccgaataagcttcaagtgacattcgagaaactagcttgagaagaagaccttcagatattataccctgcaagtatcgtagcaagtgtttaaatgctttccaataaacaaatgtatgtgcatgaataaactaagaaaatttatttataacgaaagcaacaactggcctagtgagggtcaaatattgtaaggcacctaaggtactttgatacgaagttttgtcttcaaaacgagagcctatttgagtgaaagcttctgaggaccgctggtaggactagaacaacttctagcaccttccaaatgaattttgacaagcaaagcagcgatgtatttactttgggagagacacatgccactcgagtccctatgaattttcacactaagaaaatagtgtacctgccccaagtccttcaatatagaggagttgttcaaatcattaataagcttg

SEQ ID NO: 83650 - DNA, 2274 bp, Cannabis sativa
  modified_base (623)..(631): a, c, t, g, unknown or other
atgttaattatatgaaggaaaatgtgcaagtattagtttgttatgtacttttgttttgatatatttcaacagcacttaataatcttacaagtagattgtttggattttttttcttttttttttactgctcttatgctctataaaattctaactgaaaatatttatataaataggtgttatattacaatgcaccttcttagaaggagtttaccaatgcatttttaccggtttcgttatttgagaagatttttaagttatgttttttttatggttgtatattttaagagattcgaaaaaatttaacacatcgataacagtgtttaaacaatttgttgtaatgtcttaaataactacaatttaaacaaccatgaataaaattggactaaaaaacttttttaggtgacgaaacagataggagtgcatcgatggaccacttttaagggagtgcatggtagaatttttatttatatatatatatatatgtgtgtgtgtaagggtgcttctacaatgcacaccttagaatgagtgtactgatacacacgcatctgttttggcattcaggagaatattttattataattttttttaaagtcgtgtactatagttatttaagatattctgtnnnnnnnnnaaaaattcagaataatttacgatatagaaaatatgttcaaaccgcttattttacacgcgtataaaataaaaaatcatgtaggaaatttacgactaaatgtgcaaaattaaatcaataaaactctaaacaatcaaacgattagcaatgacaagattaacaaattaagaacaacgatcaaaggaaaaacaaagtaaataaatctagaacaataaatgcagaaaacaaaaaaattaacaccaagatatatactggtccagttcgatagattgatgtgatctatgactctacttcagttctggaacaccaccaatccttctttattgattgagtaagaataagtacaatatagtcaagacgagattctctgttgagttctcacaaagtgcttcaactctcacacttacacctaagaatcttcttcatcttcagaagattcttcttacaaaacttaaacccaatctctcttttctctgcacctctctctctacctctcaatcttttctctctcaaactctcgatctcatctctttgagttcttaatctcgtcccttctaaataacaaagtcaaggtggtatatgtaggctaaggattaagatcctaaagtcagtggctgcaagaaacgaggttgttaagttagttataacttaaccaactcatctttgagcgaagtctccacgtcagcttaagtatcagagcctccaagaacacaggtgagctctcagactcacgaacccaggacactagctgaagacgcttccagataggatatagcctgctggagttgactatcctgatctaccaatccaggagtgacaactagtcagctcgaattcctttccaaaggaggactagctatcttagagactgaactcgtagtggatatgatagtcatctgggaactctcatccggactcgactatcattctataagactccttctgggactagaaaccgcgggtgaataaatttttaaaaatgatgtttgcagagaccttttcatttggagaaactatactacaagtcacgcgtgcaacatataatttagaccttattttcagcgtgtcaaatgtttctaaatttatcaaatttaataagatgtcttatataattataatatatacaactataaaaaaaaaattgactaaaaataaataaaagtgtatgtgtattataaaaattttctaacatatgaaaaactattttgatagtattacggttaaaattgaacaaaaaaatggaaaacaaatgctattgaaattctttcaaaaaaataaatgctattgaaatcgtttatcatgccaagtcaatattaatggagttcttctctctgacgataggcccaaaaaatcttagcccacacggagtgatgttgggctttcactactttgtaaagcccaaaagtttttagagcatcataataagtcaaaaagagggagagaatagtcctaaaacaaacctcatttttcttgtggattgaacgataaaaaaaccataatttattagttataaaaaaaacacttgagtggcttgactttgtttccctcgacattctaaattttaatttagttatgcctaataagaactcattgtaattcaatgttagactagtttgccaaaaatgaaggtgccattatcatcatag

SEQ ID NO: 83651 - DNA, 1185 bp, Cannabis sativa
taaagcaaaaggtaggcacaaacttatacctaaaatttatccagaaccaatcaccttcgatttgctgcagcttcatcttccgttttaatgacttctctatatcaactcggaccggtactcgtaaatactccctccacacaccattgaaagtgttctcgtcagatttaataaagctttcgatgtagttcgcatcatccaaaatcactctttctgtcttgattcgcgactaaacatcatgcaactgaactcagatttcaagatggtgcaaacgcagcgctctcggaacatcccctgttttcagtctctcaaaaatcaaaggagcatttttaaaagtccatgggctcctgtcaataactctttgaatatatatctcacgatagaattgaaaaatatatttatttcctcccaaatccttcacatacatacccatacctggcttccaaaggactgccatcaaattttgcatagccatgaaatcaatcagattgttcgttaaaaatcgtcccactatgctccaccttgtatcaacctctgtatcatcaaccaaaggccaatcatattgaacagctggctcctcttcctcttcgagtagaatgatcgataaacgagccccaaaatcctcattgttttacgaagtctacattctgaatctttcacagaataggccaaaacaaacaatccaaaacacaaacatacgaaaaacaaataaccaagcacattcaaaggaacattctcaccatgtcataagacaagacccattcattttaaacaatgtagcttctaatgtaactaattaattattgtttttcatagactagtattgccaccactagaagatttttggaaagaatggctgtcaagcatttttctccaccaatgtgtacactcaaaaattataaactaggaaaatgttcttatgttatgagaacaaaataaaaatactaccataaaattattttatatatatatattagtggttatctttgtttttcatatttctaatgaacatatataattctaataatttttttttttaaaaaaaaagtaaaaatattatcagttatatagatcattttatatatacactactacaatatgggcctttagcttcctttttttaacccattttataaaaagggaagctaaagggtgtgaaaacagccacctgattcgaaattgacattt

SEQ ID NO: 83652 - DNA, 932 bp, Cannabis sativa
atcagcaatttttggagagagcgattcaggaacacggaagggggaaagttctggaaactgtggttgagattcaagatcggcacgaatcggctaaggaaattgagaagagtcttttggagcttcatcaggtgtttttagatatggcggttatggttgaagctcagggagatcagatggatgatattgaacatcatgtgatgaatgcttcgaattatgttaaggatgggagtaagcaattgaagagtgcgaaggagtatcagagagggagtaggaagtggatgtgtattgggattattcttctgttgcttattattcttgtgattgttgttcccattgctactagtttcagctcttcttagggttttgaagaagaagaaggagttctcaactggtttggttgagtggagaagatgaagttagggtttggaattcttttcttttctttttaagtgtttttttactgttctttttttgggttcagtttaagtttcttacttaatactctaattgtttgaatattcattttgtgaagtaatatcatatatcatatttgttgtattattattattattattattataaagaatttgatctgcaaatatttttataagatattactaactaataataacatttaatttttagttggtgttagataaaatagtgcttaacataacactagtatatcctttaacattattattactattattttttaattaagagtattttgtaaattattttttttttccacttgttagttttttcctttcctataattttaatgtgagttccagctaaaacgtttatttcacctcacctataaattccagtttgatttttttctttccttaatctccaattcgacattaaaccacaaaaaaaaagattaaatcataaaaaacaacattaactacaaaaaacgacatcat

SEQ ID NO: 83653 - DNA, 1234 bp, Cannabis sativa
gggcacaaaatatgcaaaaacataaaatttcatatatggcatatataatgcattctgaattcaaatagatctccataaaatgataaatctaaatattatgcaagtttcataattaatctctaattatctgctaatttccaaattagacaaaaaaatacgaggctatgttttttcattgtattcacaggaacacttactactgttggtaggaatgattatattacttacttggcccacacaaaaaaaaaatatgataaagacaggacaagataaagaatcttaaatcaagatataaattacattttggtttcattattgcatttgcatgtttccttcaaattaccattgagtgtcaaattaaacttgatgctcgttaaaaattttggtaataaggacatgaaaatactaatattgtaaggacaacttctagtacatgaggctgagataaagaggtggaatttgttggagtacatattcttaaacaaagcacattacattttctatataagtccctatttggttatgtttctcaaatcttttatcaaataatctggttgtagaaagtgtgaactaattttaggcagcatatatcaattatatccatgattacttcataatttgtatgacagaaatcaaaactgagctaatcatcatggcataaaataaatttatcaaataccaattataaatttccattaaaataataccaattacaaatgattttaaaatcaatcacagaagcgaccaagttaatctcaatctggtctaattaccaattcaccattacgacctactattaatcatcttttaatcacaaaatgaattcataccgatttactgacgtaaacttcgttagctttctcaatgactcgcgcagccatcctcctcaaatcactatcaacaaagggaaagacctctgtcgcgcctaatttttccatgacgaatccataagcaaacaaaaattgaactcaaaatccttgagatacatagtgttatttgaaacaggaatcatgtgtgaacaagcatcacaaacctcatattcaaccttgtgtttctcagacacctcgaggggaacgtagtactttgccagacgagtcttgccttgccgattctgtaaaagtatgaatcagatctacaaaatcagataatattcaatcagacaaatacattaccacaatatttcaattcatctcatttcaaattaagatatatgagatggtaccatcgctttaca

SEQ ID NO: 83654 - DNA, 992 bp, Cannabis sativa
  modified_base (932)..(961): a, c, t, g, unknown or other
aaaaaaaaaaaaaaaagacttttcttttctctggagctttctagcaagtatgaagtgcttctcttcttcttcgttgagtttggtccctctaatgggggatttcgtccaccctacactatttagtggtggtttgtcctactctcttcattacaactatccacatttgcttaatcctcccttctatcagtgcattaaatgttatagggattattattactccatttcacatctaataaatcttacccagagctttaattgctccaaaccctttctctcttcacctctcagtcgttttcttcatcatttccttttgtcctctcctcatttactaccgattttccaaatcttcctcagaaagcctctcttggttattgtaaattggaggcggacggctggcttcccgaaacccttcagctcttcttcatcattgtggcctccatggatgagagagtagggatgtgactagggcggttccaaggagagttcttcgtggcttctggttttttgtatatatatatccaggctcaggtattgtttttttcatccctttcctccgttaatttccctctttgctgatatctatgaagttctttatgaaaatggatgaatttctcaactctgtctctaatgctttagctcttccctctaatgaatcaactatttttacctatgatgttgggtcttctagctcctcccctgcatccattagtttacttcttaagcttcatactatttgcccttataataggcattctctcatgaaaactctttctggcatctggtcatcgcaatgtcgattcccagtcactgtgtctgagcattcagatggtatgtttcttgtcacatttggctgtgaaggggacaagggtagagttttagagggtcaaccttggcattttgcctagtgcataacctgttggaaattattttannnnnnnnnnnnnnnnnnnnnnnnnnnnnnttattaacatcctaaataagaactttctaaa

SEQ ID NO: 83655 - DNA, 1143 bp, Cannabis sativa
aaaataatttccaacatattattacttttatatttatttaataattttttaaatgatattaaattttgtatcaagatttataattatgcaatagagcataattattaaagttgatataaaagtgtcacaaaattactttttgtgtcaaatatagttcaatttttatatctctaattagagatggtctaatagtgtgttaaaaaatgatgcaaaattgggacacaataagttgtgtgtcaaatttaacacaacatttactataatgcaaaatttgtattactataaatacaatattttttatttatttttattaatttattagtatatttaaagttaacattaaattatgaattatttatatatatttattttatattttaaagttaatgataaagttatttttttttatattcttttaaacatattaataaacattgaattttgcataggttttacaattgtgtatttatgtataatatcaaaaattaatgtaaatatattaaataattatttttttaccaaataaagtataatgtttacatcttttatttgtattattaaaaaaatcataatagttcaattaaaaaaataaaaaaggaccaactaccaatttccttttctaaaaaaaggaccaactaccaaattccttaaaattaattgcccctttgattttgcaacttctttcttacaagaaaaaggggaaaccacattgatgtgcatattaattcatcacattactttgttactttttgtacacatattttgcagcaaaacacaactattatttatttttctttgaatttaagacacatttataaaagttcatatttcaggaaaattgtattttgtataaatatatctagatatatatatatcaatcatgggttatcggttacatactcttggaacattttgtgaattattaagaaaagttgatgagaaggtcctatatgtgatgctttatggatcagtccacatttttttggaacacttattttattttcaagtgtatttatagtgtatacatgagcaattgagttaggcactaagaagtactcacttttgtagaagatgaaggtgccatacaaaagctcatctgccgtctaacagatccaagcttgtgtggtgtgtacttaatttttt

SEQ ID NO: 83656 - DNA, 755 bp, Cannabis sativa
tgtggttctatcttaaaattaattagcaatgagagaattagcacattcatcttatgtatggtatttagttttaacatattatcaatgtgagactctttcatattccttttaatgtgtaagccgactctacgtactgtagatgttagagtagtggttgtcagacaaaaagtatatttcctttggtggtgtgcacactcttgtagactgacgcaagggacaaagccctgatattgtgggatttggtatcagaggatcgccacatcagctttggcttccacgacgtctcttagagtgcccctctagcattatcccaataactcatccggagggttttgattatgtcttctttcttgagcgtgatgccttcccaaaattagagaggtttagattgggatgtaagcggtctgtatttcagatggacttgcaatccatcttttcgtgtggatccagcttgttaactcaatttagcccatatttgggctttaattgactatctttgacttggatgtaccacatgtcttcctttcgaaaacatgaataacaattttatttataattttagcatctaaatatttaattttaatttttttatatgaaaatatttatcatagttttttaaaatatattaaaaaaaaaattgtccaatatttttttatctaaattaatttactttaaacaatttattttataaaataaaacatattagcatataaacaactgtttgaagttgaattttttatactacaaattatttt

SEQ ID NO: 83657 - DNA, 951 bp, Cannabis sativa
gtattttaaagagagagaaagagagaaagatagatagaatgagagagggggacgaagggttcagtatattcaaaataatatatatatattttttacatacatatatatcattatttaattaatattttatatttatatatacatttgactcggtcaaaaactgagtctttacaacaagtattgtgactaaaaagatctttagttacacttttagccatagaccttttaattacatcataagaaaaatattttataattagtcacaaagtcacaaattttgttgtgactaaaagtaagattttttgtagtgaatgtgtggaatgataaattgtttttcaatgctgggaacgaagtccttctttagactattgtccaaactcttctatgtctaagccttcgtataattggtggaaaactgtttaaaatcttaaaatgcctcttaaaattaagcattttatttagaaagcttttaatcatgcatattcttccacctgctttgaatctttttaagaaaaatattattcctaatcccttttgttctttgtgttttggcaaagttgaattggttactcatgctcccctagagttttccaaagcaaaataaattcagagggataatttgtttaaacaattttataataacaacaaaaattgtggttttaatgagtttttattaataggttttgataatcttaggaaagatgaattccttttgttttttgatattattacatgatgcatttttagccccgaacaaccattccaaaacgcattatgcggtaagaaaggtgatgcataaattagggttgggggacaaaaatatccatgttttccaaataattacacattattttggaaagaacatgctagaaaatcaaaatggcctatttgtgaggaggatcgatgggtggacaacaacaccaagggcaagaaagtaccgcataaaatgat

SEQ ID NO: 83658 - DNA, 630 bp, Cannabis sativa
aggacaccttatgaaactcaccctgagtagtgttttgatgggaatgtaccattgaagcctggaaggaatgtgatcagagcatctttgggagctactttgatctgtattgcagtaaggccaagaactatgatgtgaattgaaaaaaaaaatgaagatgagtttgtaattaaagtccatggctatgatgatgttgttgataacaagttctggacaacttgaaccaactctataaagagaagaggaagtggaaaaaaacaagagtagagaagaaattaatggcagaaagagacaaatagaaaccatattggtcaaaagggaatttaattcagtatccattgaaaaggtaaggccaggtagatcgaatcaagttatgtcaaaggacattgtccagtaacattgtttatgttacagttctcttctataaaacttttgaaaacataaataactctttcaaacgtgcaaacatttttcttccccaaaaagcaattagagacattttcttaacatgtactcactgtactactgattcaacaatcacttacataggcgtgaaaatctagacactcacacaaatagctatgttccgatagtgttgtattaattgttggacattattttaccaggatctta

SEQ ID NO: 83659 - DNA, 672 bp, Cannabis sativa
tgggatagacataaagagacctaaacctggtgtgataataatttctcaagcatcatacttactaaaagtactggatgaatttggcatgatcaaatgcaaaccagttgcgactcctcttgctcaacattttaagctgttagcaactcaatcactaagcgaagatgcagatagagccaagataagcaaagttccctatgctagttgtgttgggagtcttatgtgctccatggtatgtttaagacatgacatagctcatgctatgactgtggtaaacatgtacattttagaccttgactctgaacactaggaaatactaaaatgggcaatgaggtacctaaagggaaccttaaataatggcattgtattcagtaaggagaaccagttgaaggaagaagtaattggttacctagattcaaattttgctgaaaatttagataccagaagaagcctaacatgctatatgtttactgcttttggaggttatgtaagttgaaaatctaattttcagaaagtagtagccttgtcattaactgaagctaaacacatggctgctacagaagtcatcaaggaagccatgtggttaaaagaagtgttagactttaggtatgaggacaacatagtttattgtgacaatcaaacaaccttgcatttcatgaaaaattcaatatttca

SEQ ID NO: 83660 - DNA, 679 bp, Cannabis sativa
  modified_base (632)..(651): a, c, t, g, unknown or other
gcatggagggatcaatattttcttcttctaattcatccactggtccaaagttatttgcaggatccccaaagcgaggatctacatctatctcctcgccttgggaagacccttatccttggccaaactcgttgtttgagctcttggcgggtacgtcttcattttttgctttcgtttgagggatattgtaacattgtcaggcagactattggtctccccttaagcacccgaaaccatgttagtcaaaaaaacataatgcatatgtgcttaattgaagtgactacttttaggtcatacagggttggttaccctatcatgacattgaatgtagatcccatatcaataataataaattgggtcatgtctgtcttctgtgcgggactttcaccgattatcaatggaaatcaaatgtaccctagaggagccaatcctttgctctagaacctgtacatgaactgtgtacaggatgttagatctttcaaatgaagcttcatattctcgtacacagtcttgaagatgatgttggaagaggctccatcatccgtcatgtagcgtgctaccgttatattccctatttaagtggttatgaccataaggtcattatgagagaatcttactgttgggttttatgcccnnnnnnnnnnnnnnnnnnnnataatcagatttacttattaatgtagat

SEQ ID NO: 83661 - DNA, 1132 bp, Cannabis sativa
actaccaaattaatactttatggtggttgggtagattttgacaaatttatactagaaataacaaaattatccaatttggatgagaaattgaaaaaattatttatatttataattccaaatattatagatatattttattttaaaaatattttgtataacatttcattctaagtaactaatgaaaaatttactactctaaatatttaattctaattaaaaataaaattaaatctattttttgaaggcttaggttttcttaaaaagaaaatgttaattctttatttttgacaaagtttaaaattttattaattgttatagcaatacaatagtaaaattttcttgatcaaaatattgtttaaaaattataaaagtttatattaatttttcataaatttaaatttaaaaccttaaaaccaataaaaatatgtcacaaatttgcaaatagaaatgaagttgagagagtattgccacaaaaaaaaagtaaatgattaagtgtataaaaattaaaatataagagaattttatcgccatttactcttataaataaatatattttgtgttgtgattgggtactgaggttcaaaccccgattaaatgattacatgtatagtatatttattatttagttagtgatgtagtttagggtaataatagtttctatttaatgaaatttttgaaaactaaattaataaaaaattaagctaagaaaatatgattttgaaataaagaagacaaagatatttatgtagttgaggtgttaatgagtcttagtcgacgagtcaatattattgaagctttttgactatggagtattttacacaaacgttcttgccaaatttatgtggattttctaacaaaattcgtaacctttgcatggaagggtaaagccttaattataggttgaaatcgggttttttttggtaaacccgaacccattagggttttatacatgaaataagttcactaatagggtaaaatacaatataacatggactttgaacctggtgggggatgcagatgcccaattgagggatgttgtcctcaaaagtgagtgttttaatatttatactcgcaagtgcacgaatcgtttcggaatatagtgttcatgtaagtgcaaggtcgaacccatggg

SEQ ID NO: 83662 - DNA, 746 bp, Cannabis sativa
cttatcatagtgggaggatttcaatgaatctattttattattatttggatgatactagtgatgacttacaatgatatgttcaagaaatgaactttaagataaagctaaagaaagttaatgtaaccattcacatggaaagttataatttatcaaatttatgaggataattaataattaataagactttgctgttagttggctaaatttcgagtcaagaatacatatggtgtgggcatatggtacaatgatagtcacaatcaaactctttcgctgcttagctgatttagtactataaaactaatatgacgacgatgacgaaaaaggaactaagggcttaatggggtttctcttaaaatctaaagagagagaaagagagatagagatggatttttttttttaattggaagggggtagaatgggtatattagaataaatagaaatgctaaagggcatcagtggtgtctagcacccttctatgaattaatattgctattgctccaactaagtatcgggtcccatatagtttaatataatagcttttaggaagtatcgctaaccaattgtaacgtgacatgtcgagaaagtgttaagcaccactggtgtctaatagcaatactctaaaataaactaaggataaatttgcatcgaattatttgagattttttttagatatgggtaaagatataagcatattcaatgaaatttttcattatagaagaaattaaggttataatttagttaaaaga

SEQ ID NO: 83663 - DNA, 545 bp, Cannabis sativa
aaaagggaaacttttttggttttttttttttttttttttttttttggtttttgtaaagtttacaaagatctctagttttttttagagaatagatttaaaaaaatgagaaaaatacattttatggtaattagtcaccttattatatttttttttttcatatatatattttttaaaatttttataattaattattattattttatttaattttttttgtctttttaatttttccaataaaataactgtcttaaaagaaaaaaaaaaatctcaatttttgttataaaaacccataaaatgacataagaaaaagtcatctatagctaggcccactttttgcttatgcaccaactactcatatgaagtatataggcccaaaatgggtaactgatttgccaagcccaaataaaagatatatgtgtaatttacaaaataatataaaaaaagaataattataacgcactattttcggtaagaaaattacatttttacagttaatagaatttttttttttttttacatttttacagtttttcgtaaaaacaaca

SEQ ID NO: 83664 - DNA, 764 bp, Cannabis sativa
ctggggtaagctcctagagagcatcatcggttattcagtttagttattcattattatatgattgattcacctagttaaagctatatttaaaaaagaaatatctgttcatgttcttcactcctttcctgatgactcatttcctttcactcattttagggtatgtttattggcagaatattaaaaatttggggtcagattttgttaaaagtgttacaggagattctagtgagtaaatacactagtgtgcccaataagtatatggatcattatctctcagtaaaaaaggattttcagattaaaaaaacaaaataaaaaaggattgaaatattttgcttcgtgggcgatagagattttttggatttcatctttaagtaatctcatctttctataattattttagatgtatttgaaactataattaattatttttctcaatgacatttatttgtgtatgtagaagttttgtaaagccatttgaagaatcgtttcataatgataacaagtaaactcaaatgtacaatgacgcaacaagaaaaagaaaacaacactgatgcttgcaaataaaataaaaaagaaaatcggttgacaagagagaacaaacaaaaatcttcaaaaaaaaaaaaaaagaatgaattgaatcaaatcacatgttcttctctctctaaagttttaactttatttaaattttttaatctatatatctaaataaaggaaagcataagagcattgatgtggcatcttttccttccatttctctattttct

SEQ ID NO: 83665 - DNA, 854 bp, Cannabis sativa
gactttaaatggtgtttttgtagtagtgtactgtgacaataaattagtccaacacatagttggcaatctactttttcataaaagaaccaagcacatagagataaattgtcacttggtaagagaaaaggttcaagaagaaattataaagacaattcatgtagctttaaaagaaaaacttgttgatattctaactaaacctcttttcattactcaggtcaagtatttcaaggataattaaaagatatatatctatatatataggctattttgaggtggggtatcaagttattagattaaaagttagttggttggttaatagtttagagtgagctttcttaaaattagttaatgtgtcttgtaactaactctgagctaatataagtagatgtattctattgtaatcaaaacgattattcctttaatatacaatacaaatttctttcttttttttttaagtttctttactattttgttattggtactttattaatttattctattttaattactgtttagtaaatatctcaccaataaattactaccatctattaattttgaaaatgatttttgttttgtttaaaataaaaaattaacacgtggtcaatctatgtagtttaattcaactttatatagttttataagatcgtttctaactatatatatgtatagttatattagatcgttgcgtatagtactcttagaaattttgagtcctttcctataatttattatacactacgttgaccttgaagtttttttgacatagatatatatatatcttctttaaatatatgtagtacaacatttaatattacaacttgttctcaagcaaaaaacattaatgtacaattgca

SEQ ID NO: 83666 - DNA, 885 bp, Cannabis sativa
ctttgattcctaaagctttagcaaggaccgattctactaagttattagcaagaaaagttcgagcctcaataagcatgtcgttggaatctcgggccacaagaccgaggccatgactttggcctccatcaaacaatgccgcattcacattatggtggtgtccaattctcgctcccatcactcgtctggaaaaatagaccatgatgtatctgtgtcagattttatagcattcttcaattgattaaggtactttttagcaacaacaacgtcatctggattaaatcctttaatcctccaaataaagtcgtttcaggcaccccaaatagcccaacacaccgctgccaatatacatttcggatcagaacttacagtttgaaaaatactggtacaccagtctaagaaagacacaccaggtgttgaagctatgctgattctcactcagctccaacaagtttggaccattcgacaagtgactaagcaatggagagtagttttttcaaatttaaggcaaatcagacaaagaatactcacatccaccctcttggtacgaagttgaaccatcatttggagatagccagagcatgcacgccatgacaaattagatattttttgggggtaatttcaagatccaaaatttactccaaaaggactaatcattatcatcataccattaccaatctgttgttacagcaaagaataagcgttcttgactgtgtaaagactagacacttcatttggccaaaacaaataattagtaattgtcgtgacttgcaaaagaatgctcttaatgaaacgttggtctctttctttaaatatgtcaccaatgagctcttcatcccaactagaaccacataaagacattatacttgcaacagaagcactgagaag

SEQ ID NO: 83667 - DNA, 979 bp, Cannabis sativa
tcgtgtgactgtatttttgtaaaaattaatctaaattctaatatttttgtaagtttccatatatatatatatatttacatataacaatataaatatttccacacactatctaacatcatatgtgatctaattggataatattgttccattctcattaaattgaatgatttatacacacgaatgattatccacaaatgactccacctttcattttactttgctttctttatttatttatttaatttcactaaagtaaaatggtggtagaatcattcatttactaagcttttgaaccgtgtatttattctaaataagcttgattattgtcatttttcgtaacttatgtgggttgtccaattacaaatacgtaatttttctcaattgaagtcatatagctaatttatactcgttttcaagttgattatagtttctttcctttttttcaactatgatgtgttgtttattgcaattaatgttatttgcagcattttttttttctcgttagcctgtaactcttcttcttactttatgttgttttggcgaaatataccttttaattcgttctttataatttctttgaaaaaaatagtcattttgataattaatgttggtttacactatatatgctcatcgaatcattttatcaaaatggtactcttcattttactctatcttttgaactgttgtacttaaattgtaccaccatctaaccgacagaaactgtgttgctgaatccagtaacagagcttcaaccactcagattcaaagatttgcccttttccaatttcacagactcagacaagtacatcttcagcaataatatggaacaccgcaaaatgtcttgaacaaccacagttagcactaggagtgtcaatgggccgggttggatctggtccgactatgatccgacctgatccagatcatgtaaggatctgccccgtcctgccctgctagatcagatactcagatcggatcagat

SEQ ID NO: 83668 - DNA, 1014 bp, Cannabis sativa
gctaaaccaattccttaaacctcaacttgaaaagtctctaatttttggtagaaaaaatcttatttcccttggttcttggtgtgaccgaccctagaagagagagaagcttgggacttttctagtttttgatttattttttggctaagtgtcaattaagagataaacaaaatgaagttttctatgtaaaggtaactaattggtttcttttcaacactatttgtaactaagaagttacttttaaaatgcaaggaaaaaaaaaacgaaaaaacgtcaaaaacgttagaaaatgtcaaatttagctaacgtggtatgccttctcaggtgtttgttctctatacgagatttttgattttaccaaatcggaagctatagcgcagttttctcatgtagtaatgttattattgtaaattagatgaaaaaatgtatattattgtaaactttcgaaaaataataatctcaggcttattggtatctttggacttttaaagaaaatgggctgtgatctctatcgtaataccacaacgagtcctgaatattgatattgcattatagactataaatcttcatgtagcaagccaattacagttttcctataaaactgcaaaaatgtgagctaggtcgaaaataattggttaacttcaccaatgacatttaaattgtttaatcaataaaacaaatttaaccaaattaattttttcttaaaacaataagttgaaataataaatgcaaaatgaaacaagtttttctagtttctacataaagaaaagagcaaataaagattttgaaaaaatagcaactaaattatgatattgttaaaataagcaaggcaaataagttaaaaactactctttttaattacatattaattaaatataattttaaaataattttaattaataaatactctttattataatcaaagtagtaaatataacttcatataacttattaaaattagagtttctaatacaggatgaggataagacttaaaaaactaagtataaattaaagagt

SEQ ID NO: 83669 - DNA, 1205 bp, Cannabis sativa
ccaataattttaaatgcaaccaaagaaaggaattgaatgaaaattattttatttccattccattccattttattacatccaaccaaacgttacctaaaagtttaatctagtatgctaaatatgccaacattaatttattgtgttaagtctccatgtataattaaacactaacttgtataaagtgctatgtgatctaagccactaaggctagcttagtggtgagggaggaatgggaaaaaagaaaaagaatttaagacctttaagttattaagctattaattgattgtaactatttttacactatactaataagaagaaaaaaaaaggtgctatgtgatctacttggttttgcctattttgatttattttttttcttcaatagtttttcatctcatttcacgaatcaagatctccggttaaaaaattgtgtcccatactatgttaaatcaatcaaagtttgacacgtcaattaattttttatttataaaaaaattaaacctctaataaagtcaacaaaattagtcaacatatttaatataaattagattaattgatgtgtcaaactttcataagtttaacacaatataaaacaccaatttttaacactgatcttgattcctcgtgtcactaggcatatcgctaggcactatataaattataaaggtatgttttccatctcattcaacacattactattggatttaaactattcctagtatgatttttttttatactgtatactgctagccatgactgctattgacatagtctccaatcttgggtgggaaaaaattctaaagaagctatctatacaaaagtgcattgatgaaatatgtatggccgaaattttagggaaaaagttggacaatagaccaatgggagatcttttatacgacttattccaagtggaaaggctttagcattcgaagagatgacatgagtagagacattaatctttggttgtatcaatgggtttgttcgaaagaagggtagcgagttgtactactacaaaatcacgtttttgtatcggttttaatgtcgacaaaatttcaaaacctatgcaattaaagagcttgtgaattttgtgacagtgcagggttagcgtcagttttaaaactatttgcgtcagttcataaccgacgtaacaacccattaaaaagaagaagaagaattaattatacgggctttcgcccatttaaaaaaaa

SEQ ID NO: 83670 - DNA, 1630 bp, Cannabis sativa
cttttgattccggatatttattcggtacgtaatggtaaaaatatctctccttctacaaatcaaaatgatcatctcgaaaaatagatcgtattgatactactcttgagctcaaatgactagtagcgtagttaaaatcattttttaattactttcttataatttattttaaaatacaatttagttacttttatttattaaataacaaaataaatttttagtaatccatgaaatgtggttggtatatttaattttttagtagaatttgtttttttttagttactataaaatattttttaataacttataaagttttttttttttgaaaagcaaacgtataaagttgattgattatagctaagtttttacttttgcttatagctaaaagtaaaagataagtataaggtttgccttttttttaccgtttggataactattatatgaaggtattgttttaatgaaaagtgttttaaaatgtttggatatcattaaaaaaaaatcttttgtgagtaaattaagaattatgtaaattattttaatttttaaaataacttcttaaaagttcttttgggagaagctacaaatcttagcttcttccaaaagaactttgtttaagttaaaaaatgaattacttgctaactaaatataaaagaaactaaaatgttatttttagttttagttatttttcagtgatggttgaaaaatatatgcttaccaattaccatatatcaaaatgatcactttaaagtatagattacagttgtataactcttgatactaaataattaccggttaattaaaaatgttttttttttttaaaaaattaggataaagataaatataaataatttttaatattaaaaatatattatagatgtagaaaaagaaaaagatgacatggaaatagtgaaagagacaaaaaaaaaaaaaagatcaagaaaaaagtttcaacacctcttaattaataactacaaagaaaaaacaaggacaaaacaaaactttcatccatgtatataaaaacaagagagaagggattggtatatacgtcggccaaataaattcacaaacattcgctaataaaatcattattgttatacttgtaataaattttaaatctccactctctgaagtaattttctctataaacaaattaagtttgaagtaattttctctataaacaaattaagtttgtgcttatggcctacctagtttaggggcttttttttttttcaaaattaaatgtttttttttactaattttgaaagtattattattttttttgtaaataagggtctaaaaatatttttttttctatgatccattatatttcaaggcggatctcagagacaaccatgggaggaactttcatcaaatatttttttttgtaaaatataaaatcgtatatatcaatattccttacatattatgccaaacctcaaaaacaaaataaatttatattccttacctttttctagaaatcttctcgcataaaaacgatatgttatccccttcaaaaataaaaataaaaataaaaaaaagtgatgttgttcatcttcaatttattcgtattattttgatgttgtattaagttatattatattaaattttgtaatttttttatatagtaatatat

SEQ ID NO: 83671 - DNA, 689 bp, Cannabis sativa
tattatactacttgttgcttacaaattagactcactgtcgttggctaaaagcgaggtcaacacttagcaaggagcttgagatgaaggatttagatgctactaaaaaaattcttgggatagaaatccaaagagatggacagaagagaaaactatttttatctcaggaagagtacctcaagaaggtattaaataggtttggaatgtcaaatgttaaacatattgtcactcccttatctcaatagttcaaattgagtaaaaaccaagcacctaaaagtcataatgaatagaagtacatggagagtataccatatgaaaatgcaatttttcccttaatgtatgcaatggcctgtactcggcctgatatagcatatgcaatcagattggtgagtagatttatggcagatcttggaaaggctcattggcaaacactaaagtggattctaaggtacattagatggtcacatggaaggtgtctagtttatggtggaggtgaaggaagagatagacatgctgaaattgaagcatttgtagattcagactatgcagattgcctagatactagaaaatcactcaaggtgttaattccatttttggcatatttaattgacaaacatattttattatttcctattaatttcggctggtatgtgtttaatatggtttcctattttgtgtattcaaacttagaa

SEQ ID NO: 83672 - DNA, 1747 bp, Cannabis sativa
ttttctgactcatgcaatgcaatatatataaatgtatatgacatatccagaagaataggtagtctcatcagtagtagtaacaggcatggtctgttaattaattaattattatggcagcactttcatcagccaccggagacgacgatggccggcgagtggggtcgacgagcagcaggcgaagctggcagtccggaggtagtttccgagaggtttggacggcggctcccgacgtgttcagccgcaacgaggcggcagaagaggaggaggagaagttacggtgggccgcgatacagaggataccaacgtttgagaggatgaggaaaggtgtgatgaaacaggttctcgaggatggaaatattgttcatagcgaaattgatttcaccaaacttggtggtttggagaagaagcatattctcgacactgtgcttaagattgttgaagaagataatgagaaatttctaaagagacttagagaaagaactgacaggtctctatttacattctttttttttttaaattttttgaaagaccaatatatttttgtttattttactttcaatttttttttttatattattattattatttttgtagagctggaattgagattcccaaaatcgaaattcggtatgaaaatttgaatattgaaggagatgtgtatattggaagcagagcacttcctactctgctttattctaccttaaacactctagaggtatataaatattttatttatgtattaattttagaagtttttttatttttattattatttttaattagatttactaatttatatgatttgtttgattatgtgtgtgctttttttttttttctttttttgtttgagagtgcagagtattcttggatctattgggctatttccatcaaagaagacaaaaattcagatacttaaaaatgtcagtggaagagtcaagccttccaggtatgggtgtaaacgtatgttaattaaataataataacaaatatcataacaatatgaaaaaagtcataatttctttaattttatcaattgagaactttgttgttttctaggatgacactacttctaggccctccagggtcagggaaaacgaccttattgttggctctagcaggaaagcttgatctagatttaagggtatgttttgatcatttttaatttttgttataataatgttagttaataataagaattgctaatgagctgagttgttattatatatataattataatcaggtatctggaaaagtgacatactgtggccatgaaatgaatgagtttattcctcaaagaacatgtgcttacattagtcaacatgatcttcactatggagagatgacagtaagagagaccttagatttctcaggaagatgtttaggtgttgggacaaagtatgaaacgttagtagaactctcaagaagagagaaagaagctggaattaaaccagaccctgagattgatgcattcatgaaggccactgccatatcaggccaaaaaactagtttggttacagattatgttctcaaggttatatatatataaatatatatctcaaatactttatgcatatccatatgcaccactaccattatgcacacttttcatgcactatattgataatttgtaaatttttacatacgcctacataaattatgactccaaattttaatgggttaatttcacaaatgcataaaaattaaaaaaaaataacaaaaatacggttttacggaattttaaacattt

SEQ ID NO: 83673 - DNA, 1422 bp, Cannabis sativa
actttcctataataaaatggttaatttataaaggtgagataaaaataataaaagtaaaattcatataaaattattaaattaaaaaataatttttaaacagaataacataaaaggaacttaatgagaaaaataacacatatagtagggtaatttaatactaacatatattacccgaaatcatgggtctataataactcgaaattaaaagagcaaattttaccttaatgtcgctataattttccttaactcattgtaattagtggactatttcctatcatcacgaaaaacaagtttctcttctccaaaaaaaaaaaatcggacgaaagtcgatgcaatatggcaaaaaatatattcataacaataaaaaatcaaacaacatcgatcaaaacaaagaagtctccaacaaaataaaaaccataatccaatatgcacactaataacaattgatataagaattgaagttcgtgtcttatagatatttagattataatgacaaaatgaagcaatcccaaaaacttgaagaagtacaattacatacaaaccaagcaaaattatatggaggcatcaagattttaatttaaaacgaaaaacagaaatttgcaccaagcaaaactccaacaaaattctaatctaaataatatgattaagagtaaatgtatattattatgattccaaggcttggcctttggcatttttctctctactctttttgatacaagccacgattaggataataatttaataataacaaaaataataattaaaagcaaaatacttacgataactcttgagactccctggtccatatcttttcttgttgttgtgatgacctccattgccattagaagccataacagttgtttggatcatggaaatggcgatgaaagccaagatcatgaaggccagaaacttaggcatggccatttcatcggagaaacaggaagaattctgttttaatttgtttttcttgactgtcttggtatcatcgactgtggatgagatttgagagtgagaaagattgaggtgtttttattgtggactgatgtatactcaatgtggtaggaaaagtattttaaaaaaaaatgtggtaggaaaagttaatttttcgtcggattaaatagacaacagttaaatacataagaaaacatctacatgacgaatcatacaagcgattgatttgtaaagctttggaataaaaactaaatttctttcatgctaaaatatcttatccacgaccacaaatagagctttgaaagaacttttacacacgtcgatcaacaaatagagatattggaaaccatacatcaatctaagatattggaagggactgattggaataaataatcagtcccttccaatacttctgaggtaagagttatgtccgaaatactttaaaatacttaagatataacggtaagttta

SEQ ID NO: 83674 - DNA, 936 bp, Cannabis sativa
attccatcttaaagttaatacttgtagtatgtaagttcaagattgtgtgccataatgttgaatacaatcaattaacacgttttcgaggtagaatttgttagcagacatttgagaatatacagaagtagttagccataatctatgttatgttatggtatgtttataggtgagtggagatgaaatcagtgaagcagatcaggcatgacatggaatccacttgttggagttggagggattgtgcggcaggcccatggctgctctgctctgctaatttgaatttgattggtttaacattaaaaacagatagtgacatgaatcactcaccataaccaatatatgcaagttcctttggcatacaaatacaaagatctatgttgctatttgagtaggggacctccattataacatttcatacattcctatacctcaggaaatttatgaatcacaagtttttttttattattattatttttttaagattccctatgacggaaaagcaatcttgcagatagacgcaagcgacaaacacaggggagcaattctactggaagaagacgatcgtggcaaacgcaaggtgtgcggttacaaagattctcaactgcactaccattccactcttaaagaaatactagcggtaaaaatggccatcacaaaattcaagttccacctcattggacacaattttctagtggaaacagattttttcccatttcaagggatgctcacgttaaaaaagaacaaagcagtcaatgctcaactgctaaggttagccatgtggttctcgcgctacacgttcgaaatcaaactcatcaaaagaaaaacaaatgtgatttctgatttccaggcaaacctattataaatatgatcaactcacacaccaacaatccaatcccactgatctacatagccaacttatcgcttatcatccctacattt

SEQ ID NO: 83675 - DNA, 674 bp, Cannabis sativa
tatgaaaaaaaattagactaaatttttttctagatgccgaaataagttaagggtgcatcaatacaatctttttaagagtgcattgtagaatcacctaatagtgtatactgtgttttatcaccatatatttagactttgtctttcctatatttatatatctgtttcaaaaaaattaagagggatatgatatatcatatttttttaaaaaaaaaagtataaaaaattaactaaatgtcaattttggctgctcccaaaaaaaaaatgtaaaaggaaaaggtattttgaaatatatatatgtgtgtatatagaaaagtgtgtatgtataagtaccaactttggtagtgaagatatctgatatgaattgaattctgaattggaaataataataaaaattgtaacttataatgtaaatcaaactatgttgaatttattcggtttgcgtgggtagttgtgttgtggtgtggtcatatattatattatttggttcttttcacacatacctattatcatatataaatcttggctagtaatttactctaactaaaacactacaacaaatgtcacttttaccagtatagtttgctactgcgttgctaaaagtaacttttattagcgcatttcgcaaactgcactggcaaagagattaaagttttaccagcgtacatttgcagtgg

SEQ ID NO: 83676 - DNA, 731 bp, Cannabis sativa
aatctacagtagacttgttaaaagcatcactcaatcgggtgaacttaaatcagaacttcaaaataggaatgaatgaatgatgatttagttgagagctcatatattgggctacagtcttaaaaactctgactcgtccatactccataatttaaatgatagtctacatgtttgcaaaaagtattgggagaaaataaaaatcagactttgaattaatatttcctttaatttttcctaattccttctgcaaggataatgacatcgtaaccttacgaccaggacactttgtcactagcctcctaaaaagtagtgatattttcaaaataaaacctaagaacgaatacataattttaagttaaattaaagaatatgtcataataatgtttagttatcatgtatagttatttatgagagataacatatagacttaaaaggtgagaaaaagaaaaacaagacaaatattcattaatgctcttgtatgccttattcaacatattttagtttccacagaatcaagataaaaataataatgagaatcaagataaaaaaaaaaataatgaaaagggaaatgctaaaaggcattagtggaattcatagaaaagcaccataacaatttatggtttacggaattcaccagaaaaattattccacaaacagaatatttaccaaataacaattactagcatatgtactcattttctcgctttaaaattagtagctcaaatttgtgttac

SEQ ID NO: 83677 - DNA, 729 bp, Cannabis sativa
attatatcacgtttatctttgagcctcaggaattcacgaataatccattttaacgaattagggatcaacgccatcttgtcttccgtgaacaaataatttctcttaattttatttattgttttgttttatttacttttctctaatatttttattaaacaaatagaaatagaaaatatttaattgattattagtaattgataatccattctgtgataataatattctattttatcatattattacttaatttaatttaataattatttttgtaaccgtaccaattgaattaaatcggatacttaattaattaattctaaggaaaaataaggtcaaaactataaatagtataaacgcgtccttagctgttaattatacaccaaatataagaatatatatagttgttgcacttcaccactcccaaatatttattttattttatttctcttttgtttgttgaagaaagtcgtagtcgaatctttaatattgatgaattagattataatctgttttgttaatgagtaaataatgtataattgataattaatagagttactatagcatttaaaaaaaaatagattactagtaactctactaaaatattttccagtgtcattatatatacatatatttaaatagaacaattgcaaaataatggagaaactatcctacatgcatgtgatctgataaatttataggctttaaataatatctgtcgttcgaattcataag

SEQ ID NO: 83678 - DNA, 738 bp, Cannabis sativa
ctctctctctctctcattttgatatgcttaagcatatatcttttcctgcatcgtttctctattatggaaattgaaatatttttttcctcttaattatattgtaaaattgtgataagttcttctaaacccatttggaaatttattatctgctcataaattttctatttctttatacatacacaagtcacctgtataagttgttaatggattttgttcagtactttctacaaatgagaaaccccacaaatattcttgtaagtatatagtgaagaagatagaaattcatgctctatttccacttctttagattaaaacttaagcaaggcaaggttagttcttaagctttcctgtctttatgtaagaagaggataaggtgtgttaagagttctagtatcatgtgtgtgcccatgaaattctatcttcaatttatgttcttgtttagctattaaattatgttaaacattttgtatggtgggtgttatttataggaagtttagatatcttcacttgctgaatgcctggtgctaaggaaaaggattgaaataatagaacaatatggagtgttgatggagcaattgaggttttaataattatattcatatgcttcttgtagaggattttaagcaaaaggctaattatatctctggcaatggagtttatacccattgggacaatcttggctgtgctaacaaaccaggtggccaaaacatctagtgctgctaaggatgttgtttttga

SEQ ID NO: 83679 - DNA, 683 bp, Cannabis sativa
tatatatataaatatatatccatatatatctccttttctaattcctaaccctaaactcagcaaccaacctctctctctctctcactctcactagctctcactccatttctatcaagtaaaacacagcagcccattctattaggtaatctttcggatctcccttctgtttcatttttttaatgtgtatttattgtatttttcatttgatttgagtttattattgttgttgattttttttctatatctttaatatatatatatatatgtatatatctattttgattgtacgaagaaatgatatctgcataagtcagtttagttttgtataggttattttatatatagtatttgtgtgcatgtgtttgtattcttcttttaaaatcgagaaagtttgagtttttgtgggttaatcttagttgggatttggtgtgtttggcaagaaagtttgtgggtttggttttaaaatcaaggttgttttaattctttctgggtaagagtgatttgttgttcaaagaaagaaaaccctaatcactaaaggacttgtcttttttactctttgaccacattttgtactattgtattaattttgtgtcggaataaaagctgcaaattttttaaaattccaaaaatatctatacattgtatatatatgtttgctaggaataatttttaaacaatttttg

SEQ ID NO: 83680 - DNA, 1135 bp, Cannabis sativa
atcatcaatcatcaatataaatactagctctctctttagaaagaagcactctctacttcctgatgttctcaatgggtgatgcaaatggtgaagacaggatttctaaacttcctgatccagtgattcttcacatgatgtcgtttcttcccactcaagatgtggttagaacatgtgttctttcaaagcgttggaaactcatttggtattcagtccccacactcgctttctctgagtttgatgataacgaatggaatcccgaacagttttgcaattttctaaacaaatatttggagcaccgcgagagaggtatgtattttcttgtagattcagtcataactagtttcaagcttgaggctgagattcctcatgatgatgaaactaagaatgacatcatagataaatggttagattttgtagttaagaataaggtaaaggaaatatatcttaccatacatcctgaagatgagtgttactcctcctcaattcaaatatggtttacttcaacatatttgactgttttggagttgtatgggattgggataatgttcgatacttcttgttcatttagttttccatcattaaaatctttgtcattgacacacatttgccctctatataatttggaggatcatgatatggtgtttatgtttttgttgagttgtccttctcttgagaaattgtatttaagtgatttttatttcatcggtacggatgatcagctccgactgcaaagtttaagccttaagttcttggaattgaggaagatagatattaataatacattacaagttgaagccataaatcttgaatctttggtcttacataatattataaacataaatttctcttcatgcaaaagaattagaaatctcacattatctaattacatagaattagataaacagccatctttggaatatcttattttcaaaaatcctctactggagaatttgactttcagaaactccagttcatcttcggactaccatcttagaatttcgagtcagcacttgaaaagtttcacttttggtagatttagtcatcgtgggggaatgatccatgtggaaattgaatcagctccaagacttgaatactttagttatagaggtggtttcaatttcagcatatcaatgaa

SEQ ID NO: 83681 - DNA, 500 bp, Cannabis sativa
aatttttcttctccaaatcatataatcacttgtaccatcaaacctatctatgtcaatcttgacattgctcatcttatcattattaaaatcaaataaggactgagttatagagttagagttatctgaaggatcattcaaaggaatatccttaaattcttctatgttgtatcctagatctagtatgacaactttctccagatcttccttgtgtcttgatcactttgttcttaagtcaacgaacttccaatcttgaagtttccagctctaataccactgttagaattttgatttaaatccctacataactcaaacaaagcaattagacacacaaatggcatgtcgaactttgaccttaacttcgcatggactcaaaattttcacgcacacacaatcatttattatttatttttcttttttctttatttcttgaattatatttaatatgacaaattccttcacttttgttttgatcaggaacaaaattagggcaccattcttgc

SEQ ID NO: 83682 - DNA, 1628 bp, Cannabis sativa
cttgatggacgtcgtcattatcacgatgggtagctatcaggtcagccttagcaaggtttcttccagtagagatataggccaccatttcaaagaaatcctcaacaacctgcccaacaaccgagtgatagcagaggatttaacattcaagcagatctattgctccaatttatgatagaaactagatcctctattaaaactctagagattcaagtgggacatttggctgcttaaatggccaaccgtactcaaggtaattttcctagtagtatagaggttaacctaaaagagcagtgttaagcaatttccttaagaagtggaaaagaatatgaggcgacaagggctgagcaacaagtggttgaagagaagcatgatcgacaggcacatgttgaagtggataacaagcaagcggaagagtgggttatgatgacctaccgggtattgaagctacaccgcctataaacattgtgcactatataaaaattccctatcctcaaaggctctgtaagaataaattagacaagcagtttttgtaatttcttaaaatattcaagaaactgcacatcaacattccatttacagagtccttagaacaaattccaacttacttgaaattcatgaaagacatattctatccaagtaaaagaagctggaagaatttaagatagtggaacttactgaggagtgtagggcaatcctgcaaaagaaactaccacccaagcttaaagatctaggtagtttcaatagtccatgctcgatagagggtttggtggaaacaaaacctctatgtgatctgggagaaagtatcaacttgatgcctttgttagtatttaaaagactaagattgggagaagccaagcccatgatagtgactctacaactgacagatcgtgctttaactcatcctcgtgggataatcaaagatgtactggtgaaggttggtaagtttatcttccttgctgatttttttatacttgacatggaggaagatgagaatattcccatcattttgggaagactattcttggccatggcgagagctttaattcatgtgcaaaagggagagttaaagttgtgtgtttaaaaggaagaagtgacttccaatgtatttgtcgcaactgaaattcctacctattgtcgagtggaagttgtaaaggatagtcgagaagtaactactaacaagaagaaagggaagtccaaagaacgattttgaactttttgatgacgtttgaaaagactgagttgtgggaattatgaaggtgactgtcatttacggaaagctttgaaattagcgacattgaaggaaatttttcgtcgtttggtacaagggctatggatgcaagaggtacactttaccctagttgaattttgtaagaggaaactagcatccggctatatgacgttaacgatagcgctcctgggaggcaccccatgtaagttctcttctttactctttagtgtcacattgaggacaatgtaccatttaagtttggggtgaacttaaaattttttagttttaattttagttatttgttgtgttttttgtgttatgagtcaattttctaaatgtgagtcaatgtggaattaggtagatagcatggtttgaaaattttatttatttttcgaaaaat

SEQ ID NO: 83683 - DNA, 1413 bp, Cannabis sativa
attgtcagcctccagctgctcggtcgaaggcatatcttgcagctctttggtcagctccttaaccttggcattggcagcaagaagtttcttatttacctccccaaactcattcctcacttccccaagctggctctgcgtgtccttagattcctttttggccaaatccacctccctcagcagtgtgttggtggtggcaaggttcttggcagcagcttatttggctcaggaataggcataagccatcttcacattgacctggacgaaaaatgtgtcaaagtctgagctacataaaagagaatgaaataaagaagaaagagatttacccgagtagcttccttcaaaactcctcctaggaccagttccaaggacagctcactatccgcttaggactgctgatcactcacttcaggaagtgaccggttcaagtaatattggaacatgtttttgcccctcttggcctccgtgcacagttccacggttgttgaaggggtcctagcttgttcggatccgtccgagctccttcctctagaactcttagatttcaagaccttctggattggaaggtccaccatgggttgctcctcgaaaaggttaatgacctcatcaacgggctccttctccttggatggagtctcaccgcccttagacttcttagtcggaggatacatgcccgagctgtggcctagatcatattctgagacatttctgcgcagacaaaacaacacagttagaagcagacataacatatgtgaaagcataaaaatcatacaagtaaatgcaacttaaagtaccctgcatgcgggcaggggcattttcccaaacaataacagatggagcatcatcatcttaagagtcttcttgctccactaggacgacttttccttttccttctacagggattgatggccgagcaggcataccaaattccctaatcttgatagcatgttctaattgcgcttgctcggttggggatctttcttcttgttcttgctcgacctctcctgctctgaatattcttgagcatactatttggccccgacacctccctccaacttagtctcacacttgagttgaatgagctctttctcctgctcgacatcctcagctcggttcggcttggactttttcttcttctccttcacgggctttggcacaaaatcctttgggtagagctagtacttcacaaagttggcctcagtggtcagcaaaatgacattccgagcatcctctggaagttggagaattttttgtgccctctccctgagtcccaaagtgaaaggaggtcaacagtacgaaggaatctgttgtaaccgagtatggacggtctccatgtccgtcacgaagtagtactcatccacaaaatgccttattatgctgacttcagggtctacaatacccttcagccatttctcg

SEQ ID NO: 83684 - DNA, 596 bp, Cannabis sativa
acctaaaaagatttgatacatgtcaaagttcggagggtaaaattcctaattagtcaaaaagttttgaaagaaaaaaaaaaattcaaccattgaatccaaatatattaaattttatcaaaaggaaaacaaatctagacaaactgaactcttagcttaattacacattaacaattattactcagattcaaatggtttcccaccatattcaatccaacggtacgacaaaagtctcccatttgtgtgttttaatgtacaatgcctcgacaataatgctagaatggtgaaactagacaacataaattttttttcttacttttaaattttaatattaataatttttttttcaaatctatatgtataaaataaagaatacatctttcgtgtaatttgtagagttttggttagaatgaattagtgctaaattacttgtgcattaattcattctatctattttatttgattcaaaagttagtttaaaaaaatgaggattgatcgattgtatataacaagaaactatggtattcttttttttaatagaagatcaaatccaaacggctcttactattttattgtataaggcctcaccctcactaaac

SEQ ID NO: 83685 - DNA, 1114 bp, Cannabis sativa
  modified_base (589)..(590): a, c, t, g, unknown or other
caacggttttcttttgtctaactttaagactaaacgattttatgattatgtaagttatattgtttttataattttagaaaattttgaatagtttattatactgaaaataagatttaaatattgtattgtacatgttactgtgtttttttaagacgtgtgataaacattcatttaaactttatattcgacatgataaaattattcagaattttttaaaaatttataagtgatcctaaataactacaacgcacgtgatcataaaaaaaataagactaaaaaatactcataaatactaaaacagataagaatgtatcgaaacatcaatttaaaagagtgtaccacatatttttctattactttttacttcttttatcttttatcaagagtcaatatataaattaactaaggtttctatgagttgttgctttttaaaaagagtaaatgcaattatagatcttgtgttttgtaaaaattattagttggactctctcttttgttaaatgacaaaatagaccctgtaatttccaaactagtaaaaataggactctaaacttaatttttgacaaatattttttaatataaccaactnnaagacaattcctaacacgaacagatatagaaaatgtaaacaatttgttataacacttttaaatcggattattattaaattttattttgacaaaaaatcagtccataatcctatttgtaccattttgaaaaatacaaagtctattttgtcatttaacaaaacatagagtccaattagtaacttttataaagtacaagatctaaaatagtatttacccatttaaaaaagagtctagcctctaattctccccttagataacatggtcttcatttcatttagagagcttttggagaatttgtagtgacatgtttggtgtaatggtaatgaaataacatggtcttcatttcatttagagagcttttggagaatttgtagtgacatgtttggtgtaatggtaatgaaatgatcctgacaattctattgtttaatttgattttcacacttctattatcaaaagaaattacaccactcattctcaacatcattctaaaactaaattaaacatcaaaataacattcttaatta

SEQ ID NO: 83686 - DNA, 665 bp, Cannabis sativa
taaacaacattaaccttatgctagattctcaggagtctgtgtcttcaaacttgatggtgattcgagagaatgtatttgcagatgatgaatctgagatggaaaatgcttttaagagagctatgccttggctgggagatgactttggcatgaaggatacttcgagcacaatttttcctggcttgagtttagtgcaatggatgaacatgcagcaaaataatcagctttctgctgggcagtctggattttttccatcgatggtttcttcagctggcatgcaaaataacctcagtactgatgatccatccaagttacttagttttcaagcccctgtcatgtctggggccattaccccattgagtaaggcaactccatcaaaccaaatgcagcagtcaccagtttcatggccacagcagcaacagcaacagcaacagcaacaacagcagcagcagcaacaactacaacaacaacaacaacagcaacagcaacaacagcagcaattgcatcaattattacagactcctgctaaccaacagcagccaaattactcccagcagcagctacagcagttattacagactcctccaaaccaacagctgcagaatcacgcacaacaccagcagttgccgcagcagcggcagcagcatcaagaacctccacagcattaa

SEQ ID NO: 83687 - DNA, 1236 bp, Cannabis sativa
  modified_base (1016)..(1017): a, c, t, g, unknown or other
ctctctctctctctctctccaaccgaaagaccaccaaaaattgtcaatgactctcaccaatccacagatgaccgttgaatggagcttaccatccataaaccgtcgtcccgacccaacctgattggattggacccattacccacgacagagcccttttgaacaaatcaatgtcaaaggtaagtttttgaatcttgttttaattttgttgtatttttggttgatagggtttatatgttcattgatttagggtagaaatttgttgtatatgtgttgatctatggtacgtgatttaaggttagagttgggtgtgatttatgttcttgaaagaaatttggttcttaagctagatccgttgcaggtccaatgtaggtctgatgcttgtccaatatgtgtttgttaaaaactggatagaggttgaagatgaatgctcgataggggcatgatggttgtacgataaaggtctgatagtcccttattagtgaaattaattacaactttagaagcacgatagagtacgatgcaagtacgatatgggtatgatggttctcagttgaaaatgatattttaggttgaagaaactagttcgatatatggtccgatgtgagacgatagtggttatgatagagttttattttttatttttttgttggtatgacttggtacaatagggcacggagttgtgtttgatagtcttattttctttaatttattaggtacgatgcaagtctgatgttggtccgatagttttggcaagttttattaattgatcattgagtctttctcggatgggggtacgatattggtatgatgcttgcccgatacctttatacaaaatgtctaacttgcattttgttgtattttttctatagaatataagacctccaaagcttttagttcctatttcaaaccattacacatgacattacttggcacggtggcagtttactattcgaagataaaacaaagatttaatgactacaaatcaatagaaagagtgaaggaatcccctttcaaanntgagagagagagagagaaattcaatttctcgggtgtactaatccatcagatgttcttggacaagaacaaatctgaaaagcttgatgaagtccacttttacattgtgaagaagaaatgtagattcagtcgagccgagtttgctttggtgactgggttgaacttgttactgttgagattttatgccctaaataaaatacatttcaatataattttatttgc

SEQ ID NO: 83688 - DNA, 717 bp, Cannabis sativa
tatttctcagattttttttgttattccttcattctcagattcgaaaatgaaaaaatgagaagagcatgacaatgaaagtggtttcttagagagaaatactttttttgctattacaggtatgaatttctcttgtattttattttgattttaggatttttgtttgagaaaatttcttctgagcttttattagttttttggatttaatctttcaaattagttttgagtttgatatctcaaagccaagcatgatcttacaatcgagacttgggctcaccagaaagccctcgaacgccttgagatggagcatgtgggtcttgatgcttctaggtcgtttgaatgagactgaaatgtaattcaggcatggtgattttggatcgcttttttttttttgggtttgatgtctaggttcaatgggattttgggtttggattttttggggctgagaaaagtggctgttgctatacttatgttatttggatttctagcatttagtgaaatccaaataacataagtatatttcgtatactatattatcggtgtgtatatagtatcaatggctgaaaaataagcaattcactaaaatgtaaataaaatattaacatcataaatagtacaatgatcatataaatataaataataatataaggaaaggtcctttctgcaccagcccatattttcaatgacctattcctattactatctgggttttgagtgtat

SEQ ID NO: 83689 - DNA, 633 bp, Cannabis sativa
atatatatatatgaaattatctcatttttaaaacataaatagaaaaatcgatattttaataagggatttaaccatggttttaagttaatgattagataatttcttttctcgattttaatttgagtaaaaatttaggaattatattccttgttgaatcggaggaactcaaattcacacttgaattcaatgaactacttagcttgaattctttataattaggtatcctatgatgagtaggcctagcaaaatttcttaattttacaataaaaaaaaatatgaggaactctagtttgagcacatatatgaagattttttttttctagacttgttactattactaaatttttataaaaaaaattttagttttgtgtcatattatttagttttgatttttgtattcttcaactgatcctcatgttgtagtaaattaggatctttattagagaaattgctaatttgctgtccaattttcttatagcatatccaatttatgtgttcgtcaaacaacttataatcgcacataaattatcatataataaactagtttgagtcccaggcttatgtattgtgtaatatataaacgcttgaatcaaaaaaaaaactagtttaattgggataattttcatcttctct

SEQ ID NO: 83690 - DNA, 833 bp, Cannabis sativa
tatatatataaaatatgtaaagaaacatcttcaaatagttatcatcatgtattttatcaccactataaatatgtaggtttgatatgttattttctattatggattggatgctagttgtgttctttattcacatttctagaaaaatgtgggccataacctatgtcactttctctaaaaatatcaatggaatgttttgtaaggcaagctccaataaaatattaaaatatcaagtttattacgttttcacactaaattttcatttcaattacactttaaaagttatcctaaatataacgtttctctcactactaatattagtgtgatactataaactacactaaatccttttttattaatttttaatatttaaataatatatttgtaattaaacttttttgtatatatattattatttattattgttcatatataatttaataaaataatataattttaatatttatgattattagaggtaccctaacaagcaatgaaaaggtaagcaaagtgtgtgattgaggcagtgatggtggacagttttggaattgattggcaggcattaatgaatgcattgcattgagtattgaaaaagcaagtgaaaacaatgttagtatgtgttgtcacccaatctattcagtattcagaaccattttttctttttttttttgttttttagcaaacaaatttacaagtcacggagattataactgtgacaaacgcaagtgaagtgagtggggggctcatccaacagtgacccacgcaagtgggacttctgaacattcacaatgctaactgccaaccctctcctatattccttatatatatatatatat

SEQ ID NO: 83691 - DNA, 599 bp, Cannabis sativa
agaatttcaactaaatgattaagacactctcaaattacacactaattaatctcaacagcacaattaaaagtatttatagtccctacgtaatgatataaatgtaatatttatatgcatcactgtgtgtaagaagtgtgtgttatttgagtgtgtatctagcatactgctacaaaaagttatattttcgtcgcttttaaactgacatttatacttatgttgttagttcatgtaaccaacatatcaacggtagacgcaaaaaagtacttttttgtgtcggttctaaactatcggtatagaaatatagtgtcaatttaaaaccgacaagaattaagtaaaaaattaaattttatactattgatgtcggttgataacaaacacaccaaagaaaaaattatttataacattaattttatccaaattcaaaataacaacaccaccaccaaactctcgccgcaccaccacaaaccccattgcaacccttacctcaccaccaccatataccatagcacaacctaaacaaaaaagccaaaatcagagaaaaagagagagatcgaaagagggaaagagagaaagagaaagagaaacagagagagagagag

SEQ ID NO: 83692 - DNA, 555 bp, Cannabis sativa
  modified_base (37)..(43): a, c, t, g, unknown or other
attgtaacattaagtatttttgcctccaaaaataaannnnnnntatttaagtgtataaaatctgaaatattaggtatttatgccgcaatttacccttatttctatattatttgtattattagtgggcaagaaccctagcactataaatataagaaaatatattcatgcagagggttagaatctcaattcttgagtgcttaggtaaaatctagggttccaacacttgtgtaagtcatgacttttctaatcttatagcaatattaactcgtggactaagattcattaacgctccaaccacggaaaaactctgatttcattcttcattgattatttttctttagctttattatattctattggtttctaaaaatcttagtaaataataaatattggtaaaaataaataataaaaaagagtaaatcaaaatataattgtttttttttttggctcaaaaataattgtgtatatttatttagaaaatatatttttttattactaagtattaacaatggagaagagaaataagtatattaaaattgaataaaataaaacaaa

SEQ ID NO: 83693 - DNA, 664 bp, Cannabis sativa
tatgaatatttttctttttaaaatgccatgtataattaaacaatttcaaattacactgttttaattttttttcaattttcagatctaaatctgagtgtgttttttgttaagaaatggtgatatatattcaaggatatttctatcttccttcctctatctcgtcacctcatcttttcctcaatggaatattcagaggatcttttccgttagcataaggattccctttattctttttgctttaaccaacttgccacgtgttggccttgtattgatcagtatgtgtattgtaatgattgacccttgattataaatgaatgagaattttactcagcattatgagctgagatttatcaaataaccaatttgtgagatttttttttttttttctagtttttaaaaaattaaaatactgtgagtttaggtgtgtttaactctgttgttgggaaagaatctgctataaatgttgttgttcattcttgattagtcgttgatttaataattttttctcttcgtcgtattttatggtttgttcccggtgtttctacgatttcggtgttgatttgtccatccccaactaggaaggaggtgtcgtttgtgtcttgttggtgttcacagtataaaagtaaacatattgagcctggacaatataaaagaaaaaaaaaaa

SEQ ID NO: 83694 - DNA, 1418 bp, Cannabis sativa
aagtggtatttttcaacttacccgaaaaaaaaagagtttctctcaagtgggccgaaggcagttccatgttcatgtacgtttccctggatgagttaagtgggccaaattatatactggcccaattgtttcttacaaatgtgtatctcttatactctctatactattgtctgctcgtttctagatttatcaacctccaattcaaaccaatcccacccatccaactaattttaattatccaaaactgaatcttgaattagatcagaatctttatttaagaataatttatttaaaaataatttctaatttaatataaaaaaaaattaaatctcaatttcagttgtataaataagaataacttttaaattttaattagaaatatattttctaagttactattatgaatatttataacttttcaattacaacataattggtccaaaatatatttcttttttgaataaaagtccaaaatatattcttaaatagatgctctactgtatatttattggattagttcaaattaatctaatattttaggcttgatagttttttggatcggattagatccattcatgttttaatctaatatttgttggattggattagatccatcaaaccaaaaaaaagagtaaaattttaattctaaattccatatacatatacatattttaagtatataataacattaaatttagttatttatctaaaattatataaaaatattaattagttcaattgaatattagatttttacaaaaatacaattagatattcaaaaacaacattcgattcaatttgatcataactagattagacattaattttgatggtgagtattattgaatcgatagttgtagttgaattatttatgcacacccttaagtgaatcactcatattattatcataacttccaaagcactgtttttttttatcttattttatttattgtattattttttatttttttctcttgaacagaaagaagggaaaggaaaaaaaaaatagagaaacgcttgaaaatactaaaaccaaacaaataaaaactcgtaaatttaatgtggttttttcttcaaattgtttgggaaagtattatctgtaacttcaatgtgtccttatgtgtttatcttttttcaaaattggctgggaaagtatctatgtataaatttttatctttattaggacatccaattcgaataaaaggatgatgagcaagaatattcgatttgaagataaacaaaagtgagtagttcgtactaagggggtgtacgcggtacgagtggtgcggttttttattattttttcaaactaatccgcacctgtgatttttctaatttcccaaactacacccgcaccgcaaaactaaaaaattgcaaaaactgcaccgcaaaaaatagtgcagtgcggtttatgcggtttg

SEQ ID NO: 83695 - DNA, 972 bp, Cannabis sativa
tattgttgttttctttgaatttatcattttggggaacagagggctgggcatgaggaagttgccattggggacgactggaaatatttttatagttagtttatactaactatgctgtgtttacttgtccttgtttctaactagttacatcatatgtcatctactttgtaggttcgccataatttaagtccattctggcctacacttgcaaaggaactaccaaagaaattaactgatcaaaaagcacatctgattccggtagcttctcttctccttttctctttccagacagatatatacatgcttgtctgagttctgagaaggttaaatttgtaaaagttgtctcttatttgtgaaagcttatatactttgcctcttagtcctcttattatactatattagtaggttttgctagataattgtgttctggtcttcaagcactgagaatattcctttagcgtgtttaaattggccattctcacacaagattctcggatctataaattgtatacatttttagaccccaactagggatcctcaattcaatagccaaagcaacgagagaaatttggaaatacaagtcaacgaaaaatagtgaattgagagaattgttgtataactgaacaaactgataagaacatactagaaccacaaggcattcgagagatcccaactctcctaagagcaatagctacattacaatatttcccatgatcccctcattctttctactctcctatataatttactttattcctgctcattctctaccttttactacaatgacccttttacccctctacttccaatatgccatcatcagtctatcattaactgttggtttattgttggttcactatcactatatttagagaaagtttgatgcatgtatctctttaaaatacaagtttcattggattcaaagcatgaactgtaaattagaaaaattcaaagtagatgaacataaagtaatac

SEQ ID NO: 83696 - DNA, 795 bp, Cannabis sativa
aataactcaggcagtccatccttcctcggagctttgagcgggtgtatttggccaatagcagcttttacatgttcctttgtgaaatcttcaaggagtaggttgttatcttggaaggaaaggcgacaaggaacactctggttgaggatatcctccatggtgagagaaggtcttgaagaggtgaaaaggttcgagtaataattagccagaatttcttccatttcgctgcccgatgtacagcatctcatttgctcatcaaacaaaccttttatagtattcttcttctttcgttgagaggccttgtgatgaaaatatttagtgttacgatccccgtgcgcaagccatagagctctactccgttgtttccatagtatttcctccttatattcggctacattaagttccttctcaatccttcgcttgttttcccagtctatctctccatccgaagaggatattttttttaaatcctctttgatcagtttcttagtttttgctcccaactcagtttttttatccttattccattcattaagcttctctccacactggttaagtctcctccgaagtccaatagccgagccccaatatgaaacatctagccaagtcgaatcaactatcttgctgcactccttatcctctgcccaagcctgctcatagtggaatcgggatctccatttaaattccttgttggagtgttgctgatctttgttgatgttaatcatgagaggtctatggtctgagttccaccacgagagtaactttggaggcccaaattttgttgaaccaatccggatt

SEQ ID NO: 83697 - DNA, 789 bp, Cannabis sativa
gtgtaattaattagtgattttaacccaaagtacaactaaacacaagggcgtaaacattggaattccatgtaacaatttttttttcctttttgaaatgaaggaaaatgtaacaattttgatttaggtcaaatttcatctttttttctaattaataatttttttttgatcaagtctaattaataattttgtaattatgagttgaaattaaagatgaggtgggaccacgtgaatgcaacgtggtacggtggtacgacctccgagtacatttaatttaaccgaccaattatatttattattatttaaaaaggattggcttataattcaatccaatgcatttagtatcacttcataaatactttgccccattcatataacaccacgtgtccatcattatatgatgtctctgttgactttttaatatattattacattcaaattttaaatcaaatatctaaaatttaataattaattgtataaataatcatagcaccacggtctattattttaaggttagttttccattagataaacaaataaatacaaagcaaacaaggattaaaaagaaagtaaagaattattttatactaactcatcatctaatcttagacctagagcaatcttattaagttccctaagaacataagaaacacaaagcccaagattcaagaacaatgagtttttaatacatctcaaaatatcacttaagacattatgttccaacagttattaaaagtggtagcaacctctatcatttgatgcatacaaacaaacctattaagcattcatata

SEQ ID NO: 83698 - DNA, 773 bp, Cannabis sativa
aaaatctaatgcagatttacctgaaaagagagtggatatcggcagttgtcaggtaacctctaccctgaagatcaagacatctgaacaaatacgttaatccttctggtgtgtccttattctccaatgcgaggacaaagtccaaaaagcattcaaagttcatctcccttgtctttcccccaccacttttgccacggcgaacatgttcatcaaacactattggaagcgtatttaacagtattaacaaacatacttggattcatatgccaagaaaaaaaaaatgtagttcttgggattgtcacatgagacaaagaagcctcctaagttcatcaatagaattacttaaaacactttatctgtaattgtatacctctttctatgaaaatttcagtcagtgttccatctgcgtattcttgaagctcctgcttgctcaatgtttggctcctatctttatcaagggcaagaaaaatgtctgcagacaggaaggatgggaggactattcatagttccatacaaactctatgatagcagaataaagctacttgagagtaaaacaaaagcgtctaacttgaagtcatgaaaaatgcaacaaaaagtgctgtgaaattatatgtgaagtgtacccaccacagattcgctgagcagatgtcaaagagaaccagttttcagcttgttcagtatcagtgatttcttcttcactttcctataattaggacaaaaacagttcagttcaatgtaccataaaaggatgctacttggtaagttacaagcaccat

SEQ ID NO: 83699 - DNA, 1071 bp, Cannabis sativa
tcatgacagccatttggatcgaaacaatagtgttggtcaattacgattggattttgaacgtcgtagaatgttagattgcgaaactcaacgtgttgaacaatcccttttccaacctatttaatgaccaaatttcacaattacacatattagtacatagattatagtaaatttagacttaaaatatttagtacaatatatacctggtatgttttaatacggacaccattggatgtgccaaagaacttaactcgatgcacttttatgttgcttacattggctacgcttccatctttgcccaaacttccaatactgtataaattatattatgacattatctaagttcaaattactttaaattacaattcataaattttaataattgggaaaaaaattcctaaccttacgccatgaccagggccacaaattaagttgataatcgaaatatgagaagactgatcaccaattgacacacaatcatcacctgattcatgaattcatatatatttattaagagaataattaaattaattatataatgaaggccctaatttactcatatatatatatataccagatttgataacagagtggtgaattgagacattagtggaagcttgaatgtgaaggccatcagtgttgggactattagcaggagaatttacagacaagtagttcaattcaatactatcactattccacacaagtatatgagtttgtggactgttaaccaccaataatcgtaccactttaactcttgtacaatgtaagaataccactgtctgcacccaccaacatatacattacacaaaaataaatactatgtctagtcaagatatagttaaattggaccattttaccaaaaaaaatattaagcaaaatcatataaagtgtttgattattaccgttggcattctgccgaagcagccctgtcaaatcaaaagaaaataaaattaggagtacataataacataattggctagtagtaactaacaaagtcatgcaccctcgagtgagaccaacattcccgaattaggccccatatagtgggccaggggcggacccacatagagg

SEQ ID NO: 83700 - DNA, 810 bp, Cannabis sativa
  modified_base (206)..(209): a, c, t, g, unknown or other
ctcactcactcactctgctcttcttttggactgaagcattagcatagcctctctctctctcccgtcaacggtcgtctcctcaactacaactccagatcatctcctttcccattatttacacattaataggtatttctaaaatctattcccagtagtatatatatttatttgtaaaatctgctatggatatatatatatatatttannnntatatatatatatataatatgtgtctctattttgattttcctgtccttttatcttgggtaggagccgtttcatatttgctctgcagtatagctgaggaccggatacttgtatcctctgtataactgaaagaaaggaagaatgtgagtatatctaatttctattttttatttgttacattagtagcagaattgtctcgttttcgtgttgtgattagataatcctgaacacgtttatgaaaaatcctgtaaaattgattatgaatgtatggtgtttgagcccaatttttgtaatatatggtgtgctttttagtgtgtactttggtctttgttcatattttcctgaaaaaatgagaaaaaaaaaatagcacaataattgctaattttttgtgtgggtgggattacataggtcaaggatatgtgtgaagaatttgccaaaatatgcggcagaggatcgtctccgggaattcttttctaagaaaggagaagttacagatgcaaagctcatgcacaccaagtatttggctttattttttcagacaattttcttcttttaattggttatgaattgttgcctaacttacaagtttcttcagggatggca

SEQ ID NO: 83701 - DNA, 1128 bp, Cannabis sativa
  modified_base (607)..(610): a, c, t, g, unknown or other
caaatcaacaaaagataaagtcaagctatctgtttccaacatgactctatcccacgaatgagttacaatccaacttaatatttttttaatgtctattatctcagcaattttcgggttgaacacatccaatatttcatgaatgcttctaccatagcaccatgcatgatgattctgagctacacaacccatgccaaaagacaagactcgaaccagaaaaaactaaaaggaaaagactaaaaaatcatgtcaaaagacaagattaatgcgaaaactaaaaagaaaaaactaaagaaccatgtcaaaagacaagactaatgagaaaaactaaatcagtttcaacacaaaaatacgatcacaacattttcccatcaatataatttttaaaagttcactcaaacaaagtctgttactattagcatgacacatttgtcatttaattgtataataataaggattttttctgtttttacacttttaaatatttttattttgtattttacgaaattttatatagaaactcctattgcaactaacgctgcaataaaaaattgtatagaaactcttattgcaactagcactgtaactcatataataataataataatannnntaataataataataataattcgttatcctcttttgcaaattgatattattgttttgttattttatattaaagacagtgctacaatagtattggaaaggaattaatcgagtcatttgacctaattgaaagtatgggtacttgttgttggcagctttttgcaataagtttttaaacttttgtgttccattatttgaagcaaatgcacgaatatgttccccacgaaataaatcaataataatattgaaggttaatattattttagacacactaacaaaaaataattttagtcatgttttttagtcctgatatatattttaggattatatataatttttagtcacaataaaaataatatataatacaaattgtcgctaatttaattttagtcaaaacaagaattgtgattaaaaatatatttacacctaattgtgatttttatgattaatatttttaaccatggatagtttaattataatataagaatggtgatttataattaagttacaactttttcactt

SEQ ID NO: 83702 - DNA, 969 bp, Cannabis sativa
agagagagagagagagaatgtgtgatgaagagaaactcgattgggcttgtcaggattcaaaggggcttggcagaagcaagggttcgacggaggaaggcgactctccacccattttgatttagctccaccactctccaccaactgagaatctcttctttgtccacctactatatttttcaagtattagtatgtattatattaagaaatttacataatatacctaaaaatagaattcttttacatttttataaacttttttttatttacattttttttttcaatttttcagttatttttatattgtcataacgtcatactatatttcgcaatgtgaaaacgtgtaaacaacgatttgtttagaacaacgtataaacaacggtctgtaaggaaaaaaatgtgtaaaagtatatatcaaaaaactcaaaattccttaaaaaaaatgtaaatttttagttatttttagataattctgaaataatctctattatatacatatatatttccatttagatattatctcatattattaataatgttttttttttgtttttatttttctttttgttcactctctatatcgaccacaacaactctttcatgaaggttctaaataaaataggcatcgttcaaagaagagatttagactggatatcattatctgttgttaagaaaattttctttatttattgttattctctatctcttttatttatatatatatatataaataaattctataaatttgtgttataaagtaggaaaattaatttttgtgagcttatgtttaatttgttgaatgaatttttcagattgtatttgttatattgatgttgatatttaaaaaaatcaaatttatttaatgagtaaattacaacataaccctcaatactttcacttttctagcaatttaatccccaaaatttaaattttgatggaaaaaatcccaaaaattgtgttctcttaacagtt

SEQ ID NO: 83703 - DNA, 837 bp, Cannabis sativa
agcattagaatagtgaagggtgattagacaaatgcgagaaaatgctataatgtcttggtcaaatcaatattcaccatccaagaagaaaatcaagaatgtcccagaacacccatccggccagcactaggggtaatttaggaagaagatgaattgggccctagagtgggggtagaaataataattgagcatggaggaggtagaagaagtctgcatcaatgaagaagatcctaccaaagttattaaagtaggaagaaatttacctcttgccactaaagaaaaaaactatccatgtcaaaaaaataattatgatgtattagcgtggaaccattctgacatgactaggattaggccccacgtgatctaccatgctctgaacattgacaaaaaattaaatctggtttgttagaagagaagaacattgaatcttgtctgatcaaaaacagtgaaggtttcacaaaagaaacctaggaatggggatcctcgaacttaactaggaagggtcatacaaaatacaacataaaatatatgatggaacgtaccatcttaaaagactagacgtatctaatgtttcacaagcgtgaaaagtgaactacctatgccgatattatctgatactatcaataaagcttgcaatagaaatgtgatctaactctaaattatatatgtgaccacattatagtttatataatttaaagtgagtgttgtcattgaatgtatgtagtatacatacagttgtagaaaatatatgagaaaccaaacagtgacagaaatttgcatcttaatgcactttttgaacaattttttgcagtaagcccttatatttattcatttatcttt

SEQ ID NO: 83704 - DNA, 539 bp, Cannabis sativa
gatatcaatgagacttgtgtactcgtgtatctcgattcttgagtcttacccttcttcacggactctgattcggtcccttcaaactctttttacttcttgagtgggtcacattggactctggagcttccgctttttggtgaatttgtttaggggcggcactgtattcgatttgtgtagctccgtacccgaagaaactagcctgtatagctggctgtacggaagtacttggttcatatgttgtgggagtagtaaaagtagttggtggaggataaatggagggagttaccacttgcaaaggttgtgcatgagctgcttcggcggaaggggtaggaagtactccatatgcttgggcgtaagcgtcttctaggtttataaacccctgagcttgtactaagaattcacatagtgtctgcctttttacgctatagatctccccacagcagggatcgggttgcaagtcctaatgtcggagccaccattttcatatcatcagtgacttttattttagcagttgacagctgaagtttccttatttataa

SEQ ID NO: 83705 - DNA, 527 bp, Cannabis sativa
tttttttttttttctatatatatacaaaaaataagttatttttatttcagggattaaatcagagaagcaagtgattgtaattgaagtctatagctagtaagtttttttttttgttcatgcactaagcacaaatttggtcaattatgtttattgtgatcttaaatgcttaaaattttgaacatatattactttgatttgtttttcaattaggaataatatcatattcatgtattggtgttggtaaatctatatatttattttattcttctaccattaattaattttcaaacatgggcaagtgtggagtttttcagttttaccatttttattctcacccttaaattttccagcagagccagtaatgaatgaagataaaagaaaaaaaagtcaaggtttttatttttatttttcttcaaaaaattccacttcaattgagagtgagaatattcatggaaatcttccctttttgactaaactattttagcaaaaaaaccccttttattattttcactatgttgatttgaaca

SEQ ID NO: 83706 - DNA, 813 bp, Cannabis sativa
ggtttgggcgggttattcggtttaggcggtttacaaatttttttgtacagccctactatgtggaacaagctttggaatagcaaaattttagaacgccatgtaagatcctttgctagagcatcctctctaacgcaatccccattctgtctattgtaaagcagcaaatgaacattgaagagacaacttgcccaatttgtggtggagataatgaaactatggaacatttatttcttcattgtaattttgcctaccgtctctggcgctcttccccatggggaatttaccccatctcggatgttggaactcggttgtgggattgggttaaattcactcaaggtgtagacaaggaatcaacattgatgaggttttcatacttgcttttaattgtggtggacaccgtctcgcgagctcgaaacgacaaggtacacaataataatttgggtagtataaaacattatattgattctatttattattgttctacagattacagagcctccatacttccccaacctacccctgtgttggaatctaggtggtcccctcctcctttggacttagaacagtatcagaatggacaggtgcgaatcggataggatcactcgcaagggatatggctctgataccatgttgagaataatgaggttctatcttaaaaccaattgatcataaatagaatagctcatattcttatatatatttcaattctctaccatttattccatgtgagacaatgtccacaataatgatcgcgatgtactaattttgttttatctatgtacatttttagttaaaaaaaaaataagaaaaaaa

SEQ ID NO: 83707 - DNA, 940 bp, Cannabis sativa
  modified_base (911)..(911): a, c, t, g, unknown or other
tgtgtttatcatttttgatcacttggtgaagaaatgtcatattctagatttgataataatagtttataaggaagtttcaattaaaagaaaaagaaaaaaaaattgaatagaatataagtatatttgaaatttatatgcatggatgtttaaaaaatatactaaaatttacacattaattaatctaaatgaacgtgctgcaagttgcatttatcatttttaaattcacaattgtatataaatatattagctattattaattaagtaattaggtttgcgattggatctaaaaatcttagaggtttgggtgattaattaatgtttatatataatccaatatttaatgtgtacatgatacctctctctctctctcttgagtacgtacgtactctctatattatgtatctatataaatagtgaatctctcatatcaacgtaattcacccaactaattagtacttataaagtattatcattcggtactaattaattaacataagagaaaaaaaaatgtctgaattgccaagatttgtggttatcaaatctaaacacaatggaaaatacttgacaaagttaaggaaggaagagagcgtggcaaaggggttctcagaaatgtttgtgaactttcgaggagaggacgttacgagtcctttggtgaagttcgaactggagaaagccaagacaaagccaggatgggttcacatacgttattgctacaacaacaaatacttgaccatgcaatccaattattcctggtattttttggcctcggctgaccaaccccttgaagatgatgaaacggattggaaaaatactttgttcaagcctatcaaaactaatactcgtgatgaggacgacaaacaagaatatgtccgatttcaacacgtcacgtgttgagaatcatggggttccanctcaaaaccaattggcaatgagtggagta

SEQ ID NO: 83708 - DNA, 794 bp, Cannabis sativa
aaagtctttaaatttaacaatctcgatagttcaagggaaatttttaacggccaaaaaagttcaggaggcacaatttactacttgtcaaagttcagagagaaagattactaattagccaatttaatattaagtctcaaagattatagagaattgttaattaattgtagggtgatactttatagtagtgttagataatttggtgtcccatagcaatgctattactttttaaaaaaaaaaattacacgcaactttttttttgggaatttacaatttataaataaccattaattacaaaagtcaatttaagagcactcataacagatgtttaatctttctctgaaagagaaaaaaatattcaaatttatcaaaaaatatatcgtgcaatgattttttattttacatgtgaagtaccattatttattattttaaactttctattacttttttacttttaaattttcttttttatatatatgtatattaatattatatatttaaataaataaaatatatcaaatctaaatgatgtagagaaaaaataaataaaattgatggaagatgtgttggttttatggtactaaattaggtgtgcatcggaaacttaattgtgattatcatcatatcatgctcaggatctccacatgtgtatgcaaggaaaaggacccctgattggaaggtgtctagcattttctattctattgttaatgtaatgaaagagtttctgtttgttcgtttcttttttattaaccgtagtttcaatactttggcggatggtattgctaaaaatgctagaa

SEQ ID NO: 83709 - DNA, 1193 bp, Cannabis sativa
aatcatataccaatttcaatgtttctttttaaaaaaatactttttggaaagttattccgtacgtattcgcaaaattatacaaaatcttcaaatcttagtgattcttccctatcaaagacttgaagatattacaaattaacgtcaaaatgtgaagatctagatattttaagattgcaagatattttgatttataataatgggagtaaaagagatattgaagggagaatgagacatgagacatattctcacactaatattaattcaacacaaacaataagcaaactcaaaaaaaaaaaaaaaaaaaaaaaattgcatacccttattgtgcatatgctgtaatctagatttgcctccactcttttagttcttttcttgagtaataaaattcattttaaaaaaaaaatcaaaaattgaccaagaattttatttctaaattagttgaacttctaatgtagttctatgtactatcttaaagattaattacagttcataatcaaaagtttcaatacactacaacaatatttgtcaatagcgacaaatttaggagagagcaaaatccactgctaatagaggatagtattagcggcggaaaacctagatcttgcctcaagtactatgtattttttttaaagtattaggggcgacactattaaaaaaacccggaattcccaatagttttacatcgtcagataaaaaattcctaacggtctataaaactgatacctatacaagtgtcgcgtatattgggtagaataggcattagaaaaatatcggtataaaagaattttcgacaatttaaaactgctggctatactcaagactaggccacggtttaaaaccatcgccaataagtttaaaactgttgcctatactatatgcgacagttttaaaccgtggcctataatataggtgacggttttaaacaaccgctatagtggatttcccaaaaaaaaaatcatcgccttcatcctcctcaaaactaatatgggagttttgtttggccttaagatccccgaatagttaagatatcaacaagctatgaaatacaaaaatctcataaatacataaattctaatataaaaaaaaataataaaaaatttacgagaaagagtggacgagagggagaagactgaccggtgctcatagtggctcgtggtcgcgcgtttgtcttcagacgagagagagagagagag

SEQ ID NO: 83710 - DNA, 1694 bp, Cannabis sativa
tttttttttctataaaaaaaaaaaaaaaaaagaataaatatataaatgatatgtgtaatgggataagatacacacttacagctaaaatcatctgctgcttttgccggtttgattgagcaatgaaaggtggatacctgtaaccattaacaatttttttacgatatagtacaaattaagattaaaaaaacaacatttgtaatgttttgattgtaagatttgctttcaatatatcagatagaaaaattaaaaaagtaataatttgctttcaataagattaatccaaatttattcatttaattttaggaattatgaatttttctaatagatatataaattattaattttctaatagatatatattatattaattatgattataaaataaaatatttctcttcaaaaataaataatttaaatttaaattcactatatatatatatctctcttttatttttaatatgagatgtgtctatataacataatattttttaatattacaatttcattttaaattcattgcacatattttaagaaaaaaaattcttttatcatttttattaccaaaaaaatatatttatattatattatgtaaaaaaataaaaaaaaatgcatgatatttcaaaaaaatataaaaagtactataaaattaaaaatattacgttaactaaactaaaattataattaataataaattttaaatattattgtatttatttatataaattaaacttaaattaaacatttttagtaaaaaataattttgtttattgaaaaacatccacacacacacaatccttttgttgtaatcaaacgcttaaatttgggaagtttggagtacaatcctttctagttttttaatatgtggactgtgtatcctgaatttagtaatattgtcctcaactgctagaggaaggaagtcaaggagagagatctagtggatgtatgtgtcaagttgaaaagactacaaaaagatcttaggatctttaataaagaaaagattggcaatgttaaagttgaatatgagaagacaaaggaaagatacgacaaggctcaaatgaatttacaacagaacccctattgtgtaaagctccaagaggaactagaggcagctcatgacaaacataccagcagcaacaaacaaattgaaagcttcctaagacaaaaaagcaaggtagattggatataatttgagatgaaaatttaacctatttccatgcttgtattaaaaaaaagggaggcaaataggattacaacctttattgatgagaatggcaagattgaggatgactatccaaaagttatcactcattttctttctcattttaaggatttcatggggactacaattgtaactacagaatctattcttccacaaatagtgaaagaggagccatgtctttccttaaatttacagatcaatctcatcaatcctttaactcaggaggatgtgaagaaagcactattctccataccagatctaaaaagccctggaccggatggcatcgggtcaaaattcttcaagagtatgtggacagaattgggcaaagaaatctcatctaccgtcatccaatattttcagcatgggaaactactgattcggcttaatgagactcttttcatgctcattccaaagactgaaactcattctcaagttgtagactataggccagtagcatgttgcaacactttataca

SEQ ID NO: 83711 - DNA, 986 bp, Cannabis sativa
attaaataattttgattaaattatgcttttgttctatccgactccaaaaaaaatataaattaatattcgattatttaatgtttttcataaaattatatttttatctcatccttattatggataaaaattgaatgggtaataagcgagtaatgcatttcccgacccccattcctacttcctatttatgcctccatccccatctccaccacgctgaatctccgatgggttcggggtaggagagtccctattgggtgtgagaacctattcggtacccatgacaattaatacaataataataataaaaaaataatttaatataattcaaaataaaaaaaataaaaaataagatattgactttaaaataaataaacacttaacctattaaaaaacctttattacataataaatcatggaagattaagagataaatttgtaagtatatagctaataattttaatacgtaataattagaaaattatatgaaaaatttaaaaattatatattagggtcgaatatgaggtgagtagtatcacctcgaccccattttgaacctgcttcgggtatgtaaaatttcaccacaccctcatcccattacccattaaagtaggtaatttttgccccattcgaggtggtcaaattttcatcactagtcctaatgctattaatttttcaaggtttttaccgtgtatgaattttaataaattatttgacttaaaaaaaagtgaaataaaattatctaaaatatatttcttattatatataattaataaaaaaaaatacaattttaaactcagtaatcaaaatgtattaatcaaacactaaataccgttctaagtaatttccaacataaagaatagggtactactactgtgtcaattgagagtattattttttttttcccaattactagtagtatttaaaaaaataaattttcttgcaaaaaaaaaaaaaaatactatcaaccttctattataattaattagtaa

SEQ ID NO: 83712 - DNA, 640 bp, Cannabis sativa
gtttaccaatgcccatactaaacttgtttataatctcttggaagtaatttttctaaaataaaaatatgcttttaggcttctgtttgatattatcaattctaataattcctaggcctaaatttttcattttaaactcaaactaaactttcttttaatgttgtctatttcttgtcttaactttcctattattaaaatgaaatctacataaaccaatagatagacttaattactgtaataataaatgagtatcataattactcttagctagtaaaaccaattataatcatgaatttatttatctaggtgcttgcttaagaccatcaatgacttttcaagtaagtatacattgttaggatcacatgtgtcataaccttctcgtaaactcatgtgaattattttttccagtaactcacactactacaaataatcctttttatgtccctttttctagtttaacaaaaatggtgttggacatgaaatatttttggagagttttttagtccaatattgatggactaaaaaaaaaattatcatatctaacaattttgaacaaaaaaataataatagacgttataaatatatatatatttgaaatccaagaatacaaatgtctagcccagctatgctggacgtgtcatcc

SEQ ID NO: 83713 - DNA, 1532 bp, Cannabis sativa
gtaagccaactttagaccagcctatgtagagaacagactttaaagtttaagccaagtaaaaaggattaaaggaaattgtcaagaaagacttacccttgtgaattccctcaagattcctcccatcagcagctctagggaaggttcattgtcagcgccggccagctgctcactcacctcatgaatcaaccaattcatgtaatgggcgagcatgtccttacctttcttggcctcttgatgcactggaaagggtggagtaggagcccgcatctgctcagatcttctcttagccagctcggagccgccctttgactgctcaggcctgttcgagtttcctcccccataatctttggacttagcaactttcagaatagaagggtccgccacagctagatcctcagaaaggtaaatgacctccccggccggcgccttttccttggaaggggtcgcctcactgcccctagatttcttggccagaggagatgaacttgagcttcctccaactctcttcttcagagaatcgagcatcttctgagacatgtctctacgaaacaaaaacaacatggttagaagaaaagaagcatcagaagcataaaagcatgataatcacgaagtttaaaaacaagatggaatatcctgcgaaacgattgcccgagcaagactcaagagtccattatcacctaacaagtctcttatatccgcaatgacgacttcccttttcctagcacaagagaggatggtcgggcaggtgaactgggctccctaattcgaatggcatgttcaacgggcctgggctgggccggaagtttcttcctccttttgagcggagtcacctgttcttcctcagcctcatcttcaggattcaatggctcatgagcattctgagacatgtctgcacagaacaaaaacaacatggttagaagaaaagaggcatcagaagcataaaagcatgataatcacgaagtttaaaaacaagatggaatatcctgcgaaacgattgcctgagcaagactcaagaatccattatcacctgacaagtctcttatatccgcaatgacgactttcccttttcctagcacaagagaggatggtcgggcaggtgaactgggctccctaattcgaattgcatgttcaacgggcctgggctgggccgaaagtttcttcctccttttgagcggagtcacctgttcttcctcagcctcatcttcaggattcaagggctcatgagcatactgtttggcctttgcaccgcctttcaacttggcttcatgcttaagttagatgagttcattctccttatgagctccctcagcccggccagcaccaaatttcctcttcctctccttcacaggcttaggaataaaatccttaggatagagcccctaattcacaaagttgtcctcggaggtcaactgaatgatattatggtcatcccccagtagttgagcaagcctttgagctctatctctaagagcaagagtgaagggagggcggtgatatgtggggatctgctggaaccgagtatgggtggtgcc

SEQ ID NO: 83714 - DNA, 732 bp, Cannabis sativa
tttagtgaaaatttttaagttacaatatcaatatttatttgtaactgaaaattagtatttaaatagaaattgtgcttttattgatcacagatacattgatgatgtgcagcaaaaaaaaatacattggtgataatataaaaataatcatgtattttcaacaatattaaaaaaactatatagaagtaatatccaaataaaattaaaacagcataaaaataatatataaataattaaaaatcaacatcagaccaacaacaaagagttcaacataaagtaacatgaaacatcaagagattatattttttataaatataattttagaaatcttaaaataatatttaacatcccgtataactatatttttctaattattttgctaattttgtgtatttatgaaataatctctagtttttattgtacatgcattattttatgtttattgattcggcagaaagcatatataataaagatcaatatgcatgggataaattaattgacaacgtttacattttctgtactacactttgacgagacatatcaacttatgtaaagtagtggccaatattcattcacccataaaaatttgtataaaaactttgtggtgataaatattatgcaacttgacgagcgattggtgcaaacttagttgtttattaattgtgcattgagaatcttttccatagagttgataatgaagagtctttttgcccacctacatttgtatgaatggaa

SEQ ID NO: 83715 - DNA, 703 bp, Cannabis sativa
atatatgcatgtgcttaagacggccgctgcttaattgagtccctactgtacagctactactgtacagctatatatatatatatatataggtataagaaaataatagatagtatattttcaaaaataggaacagggaaaagattaattaaggggccatgggaaggcatagattggccaggttggtggaatcagttgaaaagtgcctcccttttgtctttacctttggctctttctttctgtcttttggtgttgtttcttcatcacgaataataagacatacgcagagacaagccatctagcttactcctatatatgcgaagatggaccacattttatatcaatatatatatatatatatatataaacataaatacatcgcagtagtgttcattgtttttaatcactatctataagcactgcatatcccctcattagcggtcgaccactccggcgctaataacctttgattcggccacaataggcttttagcagcgaaaatttcctgctctgctaatatataataatattagcggcggagcagtagcagataagtcccgcagctaatactattttaaaaaaaatatataataattttataaataatattatataatataatgatattaataataatattatataaataattatacaatatcatattagtgattatatgatatataaataataatttaaatataat

SEQ ID NO: 83716 - DNA, 755 bp, Cannabis sativa
cagcggcatctgaattctggatcaaacgagaattgttcacctaaacaatgaattcacttattctgaaagctttctttcttatgagaggtgagatattgattgggattaccaacttcaacatttaagtttggtttttctttatattgagaagttattagtaccggaacataatcctgaggtagagttaatgcgccagcaatttcttgtaaaattgtctctttgaaatttgaagttaatatagaactcaatgataatgaatgaggtttggttggagtataggtggggcgctgtgctggcagaggtgtttggcagaagaggaatctcaatatgtcacttcataatggtggtgttggacattaatggcaaaaaggtcatggatcttctcaacatcatagaatagaccgaggatggttgtgactttcttcctctggctgctgcaatcccatggtttacgtacaccatatctgacatggtgacatgggaacaactgaacaaggtggtgattaataattatctaggctttgattagtcttgactcttgaatatctcaagtgatagaagaaatgagtgggtggatgatatgcttcaatagttagtgggtatactcaaaggcggactcaggattgaattttaagatgggcttatgtatacatttaatactattcaaaacaataaattattagaatatttctaattaaggaaataaataaataattgattttctgttaaatgaatattttatattcattaaatct

SEQ ID NO: 83717 - DNA, 1040 bp, Cannabis sativa
atggtcacgggattccgagaaatgttattccaatccttggtcattttttgcatgaagtttttgcggttaaaggattttaccgtatggactttgacaaccaagaataaaggaatgggttgtatctcggaatcgggagtgttggagggggcgggctcatggagagtttgaatggtacattcagtttctgtgaggttgagagcaacagaaagagatttggttagatcatccatggtacaaatgaacaagtagtgactgagatcaagagagatgatgttaatgcaataggaccgaataggcaaaataaatgaacaactatacgaagtctgaaagattaaactgggcaggttattgtggatcagggataaaagcaaactggttagaggttggacaaagatattcgagagcctagaaacagggttactgcaaggtaatggcctatgaactatggggtaatattggctagaagattgcaacaactgggaagacgggagaccagtatgataccatagcctaagtttggataaatcagagagaatatatgtgactgtagtacaaacctggggattgtgaacaaagtgaagtttggagaaatcagagagaatatatgtggggactgtgtacacacctgggctcgactgggttactagattattatagtgactgtagtatatatttaaactgtagtagctattataggaaaacttttgcagagaataacacttagtgatgataggaatatatgtgcaaagccgcagggatgttctgcacttatataggagaggaattttgggatagttatgaccagatttggtaactatcacatctgtagcatttactatcaaacagagttgctgcacaaaaggattttgcatagtaccaggcagatcacgattgcagtctaaatttaatgctaaattttgaaaaactttgacaaaaagaattaaaccctttctggaaattaatataaaaacgattttcccatccgaaacccttttctggcatcgatttccctcagctaatttaatgggaagcccaaattt

SEQ ID NO: 83718 - DNA, 982 bp, Cannabis sativa
gtatttaatttttcatttaacaaaataaaagtcctatcggtaacttttgcaaaacacaaattctaaaatattgtttatcctagaatcataatctatatcctacaattttgaacactcaatttactttaaccaggaaaatttgatcaactgaaaataaagttgctggaaatatataatacccaaaaacaaaaaaggaaattataaagctttatatatgtaaaagaaagagtgtacctttccttggggcgaagcaaagtcgattgccggaggagaaggaaggagccgtctgtacaaaccagccatcgccatttttgaaaataaataaatgaataaatttgtcaatttatgataaatatcgattcgaagaagagagaagagattggaatttggcgggtgaaatcaatgaatcggaatctggaaattttagggttttagatttaaattgaatttgaattgcagtgataactaaattaggagttgttcttcgcggcgcgtaacttaaccgtttaaatatatatttatatattttttaattataaacatatatttttttttttgagataatattatataaaacatattattcaatcttttattagttatttattcaaaaaaaaaaatatacatattattttaaatttttttatcatttttttaaaattattattaaaccttttttagaatgtagaccggattaaatctatcaacaaaaattaataattataaaataactatttatattgggaaaaaaaattaggatttttagttcctaaatctttaactattggaaattaattgtctttttttctctagctaggcacgctaatcttctttgggtttaggtgcagcttagtcgaggttgtgtttttgtactataattcgatttttgctactacgattagtcttatttctgtgacatgatttttagtgttttaatcttatctctgagacatagttttattttgtttcattgtttgttatt

SEQ ID NO: 83719 - DNA, 776 bp, Cannabis sativa
tactgttgataggactgttgaaacttttgttgaaatcagagttgtaactattgaatccaggtggtacaataggagcaaagtagtttggacgcccatacgcaccaaaaccattgtttcttccctgagaaagatttgcctcagatttagaaatgtcgagattcttggcatctttctcaattcgaagcgattgagccatcaacaaagcttcaattttcgccacagtatcaagatcttttttggttgtaacagatgtgacaaaaacatcatactcagctggtaatccattgaatatggcttctatgtgatcttgagtagtttgtcgatgaccaatcgtagctaggcgatccaccgaacctttgatcttgagcaggtaatcacacagtgaccctgtcatttttgggtttcgcagctgagtcttgtaaaggcttatgttagctgcattcaaggctgtgtaatactgtgtcagttgctcctagatttgcgcagtggtttcacacccgatcatttgatttgtgtttttatcaagaatggacgagagaagccaagaaacaagaagattgtattgttgttcccattcttcatactcaggattaacatggttgattctttgatcagcaactattaaaaactgtggtggagctcgagtaggatcatgaaatttttgaagtctgctgcctttgatcgatgccaagacctgatgcttccatggtaaaaaattgtgttcatcaagcttgatagacagagaatggttgaaagaaacaaggtacgattttggt

SEQ ID NO: 83720 - DNA, 879 bp, Cannabis sativa
ctttcattctggttacctaaaaaaaatatttagcgattggtttgacctgtgtaatttgaaaccaatatttgttaaacatatgaaacaacagtggaacaatccaaaaataacattataaaaaccatgacagctctagtattaatggttttaatatttttgctttatctccccaaaattaatggttaatatctaactattctcatattctgtgataattctatttgtggatgtaaaagatgaagactttatttgttattttcaatatttactatttatagtataaaaaaaatactataacactaaaaatataaattttaactgtggcaatataaatgtaaatactataatgtgaaaaaaattatatagattggttcatttttcaatacaagtagtgtgataaatgtactattttgttgtctcttgtagagtaggggtccaagtttctaggatgataaaccttatgggtttctgcatgttttataattgatccaaaaatgacagttctagcttctagccatctatctttttttttttttttgaactgtggaggcctatctatcttttttcaaggcatctgtcttggtggacgccttaactttgttttattatatgcaataatgtcctatgtggaaagttttaggagagactttgaattttttttttttttttttaaataacatgcagcaaaattaattattatttttttttttttgaaaaataagcgtaaactttcattcagataaactaaagttagacttcgcggtcattacacataatgttccggaacagacaaagtcaaaatcggaccatacaacttgttggtagaagtccatttaaccacattattactctctatactctttttatattgtcctcttt

SEQ ID NO: 83721 - DNA, 1133 bp, Cannabis sativa
  modified_base (685)..(689): a, c, t, g, unknown or other
ttaaaatgagaactaaataagagcctattcaagaaatataatgataattaaattgagaagaagaataaatatatcaatgtatgataggcattagggtttggcttggaaaaaaaatgattaattaaacaaagataataaaaaattataaaaacctacaaaatagaaaaattagcactatgaaagattagagtgccacctcaacttaccctaacaataggattatataaatatatagatagatagtcaatttaatttgcaaagtaggaatatctacacttgtgcagattgcatattaattcataaaaataaccaatctaatctaattctcacatatttatataattttttttaacattttaatgttaacaaataataatttaaaatataatacatataatacaaatatattttaaaatttaatagatcaagtgtatattttattttattctaaagaaaaaattaaggttttttattcttaaatatatagctatcgaatgttttttttttctccagccaggtcgtccgacttttcttggggtgaggtgcagcttggtcgggttgtattttgctatttccattcgatttttgttactctgattagtcttgttgttaggttatttttagtattaaatttagattgattttagcatatttttaatttagttttaatcgtgtttggagcatnnnnncgcttgttatcttttatttttgcagatttaaaataaaagaagattagaaaaatatcagaagaaaaagatgagaaaaaaagataaaaaaatctcacaaaaagatgatataaaaaaaaaaaaaaaaaagctgaatcttcaagcctaaattagactaggatctggtaatatttttggaaaaaatcaaagcataaaagttctagatctttcttttatcttttcggaacatcttgaatcgtccaattccgagcaatatcgatagagttatggcgaaaatactatcagtcgacgcagcaaaaaaattaccgtcgaaaagaagtcatctagtgaaattccaacatgggttgcagcctgccccctaaactgcccaaaaatcatctttttctctcacgtgagttttggtggtttcttaattcgaataggcatttaacatgtgcatttttatat

SEQ ID NO: 83722 - DNA, 1203 bp, Cannabis sativa
atattaataataaaacacaaaaaatatataaatatatattatatcaagttaataaatatttaccttataaacacaatccaacaataaattacgacaaaaatccggccacctatatcacacacacaatataatattaataaaatgaaaaaaatcccaagaaaaatttacaaaaacgaaataataccaatgtacattaataaaatgaatagaaatcatatttataccttaatggaggatgttgagatttaacatttttttcgctaaaattggtggccgaagttatgccaccactttttttaataataggttcggttaaaaaaaccaaacttttttacagtataggtttaggtatttaatatagaagattttaaaacaaaaatagggtaaaatggtgaagagatgagggagaatgaggcttttttagtggtggttggcgagggttttctcgttggtttggggctgctatggctggctattcttcgtattcagcaagttgtgaaatgagaaagacaatactgtaggggtctgatatatgatcttatggcgtcggttatttgctatgagctgacgccataggtgccacgtgtcgaataacggctgcacctatggcgtcggttaatagcaaataaccaacgccatagggttaatcaaaagaacctttaattttaccccaacccctaaccaacaacatagatataattaaattctatacctacgggtgttaccaaaaaactacatctaaatgtcaattttaaatcagacggatattttcacacactttagtttctgtttttataaaatgggttggaaaaactgcctctaaagcccataattatagtaataatccaattaatttgttcgtagaaaatcttaaaagtttaaatgaaatatttttatttgttaccaaaaaactatctgaatcgtaaaagaagcttattttaagcttctccaaatctgaaaaatatttttacaatgcacataatttttacaaataataatgtgtaattaataccaatcatataattaaaagtggtatagtttcgaattaataatataaataactaatatttttacacatgggactcgtttggaacgccgtattaggtcgtattgtattgtattgtattatattgaattttattttatgtaatatttttatgtaaaactatatgtggtattataacttttatagacacctaaata

SEQ ID NO: 83723 - DNA, 1660 bp, Cannabis sativa
  modified_base (1604)..(1607): a, c, t, g, unknown or other
cagaaaactaattccaccactatggccccttgcatcaactgtaaagacgccatcaaagccaagcatcacacgaactctttcaagcgtttccttcatacttaacgtttcacaaaggaatataaagtcgggtctcttttgacttacaaggtcttttaggaattgaacggcccgtaggttcccaagcccacggcaattccagcttaacacactcatgacgaatggtgggcctggaacccagagcccacccctgataagtttgttggacccactggcccaatattaccattcaactcatcatccatcaccacatcttgtcccaccagccccatagtattttttgttaagtgaaccggcccaatagtagtatcattaattagaggcaactcattgataatatccttcccagtacgtctacgtttagtatccaccacattgagttgagtttgactttcctcctcaattacttccacaatcaactctttgccaactattgcagagtaatcagtgttgattatttgctcaccaacggcacaatcctgaaaaatatgattatttaccacagactttccatatctagtcacacattgactctccccctgatttactactgtttgcaaactttccttaatggtagtttgcatctggttcgtcactggcacatcggaaaacatggcgtcattcgtactgccatcgcaaagccattgagatccaatttggtagttcttccttctcggctgtgcacgaagaaacgagccataaggcttgacgacttgatcaggtggcatagagaacagcttcggatagagtctttcggtatgtccaatgattccgcaaataaagcagaacgttggcacatattcatatttaaagttagcccagaaccactcacttcccgttttacgtagcttcatctgacgcttcaatggtaaagtgatattgatagtaactctgacacgtaaatactccttccatattccttgaaagttctttggatctgtctccacgaacgtgcctatgtagtttgcaaggtctcgtaggacttggtctgacttaaatcccgcctggagatcatgaacttggacccaaaggtctaaatgattcacggctatagttcttggattatccccatctttcaaccgagtaaaaacaaactgtattctattaaaaatccacgggcttccttcaataacacgagttatatcgagttcatgatagaattgaaaaagaaaacgattcgcctctagctctttgacatacatacctttgcctggctgccacagagacgccatcatatggcgcatgacatcgaaatcaacacctcttttagttaaaaaagttcccacaatcgcccaccggtaatcaacatcctccacattttgttccactgtatcataggctaattccacttcctcctcatcatcaatagtaacttgggcacacaaatcttcaatctgtttcatattaccactagacgacgccattgcacacgatcacaaatctcacaagataactggaaatcaataaaagcagagaatactctcagactatgtcaatagacataacaatctcataatttcgaaattttaattaaataaataaaatannnnttttcgaaaatttaaaataaaataaaagaaatttcgaaaattaaaaaaattaa

SEQ ID NO: 83724 - DNA, 852 bp, Cannabis sativa
  modified_base (34)..(62): a, c, t, g, unknown or other
caaattgttttcaaaaaacaattttctgtttttnnnnnnnnnnnnnnnnnnnnnnnnnnnnntgccaaacatgcacttagtttcttatatggacttaaatttgtgctcaaaattgtattcattttcattatgattattgagttactattagactatatgtgttttttataactttaattatttttatataattgtcaaagataattacacataattatataaaaaaataattataattattaaaagtgtaaatgcttactaccatttgattgtgaatgcttattaccattttatttattattaaaattattattaaattattagatttttcaatgtgctcgtttattcatgcttatgtattatgtctttgagattgtcatatcgtcatacttaagtttatatttttcgtgccaatttgtaatattatattgtgtcgtgtccaaatttatattttttagagtcgtatccatgccaattttgtgtcattgtaaaaagcccaactcaagatcattggagtccaactcccaattgactacaaatgcatccacaaactaacttattttagcaaatatattcataaggtgggtgttactttagtagggatgtgccttttgctctcatcgattggagtgtctatatttggacatgtaaaaaaattataagttaatttttctctttattaataatcgtgtttttaggacctcgtcgtcaatttttaagaaattttaaagaatttgttgtaccgaaacaaggttcaaaataatttatttcagacgtgtgtaaagtaaacttaaaacagcttgtttcgtattttcaatgttgtaacttattatttataatttttaaaaattt

SEQ ID NO: 83725 - DNA, 695 bp, Cannabis sativa
gtaaaacgatctacaaataagttgactcattgcttagcaagagactcttgtttctctacaggtcatgtgcttcagctggaggactgttcctctgaaatgtgttatattgttttgaatgaatttattaattaataaatcttataatttttattctaaaaaaaaatattaaaaagtaaagaaaattattaagaatttagtgcaaatatacggttattatttattattttttggaaatattaaattaaaacaatattatgtttatttgaaaatcctcatttttcggagaagaaaaaaaattagttcaagcgtgttcttataaaatttaacttttagaccatttaaatttttaatatatttttctctaacaaaattaatcattaaataaaaataaaaataatgtattttttaaaattgcggttaattaattttaaaattttggcatttattttaatcattcaaatgctttttttttcctttatttaagaactcaattaatttttcagagttatcattaaaatataatgcactattttcattttttttagatgtgtaatcatttggatgcatccaaagttcatgggataagaattttaatttacaataacacataaacatttaaacgaaaaaaagagaagttacctaatagaatatttaaggtggcattaggtaaaacttttattttaaaattttttaat

SEQ ID NO: 83726 - DNA, 602 bp, Cannabis sativa
tatgaaaccgttcctcctgccatacaccttcccattcaacccctttcacccacatcaacgtccagccactcacatacacctgttacaccagcaaacacatcacctcatcaacccgtgccttgtcctattccagcaccaacacttccctcacatcccatggttactcgctcaaaagctggcatcttcaaaccccgaacctttctcacatccctccttcaaaatcctcatcttccagccctctctctctctactcccgctaccccagaaatagccttaactatcccagcctggaaaaatgccatggatgatgagtactttgcgctcaaaaagaacaagacatggtaccttgttccccgcttacctcatatgcatgttgttgacaataagtggatttttcgtcacaaattcaactccgatgggtctcatcaacgatgcaaagctcgccttgttgccaaaggctttcaacaacaaccgggtgtggatttctttgacactttcagcccggtagtcaagccatccaccattcgtgtcattctctcccttgctgtcaccaatgattgggatgttcaacaaattgacatcaacaatgccttcctcaatgg

SEQ ID NO: 83727 - DNA, 2705 bp, Cannabis sativa
  modified_base (1407)..(1410): a, c, t, g, unknown or other
  modified_base (2470)..(2471): a, c, t, g, unknown or other
ccttgcttgatgcataatcagcatcaacatatcctttcaaagttactttctctgaaactctcttgtaagtcaatccaatatctgatgtccctcttaaatatatcatcaaccatttgagtgccctccaatggtttattccaggatttgacatgaacctactcaatatgcttaaagcatgagcaatgtcaggtcttgtgctaaccatgacatatatgagacatcccaaagccattgcatatgcaatttcttccatttattctttctcttctattatcatagggctttcttccttggttaatacaaactgtcctccaagaggtactgaagtgctcttagaatcttgcatcttgaactttgttaggatcttctcaatttaattcttttgcttcaaatgcatgacttcatcactcttgtatctatgaacttctagaccaaatatcttctttacttgtcccaattctttcatgtcaaattctgccttgagtttatctttaattcctttaattactgccttgtctttgcccattattaacatatcatgttcatagagtagaagatacacaactgttgactcttttaggtgcttgaaatatacaaacaatgatccaacttggaccttgtgaagccaatctcctgaacatagctgtcaaatcgtttgctccattatcgtggtgattgcttaaggtcgtataaagacttttccaacttacaaaccatctcttttccatcttgttccacttgaaatccaggtggttgcttaaggtcgtatatctcttcttctagataaccatttagaaatgcagttttaatatcaagctactccacttctaaaccttgttgagttgtcattgacagcataagcctaatgatcttatacttcacaacatgtgagaacaccttagtgtaatctatcccttccacctgagtgaaacctttggcaactaatcttgccttaaaccttactagctcatcgtctgtcacaccttctttaatctttagaattcatttgcatgagatcaccttcttgtcctcaggtcttggaaccaatactcatgtcttgttctttctaagtgagcttaattcatcatccacaacccgagatcactccttcttgtactttccatttaaagcctcttctatactcaatggttccggtatgttacatgaataatctattgacaaagcataggaaataagatcagcttctgcaaaccttgctggtatacagatttctcttctagttctatctctagcaagttagtagtcagacagatctggttgttcctcagtctcatctggagctgtgtctgtgctgtcgttcttctcacttgctagttcaaaacatttgagctcaatttcaaactctgctaaatcttccctcttgccagatgaatctgcatcaggtannnnactgcctttctcgactttcaagtgaggaaaattattttcattaaacacaacatttctagaaataatcaccttaggcttcccattctggtttatgcagattctataaccttttgtgcctataggatatcctagaaacatgcctttgacagatctagcatcacgcttatcatcgggttgatgtacatatgctgcacatccaaacactctcaagtgttttaggtttggtatcttcccataccacatctcataaggtgtcttcaagtctatgactctattaggactcctattaataaggttacaagcagtagctaaagcctctgcccaataaggttttcccaaccccgaactaagaagtcaacatctcactttgttcaaaaagggttcaattcatacgctcagcaaatccattctgttgtggagttttcacaactgtcctatacctagttatcccattctcattacatagcctatcaaactcaatgttgataaattctagaccattatcagttttaagtgtcttaacctttaagtttgttttgttttccaccaaagctttccatatcttaagctgttctagacactcatctttggttctaagtaaataggtccgaacacatatactaaaatcatcaacaatagataggaagtagtgtttatctaaatgtgctggggttctacctagcccccaaaaatcagcatgcacatactctaggactccctttgtgttgtgagttgttgttgtaaacttgatcttgtgttgcttgccataaacacaagtctcacataatggtaaggcacatgtctgaagctttcaatgactcccttattgtgcaattccctcatgccttgtttactcatatatgttcgagcctttgatgccataactgcatatctttttctaagccttttactatatctacctcagccgtaggtacagtttcatcctcgagtacatacaactcatgtactctctttcctttcatcacaagaattgaaccttttgtgatccttaggctcccattcaaggacttatagccataaccttcatcttccaaggttnnaagtgatatcagattcctcctcaatttcgaaatgtgcctcacattatgcaaaatcttcacttcaccattgatttatcttatagccaccttactaattccaacaaccctgcaagaaacatcattgcccattagtactctaccacgattattggtttcttgataatcaaagaaagattctaagttgggacacatatgataagtgcatcctgaatcaaggatccactctttactgtt

SEQ ID NO: 83728 - DNA, 694 bp, Cannabis sativa
ccgcagtggctgccatagtcgagaaaaagaggagagaacatgcactcaatggagagatcatatcagccatgtggcttgtgcctcagtacagcttagttgggttagctgaggcttttaatgcaattgggcagatagagttttattattctcagttccctaaaagcatgtctagtattgctgtgtcacttttcacacttgggatgtgttatgggaacttgcttggggctcttatagtgaagattgtggagagttgtactgaaaactttaatggtgaaggagtgagttggctccctgataatctcaacaagggtcgattggaccagtactattggctgctcactctcttcggttttgtcaatctgttgtactatattttgtgtagttgggcttatggaccttgtgagaatagacagatatgggaagaggaggaggaagaacaagaatatgtgtccaaatctaaggagtcatattcctttgcagcttgatctagctattaatgtatgatgaattatttatattatggtgattatggtcttgccacagataattaacggaccaatttgaatactaatagaaatatatattattaaccgataataagttctattatgagtaatgctagacactagaaacatatttaattacacattttttataatttgatgtgtatttagttttagttatacatagtttt

SEQ ID NO: 83729 - DNA, 505 bp, Cannabis sativa
aattctggttgtctgaggtgtcctttctaagacacattgtcagaaaagatggaatcatagttgatccgagacagatcgaatcagataaaatttggcgaggcccaggatagtgactaaagtgcaaagttttctcgagttagcacgatattatcgacgttttgtcgaaggattctctaagattttaatgtcactaactgagttaactaaaaagaatcaacggtttatatggtatgacgagtgtgaagtgagttttgagaagttgaaacagcagttaataacaacgccggtgttagctttgccatcagatcaagaaaagttcatcgagtctttatattttctcctccttaaagaaatttcatcccaaaatttcaaaatacaacctcaaattgaaaattaaatgagtgaggatacttcatatacatctcagacttaacttcggcctattgggaatattttaccaggatctagatttactaacaattatattgattaacatcctaaatat

SEQ ID NO: 83730 - DNA, 668 bp, Cannabis sativa
agtaccaacccattttagttaaaacaaagaaagaagaaagtctcaatataaagagaaatgctaaagtggtgatgtctaaaaccttcctatgtgttagtatcgttattggtctaaccataatttagtataaaagtttttactggtctaaccataatttaatataaaagcttttcgaaagtgtcgctagtcaatcgcaacgtaacatatcgagaagatacctaatagcaatgctcaatacaaaattatacttaatagacacatcatgagatgagagtactaaaaaaaactgtagtacacctttcaaagttgttttgttataccctatccaaaaaagtttgttgagaatgctttcgtttctattacaattatttcattaattttttggtgctttgctatacttattataaattttttaaaaatatcgaataatttaatatgtgaaaaataaatgtgtacctataacaaatattgttatttaaaaaaaatcaaaataattatatttagtaattttgagcatgattacttaattgtaattaacactctttaaatttttaatttaatatattttgataaacgtgcacgttataatttttgggtgattctataatgcaccctcttaaaagggatgtattgatgcacccttaacttgtttcggcatccagaagaat

SEQ ID NO: 83731 - DNA, 503 bp, Cannabis sativa
aaatatctatatctttactatcacaaattgaataatatttcagggatctataattaaaatttgtcaactgtgagatttactcaatatatattaataatatatcactttgttatatacataaatatatatcttgtagagtttatatataagataattatatattaattattagtcaactaaattattaaattgaaatgatgatatattttatattatattatatacaggcaattggtgaggcagtgtcgtttttcattcaagtgtggtgcatatctcaaacgggtcctgtctttgcagtaatgttcactccattaaccacagttattgcatccattatagccattttctttatggctcaaaccttatatcttggaaggtactatactaattaacatatattatatgcatacctatatatattcatcattatttacataaattgaatttaattatgtttaattactatactactctcagcatggtaggggcttttgctgtgattc

SEQ ID NO: 83732 - DNA, 727 bp, Cannabis sativa
acccgcataaaataaaaaatggatgttatcatactcatccactgctctaccttgagtggatcagcagcaccctcaaagactggtgggttttgcttcttgaaccgctcatacaactgttttaaatgattccctacatctaatggcactaccaaaggtggcggaggatcaggatcagggtttagagtaggcttagctcgctgctctcttagttcttggatttgttcaccctactttcggatagtctcttgcatcgcgacatataactcttcctagtttggtggtggtgcagggctctcgccttcaccagcaacccaaagcccaactacctcgcggttacctctaccgctccagctcaggtgcataatctatacacctgcggtcacattccaggtaataacaatactaataagtatttcatatatcacaatacttcccacacaattcaattattaacacaattcaaataatcaagcaattagataattaacaaattatctattaattaacagcctcctgaaacacgagtcgaacgagtcctcgcagccaatgtacatttcaaacttgtcttcaggatctaaaaaccttggcgctctaataccatgttgtaatgccctgtccaatagggacgcaacgtgtgtgtatttttataaaattcctatttaaatactctatatttataccaaaagtgttggtaattaaattattgataattaaaatcaagcatata

SEQ ID NO: 83733 - DNA, 607 bp, Cannabis sativa
aaaattaacctatcaaattaattaaaggcaaatcacaatttcgtttggtcaattgaagaccgccctccacattcaacctagtcacacactcttaaacaatcttcctaagaattttataagaagaattagaaaaacaatcccttgatttttaaaacaatttatttttttcccttcatatttatattatagaaattatataattattaaaaatcgccttaaattgaacatggttataattggtcctaaccaaactccatgaaagatatcgaaatagttactaatttgtagtcaaataaagtcaacatcatattttttcttctataattttctgattagcattctataaatatatataaaaaaagtatacatgcatggtcatggagatcgagtatataataatatagctagccatggaaagtacctaagaaaaggagagatacttataatgactataaatgtgtggactcgatcagggaccaagtcagagtttgaaacgagaagaaaatgttggcctgtccaccatatcttttttccttttttttttttttttataagaaaatgataaaaaaattcccgtacaaatatatgtagtttttagtactatttt

SEQ ID NO: 83734 - DNA, 804 bp, Cannabis sativa
ttttcacacagaataaatataaaagggataatttgataaatacataaaaattataaaataaaaaataaaacttatgaaattttaaatatttttataagttttaaaattttatttacaaaaaaatatagtcttttaatgtatatttatgttgtactatatatgattattttattatttgtatattattttttattattttgaagtgattttcttatatttttataaagtatctagaaaaataaaaacttttacacataaaagtataattattttactaaaaatattagtttatgtaatttcaacgaagtttctttagttttttttctcacgtatgtgtggttgttgaccaactttctaatctttgttgggatgttacaaatttttttgaactatatgaaatgtgatacttaattttataaattattactattttttttttgtaaaatctttcaaattcacattagcttttgatttttattattatgttaaattttcatagttaagtgtcaatgtagattatctatatctacacaattatacaccttatattttcattgatccacataatttaattattataaacattaattaaaaataatttttaaaaaattacaatatagaaattcagcattataagttaaaaaaaaaactaaatagaaattcaggattattgtaattatataatatagaaacattacaacacaatattgtaatatataataatatagtttcttagaaattatttcctctgttgggattgttatgtgtattgagctttagaattatttggggttgttaaattga

SEQ ID NO: 83735 - DNA, 1464 bp, Cannabis sativa
tatcatggtttattttagtttcaagaagggctccaagcccaaccttattttctctacaaatttctagcaccgatctctgcttatcccttttattcaagccttttacattccaacttattatgttgcagacttctatggattaacagtagtggaagtaactaagttctcaacaacctgttcatttttatatagttatagattatagattattgtatgtagtgtatttaggaatatatataactaatgattttttttttgtttagtataggattatgtatttaaagttagaataattaatcttgattaatgtatatatgtattgtatatgtgaagtgtatatgactgtattctatatgtatttatgtgtatatgtatataataatgtgtttagtgtatggtggtaaattggttcttgatacactactataaattacactattcatgtcggtcaactgttactgttcatagcgttgaccgacgtaaataatattcaaataattgggacatcccgttaaaaatgacactaattataatatgttatttgcatcttttaagtatatgacgctaaaaactaaactgacgagaataagtaaaaaaatttaaaatttacgtttcatttttgtgtcttttattaactctcgagtattgtgttagctagcttttaaaaatgacacaaaatacagtgagagttgataactcacgcaacaaaaagtaaaatccctaaagcctaaaaacgcaaaatactcagctcagccctctctcgtgcgattctcttcagacgcttcagcctcacagccgcatctctctcagatgacggtgagatctcaccaaaccacctcctcttcagacggtttcttctctattctcctcttcggtggtctgtggtctctcttctcccgtgagttccttcgtacagcctccggtggtttctgagttccttccttcaaaacctccggcggtcaattcttctcttacaatcgttacttcatagagggtatgtttatattctttaattttaactctctatcttgatttcaattcacctaggaaagacaaaaaccgattcaagcaaagaaaaagaaaatgctgtaattttcttactctaattttctccttcgatcatttacctctcggcaagtcgacctctctctcattttctgttgatttatttattttttattctgaattataattcaatttttcttcaaaattgcttgttctaaaacaggtattacgcgaagaagagtttgcacctggtaaaaatatcaatgggtcaacttttgacacttcggacagtgctaaacttcttgttctccgccttcattctcgttgggtagttgctgctggtggattcttaacacattcagtgcctttatatgcaactagtgatgctcttttaattattttagtttttattgttagtagaaatgatacgaagtgtacatgcataaactcaaattggaa

SEQ ID NO: 83736 - DNA, 516 bp, Cannabis sativa
tcatcagtccatgaagcaactagagtgacgtactcgtgtataagagctatgagtccgtgggtgtaaggacccaatggaagcttgaagcaggaacgttacagtagaggcttcacatggaagcccaaaaaattgaggaaatagtatattaatatatatagtaaatagtatatccaaaccgagttgcatatgtatgccgcctgacttcagtttattggtacatgattgtcaaattgttttatcttctttgagtcatgttgtttaatttggtgaacgacctgtgaacaaagttgcttattatttggcgcgtaactcttattttttctcaagtcatattttttaggattagcagttaagtcttgaattgcgtaatattgtaatggttgatttttttggttaatgaaagttaatctttattcaaaaaatatatgtacttgagtttcccaccttcataaagggccttgtctttaatgatacctaaccaaaaaaaatcattttttaaagttactatttgttttg

SEQ ID NO: 83737 - DNA, 1213 bp, Cannabis sativa
tttgaagttaaatttagttaatatgtatttaaaaaaagttatactcttcaacttctcccatataaatagctctatgtgatgtaaaggcccattcttttcaacgattaaatgtttacttgggcccatttaatatattatcttattatctaatatttaatgtatatactaataatattttttcataagttcgggaccttgagcgtttggggactcaaagcgcatgccttgctcgcctcaccttattttaaaaaataggtgtgtcaattttttctcagatcctaatgaaatccccctttgtatattatacaaaaatattgaatttttgataaaagattataattttactatcatacagaaatttttacaaaaatactattttttttataaaacaaccataaaacaacaaaacaaaataattaaaaataacagtagaaacttaacatagtatacagtatttttgaaaaaaattctgccccaatacaaaaaaaagtaagaaattttaatgtggtataaaaactccattattgaatcaatttatgacccattccaatccatggttttggccatattagtgtatggtgtcattttgtccattcttcccaattctttcctttgggtttggatgaagtgttttatacattttaggcctaaatagtaaataccattttacatctcaattttcgccaaatgacaacaaaaaatcccaactggatatcttgttctttaatgaaaaattaaagagaaaaaaccaatttcaaccagtttggcaaatctacaaaatttcccactgaattttgaaggagcaatattacaattattttttttttttacatttttatgagattttttgttctcatactcccttgttataactagttaccaaaatattaaaataatattttaaaaaaaatatgatttagtagtaattagttactatcgtatcatttataataactacatcaatttttaaaataattaatttgtaactagtaactagttattgtaaggaaaaatgatttgcaatatgaaaaagaaaagtccattaaaatattaaaaaacataagagagaaaaaaaaaataatcatattttgttattttgtccacatatatatatactaggtgattgttacgtgccaagtcacgtagtgttagttttatttaatattttagttttttatttttattaataattaaaatagtataattatttgaa

SEQ ID NO: 83738 - DNA, 710 bp, Cannabis sativa
gagcaagtacacacatcaaactctgtgcgtacagtgataccaaacatacaaattttaagtagaataatgaaactaataattggtgtaactgtttatttatatagtcctttttttctttattattattatcaatacataaatatatataaatttttattaactaataatttggagttgagactgtactcgtatttttaagtgaaaaattcatcttataacacattagttttgcaatgacagttgtctgtacggtgaaacaatcttgaagaacaatcgagttgtcacatgacaataaatctatgcttgttgcatgaaattagttctgtccatttgatttttaatcaaatttttcactctcataatgaatttacttcaataccaactacttttcttatggagcctcatgctcccacccatgcatcatcatttttgatgtaaaccgatcagtcccattgctcaaattttattattctaaacatatttcaaaaatttcaccatatcttacacacttacaccatatataccttacacttgtcattttattattttagggctcaattcatataattaaattttttttgtaaatatctactttattagaggtgatatttaatatacatgcatggtggaaaccaatgaatagagaatgataattgatgataatgacaataattaataggtggacaaaaaataaaatggaaattaagatc

SEQ ID NO: 83739 - DNA, 538 bp, Cannabis sativa
ggttgaccatatctataacatcatttttgactgtcgcccagtgctgcaaatagaaccccgtggacattccttcaggtccaggggctctttcttgtcccatggagcggatgcacctttcaatttctctttcagttgggaaagccttcaattgctcattatcttgactagaaataaaacattcctccaggcagtttagagacgggagagctgctgtttttctatcagtgtatgtgttgttggatcttgcaatgaacagattagcaatattactaagatttttctcccacccttggtcctccaaccggacctgctgaatgtagtttcgtctacgacgaatcacagtggtggccatgaagaatttcgtgcatctgtctccctgctgcagcaacttaacccgagatttttatctctaaaaaatctcttcccttgcgagggcttcgtttagtttgtctctagcggttgcaaggtcctctccgtttacatgcactctatcttcaagctgctgcagagaagctttcgcctcactaacttggttacc

SEQ ID NO: 83740 - DNA, 633 bp, Cannabis sativa
atttggtataaaatattaaccttctaaaaagaaagggaatttctacttacgtattataactcttacgcttccactttcaatgaataacactcttgtctttccaaatataagttttaggccaaatagtacttgagtagtacgagctactaataagatgttaaaattatcataaagcatctaaaaataaacatttggatagaaattaataatattttgtgttaatttcatacaaacatattttattataggaaatttttcatcttccgatctttagaattgtatttcaatggagcattgttatccgatgcacccatattattcttactgccattttcaatggagcattgctatccgtatgcacccaacataaaatagcttttttttttttcttatctaggaaaatgacattttctaaaatttaggatttttatttaggatttttacaaaatttatattatttttatattttatttacaaaaatatgatcaggcgtatatttaaatttttatatgggttatgttttgttttgtttttgttttttaaatttttactgtaatgttttgagaaaggaacaataagaaggagaagagaaaataagagggagggggttggaagagaacgtggttagaattt

SEQ ID NO: 83741 - DNA, 515 bp, Cannabis sativa
tttaaataaaaaagataagaaatacaactagtttattaaaattatatattaaatatgtacaaagtatagtgtataatatatatgtttggtcgcttatcgatttaatcggtcggtttgccattgacactaaaattgaccgtgcaaatgaagttttaacacaacgcgggttttttggtttttttcgttttttcaatgttagttttttcggtgttcgaacggtcggtgtactcagtttggtcagtttctttgattttttgcttacccctagtgcatggtgagtgtgtgcatatgttgtgagtctcgaggcttgcatgcaagcccatgtgggggcctcgcatgcgaaccgtggtgtcacatgtgtgagtgttgagtgcatgcatgtgtgcatgttgtgagcctcgggggctcacatgcagggccgaccctggaaatatatgggcccaagacaaattaaattttgggtccctcaaaaatatataaaaaaatatcaaaagaaaagtgttatgggatttgaa

SEQ ID NO: 83742 - DNA, 881 bp, Cannabis sativa
gctatagtatcttttaaatataaaaggtttgataatgctgtatttttttttaaatgaatgagtaaagatattaaagactataggtttattccaaggtaaacgcaaaactcattaattttatataagaacaggtaggaaaataaaagtttacttcaaatgattacaattttttatatgttctttagattttctttagatttggcacaagtgcatacttttctttttaatatattatatatattgaattgggagaccccctttattttaatttccacgaatagtggtagataaaatttaagagtttttatagagtgatgaatgttttgttggagcatacatagatttgtttttgtggactatgtagacacaagtcttgttatgatgtgacaaattacttttacgtgtgttcttaaattatatttttatttcctcttcaaaaaaaaaaaaaaaataattacatttttattggtctgaaaataaaatatgatagagaagggtgagtatatctaacacacacgtctcttgctctaaaggtttcttagaagatacttttggctcaacggacccactgcaaacactaatatgagacgaattcaatttttttaattatgattatgattcttctttaaaacgagacgttataatgtaaccatttagcttctccatggtatcataatataattgctaaataaatcgtattacttgtaatactttctttttcactatattattcataacatttgatttcagattatgtgcgtgagctaacataaaaaaaaatggaatataatgctttagttttcaatttaaatatggatatatataataaataaaaaagaacactgtcaaataaaataaaaataagaaaaaaagtttatagc

SEQ ID NO: 83743 - DNA, 2011 bp, Cannabis sativa
aaggttagtgcaaggaggttgtatgtagggtaggttgtattcagggtaggttatgtactcaactcctataaaaggaaggttgaggacacataaagaggacatcagaaaaaaaaagagtttctctctaaaaaaaattcaattttcatcattgctccctattctcttcccttacacacaaacatcccgtctcatcaattttcttcttacacataaccatcccgtctcatcaattctcttcctacacacaaccatcccatcacctctgtcaagaaccaggttgcctatttagcaagctcctataaaaatcaggctgctcatttagcaagctcctataaaaaccaggctacttatttagcaagctcctataaaaaccaggctgcctatttagcgagctcctataaaaatcaggctgcttatttagcaagctcctataaaaactaggctgcttatttagccagctcctataaaaacaaggctgcttatttcataacttttataaaaaaaacaaaccgttcacactaccttccaacacatcagctcaccaaagtcaccacgtatgcccgagattgatcattttttaaaaatatagacatcatttgctattgatccttgtaatatttcacattaataaagatacacaactgactgtttgctaccgtagacgtaggcaaatacaatttgctgaactacgtaaatttgtgtcttatttttatttaaaacagtatagatatatatatgatatatatttacatatttatatatatgatatatgtaaaataacatatttttatattattaaatgtttggctggaacccctgaacactaagtttacccaactctctttccctcatattgttttctctctacagtttcacattaatttcttgagaaaaatcttaataccctttaattgttctactctctccttttttatatagctttttattttattgtttttatttctaacataaacttactaaatgtaaaagtgatgaaagtagataaaatatctacctttatttgaattggacaaactattaactatatattatatatgaatagtagtctttgggatatgttaattaataattacatgatctaattggaccaaaaatttatgtgaaaataaaaagtcataaaatataaataaatagaatcggggagtaaaggatatgacacagaataatggatatcccctaaagaggtcccaaatttctctgccacaaagcatataatttcttgacttttattttttcttctccattgcctttaatcatggacagaattataaagagatcaaaaagaaaatgctcaaacagaatctcaattttatttcctcttcgtataattaaggagaggtagctgaatatattagatagatagcttttcaagaagatatatgagaaaggtaatatggttgccactttcataaatatggagaagaatgtatgcttaattagaaagtagatcgcaccaaattatattggatatccataagcatatgctatatagattttatatatatttatatctctttatctctaatcaaacctttcctctttctgatgattatatatatcttttcaattaacatctatatatataaggccttccatgactctcttcctctctccacaagccaaatcatgaacatatttttatgaatacaatatcatacagtttggtgatagagcagctgagcgatctagttgtagggcttctctcttttggcaggcaattatataatggaattcattttgtaaatatatatttaatgtgtatatatattatatatataacttataatattatattaattaatgtaattaatgacccgccaaaggagagttgcccttcatctatttcggcttaaatcatatgaaaaccctatattcttcgtttgcaggttgagcctaaagtttattggtttagatcttcttcatttgatgggtgtcatgtaattcaaaaggtatgtatgtaattatcaaaagatgattatatatattagat

SEQ ID NO: 83744 - DNA, 1251 bp, Cannabis sativa
  modified_base (56)..(59): a, c, t, g, unknown or other
taaaatgtgatttctgatctttatagtaaatcagattatattgaaatgggttttannnngggcacaaaacccaacagtgtggacttgctcggtcaatgtgtgttcaacatgcaaggtgggtgaacggatccgtctttttggatcttcaagatgtcctttcatacctcaaggcatggattattctgataaacaggaatcatgctattggggtgggcattgacggtgatactcttccagtgtattgattacactcctttcgtgggggggaaatctcaatttgaaaaccaaattaccagtataatcattgagcaacttataaaagatggtaaaaattctcatttgcattcttttactcatttacaaactcaaggctatgagagaaaattttcactctctcgaatctttaagaattgctagaattctcaaatttttcaatgccaattccagcttcagttttgcgtattcctttcagcaatatctacagtaagtttctaaccattctatgcattttcatccttaatctattgcattttacacatgtttttctacaacattttggtttatgctttgagtgttcttcactgctaggcttagaatttggattttttttatcatcgaatatgctcacacggaccttagttgttagattcttgggcattcacctatttttcctttagaaaatctctcaaaataattttcgtacggtgctcggatgaattttgggttcgtctatgttcttgagtaccttcaaaccaggatattcgtcatttggatgaagtttcttctcttcgatccaaaaattattttggttggattatgggaattgttttccattaattcttttctccttgctcagcacttacctcccattctttcttttgtagatgaacccagtggattctagggaggtaagaaccgcataaacaaagacttgttgcggcttcttcttaaagatcaacctagactccacacaaagtcttcttcttcaagccaaagctctacttccagtttcgatgattgggaggtttcaagcgatgaagctaaacctcctacaccatccgtgcaacaccattattattcggactgcattggtgggagcatatacaaacaattcatttgggaatacagcagaggattaaggcattacttgcctttcgattgaacatacatagtccatgtaggtgtcccaaacaccttgccagaggctgacccagagccttttaggagacttgctgatgaggcagagatagc

SEQ ID NO: 83745 - DNA, 1584 bp, Cannabis sativa
tataccttataactataatgaatcaacccaattcctattcaactgactgatacatttcgactaacaataaataatcctatttttgacccttttttttacttcttgcaagcttttgaaaccgaaaaatttcatttcgagagtgccaaagttgaaacacaagagctatcatagtagccgagtacaccaactttttaaacttgctgatattctctgaaacccttgcttaagaggttacagtcaagttccatcctaattagaatttaatactctgaagacaggacctactgatatagaactcgaaaaagagatgttccatagttttatctaccaaattacacatcaaacaagtaggatcgacagagatatgatacctgaatagcctgtctgtagtcttaagtttaaccaacacaaccaaccacattataaagttatgtcttgggaaatataaacgcctccaaacctctttattccaaacaactcgatccttcttagaatttctagcctagttaaggtcatgtcattcagattaaaaaatgcaagagccacttaccaatgcctcgtgaatgaaatattcgaacactagattggtcgcaacagttaggtatatgtggacaatatgttagtaacatcagttaaaagcaaagatcgtgtggttgacctcatggactgtttcttagttttaagaaagtacaaaatgaagccaaacctaaaaaagtgttcatttggagtctctttaggaaattttttgagtctcatagtgaatgcgaggggaattaaagctaaactagaaaaaaattaaaggccttgctcgatatgccttcaccaaagaaacaaaaagaagtccaatcaataaccgagaagatggcagcactgaacatgttcattttgaaatcaacaaacaagggcttactatttttttaatatgttatgaggcaacaaacagtttgaatggacagaggaatgcgagaaagaattttagggaattaaacagctcttgtcgacccgacctgtgctttcaaaactagtaattggcgtgatcttatattttacctatcagtatcagaaaatgcaataagtgcagctctagtgcgagaagaaggaaaagcccaattaccagtatattacgtaagtaagcgtttactggggtagaatcaagatacccatatctcaaaaaattcgcacttagtctaattcatgcctcaagaaagttaaagaccttattttcaagaacacccaattcatgttttgaccaatcaactattaaggccatttctatcaaaacttgacgcttcgagataattgataaaatagtcaactgaattaggaaaatttgccataacctatcacccatgagtagccatcaaagggcatgccttattggatttcttgatctaagggataaatattgaaaaaatagagaataaatcccaaatcaaaaagtatggaaattatttgttgatggctcatcaaacgacaatggctcgtgtaatgtccccgcttcaagcctccattgggcctttacacccacggaatcatggctcttatactcgagtacaccattctggctgcttcctggattgatga

SEQ ID NO: 83746 - DNA, 849 bp, Cannabis sativa
gcacgacgccgttgtcggttgatcactttttgaggtcaacaatatgtagtataatggactaagcctttccaacttgagcaagattttgaaattggactttattgctagcactcctctaaaactctaaaagtataacagatactgggatcggagctttaatatagtcgcttaaaagtactattttacaaaacttttatttagatataataactttaatttttattttttcaccatataaagtgaaggtttgaacttattattacactcataatttgcctatttttttaacaacttttggtaatttcacctacttttaggcctatagaacttctttgttgtaataagttggtgaatttggagtaattgttttagaaggtgcaattgcaattgttatagttacaactatatgttaaattttagagtaagtctattatacaccttttaaaggggtgtttcggtagatcctttatctatttcagcacctaaaaaaatatttgtctatttttttataatcatgtatgttatagttatttagaaacacatgtaatttttttaaaaaaaaatcgagtagtttaccatgccgaaaacaaaatttacatattatgttgtacgaaagactgttttctttatacgcatgataagtaactgtttaaaccttattttcgacattataaactattcagaatttgtaaaaatttacaagtaggcctaaataggaacagcgtaagcgatcatggaaaaaagatatactaaaaaaattttctaaattcaaaacagataagaacgaccctttaggattcttttacaaaaattccctaaactttatttagttaggaacaaatgtctgat

SEQ ID NO: 83747 - DNA, 5130 bp, Cannabis sativa
accatttcttaagaaaaaatgaacaaaagaatgaaaaagctagaaggtaagatgtatgatctacgttataggattgttacaacatcaatggaagatttggaggatgatgaactcgacaaggaatcctcattctcaagggaaattcaaatggaatcatttccacccattttcaaggagccctgcatgatgccatatgatggtattgtcctcttttaatgagctaatgaagatgtaaaagtctcccataaggtaaggtgctaatgctttgtggttacgcttagaggggtcacatataagtggtttaagaggtttggaccaggagcaattatatcgtggaaattttttttagaagaattccttcaacaacatcaagcgtcgagtgattacattatgcctataatgagtatcaccaatgtaaagcaaggtaggaaagaaggcttaagggggtacatccaaagctttaatgccgaagtcaccaaggtaggaagaatgtccaacgatgaacataattttagcatacttgctggaatacgccctgggagtagattatgtgggaatatgttgaaaaggaaattggatgacattgaagacttttataagagagtggaaagatatatctacattgaggaaggaaacgaagtcttggaaacagacacaagcaaatgtactttaggaagcttgccagaaccctacagggtctactagacaataaccccaatgctcctacatccaagtaaagcctctgctatacaacccataaaaataaatatccaagatatccctctaggtaatgttcccctaagcaagaagaagttcatggtgacaggaagtttgcttttagtgtgctatcataaataaaagaaggcactcaggtgggcttccgagtcaaagtggatgatgttggacacttgggggcacaaaaaaagagagaaagggggaaatttttcaaataaacaaggacactcatggcataacgctaaaacgagagcgacacctctaaggagtaagcaaacattttccaatcaagagggtagcgcaattaagtactattagctccctcccatccaagtaaaaggatgaggaaataataagaggttgagattgctcaaagaaccgtactccctcaaatggatgcttgcttaccacaacagaaaaatggcttggccaaagagggaccctagagtcgctcagccaatgctaattacgaaaatggcttggccaaagagtcaccccagagtcactcggccaacaccgttacgaaaatgtcttggccaaagagtgaccctagagtcactcagccaacgctgattacaaaaatggcttggctaaagagtgaacccagagtcgctcggccaacaccaattacaaaaatggcttggccaaaaagtgaccctagagtcgcttgaccaatgccagttatgaaaatagcttggccaaagagtgaccccagagttttttggccaatgccgattacaaaaatggcttggccaaagagagatctctagagtcgctcggccaatgccaattacgaaagttgttgggccaaagaacgatcctcagaatcgttcaaccaatgtcaagtaaaactgttgctcgatcgcatgagggatgagatcgctcgattaaaaaaggggaaaaagggccagccaagacaaggaaaattcattacaccaacatattggcacgaagtaaggttcaagcaagggaagtccctaatacaaagaagacaatgcctcaaagaaaaccaagagggtctcacactacggcaaggcaaattccccaactcactcagtcaataagaacacttaaagaattcttgtagactgggggcaagtgttaaccccaaaaatcaatagagttgattttcaagattagtctttagattccatgcttgcaagtctcggggtatatccgtgcaactcggagttcaaccccgtaacaactaatggatagagtagtaagataaccataatatgttacaattattggaggatttttatagtgatttgttcagaattagatcttgtcataaacataagattcataggactctttctcatcttttcaacacatcttgaattgttcaatttcaatatgtatcgagagagttatggccaaaatactaagactattgaattgtgaaaactttgtatgcgagcccatggctattgtgcgagcccatgggttgttgtgcgagtccatggctattgtgcgagcccattgactattgtgcgagctcatgagctggttggcgaaccatggagcatttgtgttggtcgtggagcctttatgcaagtggtggttcgatcggcggtggagcacccgtgctattctatgtttagtcccttagtgatccaatgacgagagcgcaggcaaaagaataagaggctatctctaggccattacagcctataaatacccccatctcaaatgtgaagggggttggaaaatcatgcttgtaaaactatatagaaagtaataagaatttactgcactattctctccattttaaggtcgtaatgtgggtatgtctttcatcttcttcttcattatatttcttaacctaaagctcaagttaattttccagccataagttagttgacgaattcttaccgtcaataaccagcagtagctaaaaacagttataacaaactaaatatagctacaaaattacgtcaaaatatatatatatagctacaaactaactaactcactcaaggacagctcacaattaagtaactcaactaactttacaaagctaaacttaataatactcaataaaaatgtcttagtaatttgtattttttttgtcatgtttacagttatgtgttttttttttttgtttctactaattataattacaggtaaattagttataatttttattgacctttttttttttttctgttttctttttctctttaggtttctcctattattctaatctcatggtgttaaaaaaatgaaaagaaattaatatattttcttctcactgtttttcagtaaactattttcatatttttttaatttatgttattattttttatttttgttctaatcagttaatacattttaattagaatatattgttattgaaaaaaaaatagtgaaaatgataaaggtgtcatggcacccaactcctaaaactagtgtgtgtatatatatttacatatatatttaggttctgtatagttggccattctgcgtcccaaccaacttccttctcctttgtcatattgatttgatatcactttttccactctgtagtgttacctctatcttcttttattaatattacgattatttgaaaaagaataaaagaaacagaatcatggcagcttcttccaaactctttctcaacaaaaatatcatacataataagccgattccgatcaccacccttagttactcttcattgaactgttacaacagccttttatcaagatacaaaaacaaatctccttctttgaacataatcacctcatgttcatcctcacaatcaccaccatcatcatcagaaaccaatttaacccctgaacaattaaagatcaaacactactatgacccccataatcatgatcgagatcaagatcaagatcgtgatcgtgatctgggtttcgacgaagacgacagggaactaagtgacatatggagagaaattcaagggtcaaaaaattgggagggtcttttagacccgctgaactctcatctccgaaaggaaataatcaggtacggtgagttctcccaagctagctacgactcctttgactttgaccctcactctaagtactgcggcacgtgtaaataccaaggagcccatttcttcgaacgcctcgaaatggctgatcgtggctaccaaatcagccgatacctttacgccacctctaatatcaacctcccaaacttctttcaaaaatcgaagatgagcagcgtttggagcacacacgccaattggatgggatacgtcgccgtttcgaccgacgataccgagattgccagactcggccgacgggacatcctcatcgcgtggagaggaaccgtcacttatctcgagtggatatgcgacctcaaggatattctccgaagggctgacttcggtactgatccgacggtcaagatagaatctggtttctacgatctctacaccaagaaagaacgcggttgcaagtactgctcattctcggcgcgtgagcaagtactcgcggaggtaaagcgtcttttggagtattacgatggtgaagagattagcatcactgtcactggtcatagcctaggagcggctcttgccttgattagtgcgtacgacatagcagaagttggactaaacgaagtcgtttgtgatggaaaaggtgataataaatcttccaaaatcccagtcactgtattctccttcgctgggccgagagttgggaatttgaagttcaaagaaaggtgtgatgagctgggagtcaaagtgctgagaatagttaacgttcacgacgtggtcccgaccgtgccggggataataacgaacgaaaagtttcagtttcagaagtacattgaggaagccatgtcgtttccatggagttacgcacacgtgggagtggagctggctttggatcacaccgaaagcccatttctgaagcccaataaggatcccggctcggcccataatctcgaggcgcttctgcacttggtggatggataccacagtaaagggcgggggttcaggttggcaacgaggagggatatagcgcttgtgaacaagaactgcgatcttctgagaagagaatatggtgtgccaccaaactggcggcaagacgagaataaagggatggtacggaactgtgatgggcgttgggtgttgccggagcggcctaggttggagggccacccaccggacatggcagagcatttgaagaaagttcttaggaatattaatgatgataatggaagtagtaatggtaaacagcagttgggtccagcttaattattcaattaattaacctttggtgtcaactgtcattctcaactactaacaattaaactaaactcgagttaattatcttttgtgatactcctgcatttgcttgtcaattatattatattatattataaatgaaatggaatagagagtaaataattttcatt

SEQ ID NO: 83748 - DNA, 606 bp, Cannabis sativa
ggcctacgaagtaatcggtcatgaccaattccttgacctttaattgctcctcaagtaaagaccttgtactgaacctcttatatggctatctctacagttttaatacgctgagatggaagttctggcgaaagtcaagcatttacaaggaaaccatcagtaaaacaaccaaaacaaagttaatttaagaatgggagattaaggatgtgtgtcaacaatacctggcaactagaagtgtagctggagtgagggcacccttttcacatggaatctagaggaaaagaaccagtactctcggaggtcatgggttcgatcaatgtggctaatttggtagtaagagtcaggacacttgtctaacctaaagaagccaaacttctttttgtttgtactcatagggttagcctttacactgtaaaagtaaataatctcctatggggaaggtacttccaacttgttcatcttccaaaaaacacaccacccaaccaggagcctatacgacgaggggattaactggaaaggggctatcttgatcttagccatcaaagtcacaaaataggtccttaatcgaagatgtgctccattagagatgtgggaccagctccaagcact

SEQ ID NO: 83749 - DNA, 1190 bp, Cannabis sativa
aaaaaaaaaagttaaaataatgtttataaaacttatataaaatttcttcaaacaatacaaaagtgaaatttcttcaaaaagaaagttcctttttgtttgtttttcttttttaccaaaacaataaataaaaagttatatcaatatctatccacttcatgattttctcttgcggtacgtacctctttctctctcgcctgaacaacccatccgcgacagcacttacaggcaagacttcgttgagtacaagagcagcaagaacttcgacggttgtctcccttgtccatggaacagccttgttcggtttgcaatttctttctttttttttttctttcgggtatttttgtgattttatttgaattgaattaagttgattcaagaaaagaatacatttaagacccattctctatgactttaaggatttaattttgaattagtcaatgatctgccattgtcttcccctccgatggatgcccttgaggaaaaaaataggtttctgtttaattacatgtttgagtaatttaaaaatgactgccttccatggcagatctaaaaaaaaaaagggggggttctgagattttttcacccttattccaccatttctgactaggacttttttttcccttcgaatggagtccctttttcttttcttctttctcatatatctttcatctctgagatatttcttattagcagaaaagaagcatttgtttctatgctttcagttacctccgtaagtttttattttgttttaaatcaaagttaccactgataattattaatcattattgtttttgaaattttaattttttattaaactttatgaaaaaagttattttacttagtcttcggcgtgatcgtcggttaagttttttttgttcttccgatttacttagttcagtaaaattccgatcaatgcctgtgatgctagtgtttgagtttttctggtttgggattagtggtgatggttgaattttttaaattcgggtattgtagtagtgtgttggtttcaaaactgagtgtagctggtgcggtgatggtggttgacggaggctatggtgatgtgctggttgcggttatcgtatggtaatattgacctttgcagttattttatttttaattattatttatttatttattttaaatttcatatttttgttgtatatttttttcagttatttttaactattttt

SEQ ID NO: 83750 - DNA, 778 bp, Cannabis sativa
ttacaatgcttctatccatgcaagttggtattggaagaagcttgtaaccatcaagaatcagctcaccaacttagctgattgtgattcttttcagagagagaaatatactatagcagcaggttacaatttgttcactgttccccaaacaaaattgaattggtgtaatgaggtacgggctcggttgaacacaccaaaacatagtgtgatattatggctagcaatgctcaatattctgaaaacaaaagaaatgctgaagaggtttggcatcccggtgcaagattattgcagcttttgtgattcgagtattgaaaatgggcagcatttgttttttgattaatgtgtatctgtctactgcttggatgaaatcaaaaaatggcttgattggaaggcaaaaaccaggtcactcccccagctggttcggtggataggtagggcaagaatttcaaaatttaaaaagttggtttttgatgctactgttgcagcagtggtatatcatgtttggcaagcaagaaatgaggtcatttggtaaggaaaacatgtgaataaatgtcaaatagttgaagacatcaagtgaaatttgaagaaccggattaacatgttttttccaaagaaatttaaaagtgtagatagagattggttttatgctttatagatgaattgtaataatgaaggaaatgaattgaggaaggaaaagaaacactttgtatagatttttaaacccttgtatgggtgctattagactgttaatatgattgtgcaatacaactcactgatttat

SEQ ID NO: 83751 - DNA, 712 bp, Cannabis sativa
agattatttagttttaaaatcttttcatccgatttccaaacagaaacaagaatttaattgtttggtacttagctatagttctcatgggaacgatctcacttacttgagtcatacttattaaaacgatacgtatacttgcgtgtttaatttatcacaataataggtattcagtggcaagttgagctcggacagcatggagtgtatctcgtgggatcatgtaactgcgtgcgatcttgaccattttttgcggaaatctattttaaagttgttaaacctatttatgaatcttgtcttttagttttttttattttttatttttacttaatgttgacattttgttttaaattggacacccaattttaaaaattatttttgaataaagacatttgatgggagtttatttatggtattttaattaataaataaggaggttacatgaaaccaactcaccatgaacacagtagcacaatacacatttattaaaactctaccaattcacaataaaattacaaaatcaaataaatgtcttatattaatccatcttaatacaagattagcaaatcatgctcctcactacaattttacagtatgaacctaaatgtccaactgtataatgagaaaaaaaaaattgaaagtaaatattccaaactcctttggttgccacacctatggagacacacccacagaaaaaaaagaaaaactctaaacatta

SEQ ID NO: 83752 - DNA, 782 bp, Cannabis sativa
ttttttttttattttttaataaaaaatataatttattaagataaatccaatattataagagaatttaaaaattgtagacaagcatatgttcatatgtacttttctaaactattaatagatgctgccaatgtgtgggcaaccatttgatgatcgtaatatggtattgcaaaaatcactactaaaagctgctaataaagaattaatatttaataaaatagaccaaaaactaaaacttgagtgaaaattattaattcaagcgattgcaacaataaaatcactattaataatggagatactaagactaaattggtgcgtaagagtcatgtctagtgtaattgcaagcagttccgctacattaatagaaaattcacctaacacaccagacgaccaaaccagccgcaccacaccctcagcatcccataccattccccccaatttgacaaagcctctcttaaaaaccactgaagtatcagtcgcaagagaaaaggaataaggaggaggtggcacctgccgagtaggttgtttttcacctgggcttgcaaagcacaatcccaaatgaagaccccgctgaatatgctctttgaatttcgacaggtgattatgggctaaatctagagcaacatctaatcttgactgcttattagtagcaaaaaatactgagttcgatcatatcaaagcagccataaggtaatcatcatcaattcaaaagcctcacgaggtaacttttgaaagagaaagaggagatttttggcattggtccatatacacattgacagagcacc

SEQ ID NO: 83753 - DNA, 870 bp, Cannabis sativa
tcaattaagcctcctgttactcagacgccattattgccattgccaactgcccctcaacaggttttctttttcttttctcttttcctctttccgacaaattgtttaatggctataattagtttctctgttatattatactttataacttgctttattttgaacatagatgttgcctaggaaaaaatttatgaggaaaatactaggaaaattgaagaggaaaatgatttactaacttttattttgttttttttttcctaatatatttatagaagttcttaataacaaaaaaattatgtcaaattgatgtctcacttttctattaaaaaaattctctttttcttttcgatttgaatttaaaaaagagaatatataatcctttgaaatttgttttatttccttcctaaaatccaaattctgaacgttgttgctcgcttattagccaagaatgctttaaaatgtaaagctagtggttgtaggaatagggacctccctttgatgtttgtcaagctttgtatcttatttgtttgctggttcaaggtattccttttcggtagaaaaaaaaaatccaaattctttgttcgtgttccaggtgatttttagtttttaatcaaaattgtatattcactgttctcaagtatatgtactcattcaatggaaacaaaaaaaaaaaaaacaacaaagagaggagagagaagaccattggtgaatatatggtgaaagaagaataggtttacttgctacttgtaattaccaagacttcgtcattaatatattgtattattttgttctgtttcttgaaaagtgtattattaatatcataaataattatgtatgcagacagtgccctttactgaagagtttgattttact

SEQ ID NO: 83754 - DNA, 679 bp, Cannabis sativa
gagtctaataagggtgactaactctttacaagaagaaaaccattttctttggtaaaatcattttaatttagtaaaacagctaatataataaaaatacaacaaataaaaacatgggaaagatttcgtgctgggttttatattcatttacatgtctaactggaaatatataatatgacttaaaaacattaagtacttcccaaccaaaaagctgtcaccaactttatgcatttatacgataatatatatataaagattatatacacgtagttgtccaagtcaagtggggagtcacacatatttacttattgaaagtcggcttattattaagaaggttgaaaataaaaatctggttagaagtttgagcgcatttaaggagatgataatggctatcttatagcaataacaaccaaataaaggaagctaccatgtgtgtacgtaggataagattatttgctgtgcgagtgggtgcgggttataatatttctttcaaatgaaattgtatgtgcagtttttataatttttcaaactataatcacattgcgaaatcttaaacctacaaaaactacactgtgaaaatgcgagatggtgcaatccaatttgaacggtttacactattatcattatcaaatattataattaaaattttaaaatcaatcttaaaaagttttaacaatataaa

SEQ ID NO: 83755 - DNA, 703 bp, Cannabis sativa
ttatcttttccttaccaccataagcagctttggtattcatttgtgtctcatctgaagtgagatgattactagcaccgctgtccgggtaccaactttcatcattcaaggtttgaggtgtggccacaagtgcgctgaactgcttgtcctgcgactgatccgaggctgtaggtggttgttgtcccatgtagttttcatcatagcgattatagcaaattgctgctgagtgaccgtacttgccacagacttggcaagtcagttttgagccaccaccagcccttccacctctgcctcgtccacgataagcacctctgcctttggcagtagactgattcgagcttcctctgctgctgtgctgattagtattggagaagcgaggtgtgttgtttgctggtttttgagcatagttagctgtaggaactccaagggagtagttcatcttgcaggagttagacaagctcgtagtctctccaacctcctgtcaaatccgagtagtgtattatgcaattctttccaagaaacctgagatttggcttcgatctgtacaaaaatagagagatattctacatcaaagccaccaagaatattagcaaccaagtgtttttcaggatagggttcccctgcgagagcaagggagtcggcccacatccttttttgtttcaggtaattagacatggatattgaaccttttcttacagtctgaagt

SEQ ID NO: 83756 - DNA, 700 bp, Cannabis sativa
atatatatattcttattgtttaattatgcaaatcaattatcatttgctgctataaataatgcggtatgggtatgtgatcatatgtgactagtataccattatactgtacaactgtctaattaataataatattaatgattaatctataatttaattaacttcgacacatttaatttattatttgaattaatggaactgggtcgttgttataaacgtcaaaaattttgtgctaaactagtggtggtggtgggtggcacgtgccagcctgaacagacatttacttctttaatctagcttattgttatttgtttggttgaattggaggaatatataataacgtaattctcaagtaaatttttggctcagtatatctgcctagctatataaatgacccaccacaccactgtatgtatgtgacactataaattgattaatcgaattggtcgtgtatgcttaatacattatttttgtcatatagctgcacacaaacaaacagaccattattaattaattaataattataactctggctaaggagcaataatcaatttatacaattaaaatgcatgttatatgtttagattttttttaagtgatttatttgatatgtacgtactaatatatgatttcttatgaatgaattcttaatttcttccaaacaaaataaaaataaataacaaataattattattaacaaata

SEQ ID NO: 83757 - DNA, 1226 bp, Cannabis sativa
aaatgatagattttaaaaaagaaggtaaaaataaaagatgacaatataataatggtataaagtgtaattttctctataatttcctcactttaatacagtagattttgtgttgtatatgagattgggcttcaaagtatttacactcaagcccaaaaggactttgattggatttatcaaaggggtaagttgaataatatcacttttattaatcaattaattaaatttaccttaaattttatatttaattgaaacatacatctttttatatgtattgtacctaaaatattctgacataagagagtcacatggagagtatcttgaagtaataagggcaaaattagtacaatatttaaaaaaaacggtaaaaatgatagactttaaaaaagaaggtaaaaaataaaagaggagagcagacgaataggagagaaacacgtgtatgcatgctgtagacaagaaaaagacgctgactgggtgctgatggggctggcatgtcccatggattgtgggctcaaggtgagtgaaatgggctgggcctttattctcttgggctaaaatgcccatctctgctctttttcacaactattttttttttctatttttccagatttgctacttttatttctttctttgttcattttcttttctttcttttcctcaacaacaatacacttcaattcttacaaaaataacaacaaattaaattaaattcaaatcaaatatatcttcaatataaatatatatccttaattccataaaaatattaatttaaactttaagattaataacagagacaccatattacacattcaattgtaaagccacatgatcttaatttccttagcaataagcaagtgtatgatgattttcatgtttgattgttttttcatttttgatgaaactgttggttctaacatttagtgatgttctggatgtttaattgatttatcttcatgatagtaatatgttcattttttttttataattatgcaagattgattctaaaataatggcaaggcaataaaaggtgtttggttgctcaatatggttcagaatgtataatgaataaatcttaaaattgtaattttttacacttcagcggtgcataatattttttataggtggcgtcctacgaatctacaatttgttattgatattgcaaatcaaacaacaaaactatatcttatacaaaattcaagatcggaagagcgtcgtgtagggaaagagtg

SEQ ID NO: 83758 - DNA, 693 bp, Cannabis sativa
acacttacatgtcacttaacagaatggtacctacagaagttctagaattctaacagaaagtatttttaccgccaaattttttacttggatatttatctataactttgagatagacttaagtattaatggcgcaaattactcaataaaatatgtacttatctctttacttttattataagcaacccactcaagatggtcactgaagaattttcttccatataaataatttacataatagctagaatgggaaatgattaataataataaaaaaagtttgcaaaacataatctaaaactttgtcagatataaaacgttactggcctactactcctactacatcaacaacacttgaactattacagatgtaacaaacttattttcgtgaaatcaaccaaaaaaaataataaatttttaattatactattattgaataatacaaaaaaacccagtggaattttcttcttaaatgcttttgcaaagaagttcaaagccacttgctttcaaagaaaaccacttcaagcatacaataagtatatcagcagtcaatggacttggctgaaatgaaatattcattattcaactacaagtgagtatgtagcaagcaagtacaaagggcacattcaaaaaaaatattatttttgatgtacaaacaaaaacactgttagacaatgaatgaacaatttagattttttt

SEQ ID NO: 83759 - DNA, 511 bp, Cannabis sativa
ttttaattaacacggcataaaaaacttttgcagctctctttcactgtttcattaattaagaaatattatattgcttctttctgtgtctgacggagattgttagtgcaatttgagccatttcctacacagtagtcaaattcgttgaaaaatcaaatctgtcgaattaatttttgcttcttattcttttgtttatttctcacttatttgaaactaggcccatcttatcaattattgacgagttcataattaagggactctgacaaatgcacacgattttctcttaattaacggttcaagtactaagataaaagagaaatgagagcattactctataattaatattaaagacattaaacatttatgttgcattaaatattaagtaggttagtgaaaagtttgagctgttactgatataaaatccttgaactaactttaactggactggacacaataatatcacaccagaaatgaatgagcttttctaagtctaatctttatgagagtcggacta

SEQ ID NO: 83760 - DNA, 1622 bp, Cannabis sativa
agggcataaaacccaacatcgagatgctatgattgaagaacactggatcatgattcacactttgcctgtcgagagcttgtgatccatttgcctctgctctagctgcattgtttcccatagtcgccttgttagccacaaggggcagaaaatactctgataccaagttaaatcttctggccattgttgaacataaagaaatgaatagaaagaaaagaagaagaaagaaaggaaaggttgaagattgtggaataaaatcttattattcaatgaagcaggggagagtatacatacaagtacattgaaacagaaaacaaccaacaacattaagtggcagcagctccacaaactaacaaatacttactaggatgagttaggtaactagctctaactaactgagaaactaatcagttataacaccgaacaataaattttttgctcagtgcatgtgaacatcatcaatcaattcaataaaatattaaatgttaatatatatatatattttttagaaactatttacatatatataatgttgaaaaaattatatatctctatgtatatacattattatatttatgagtatatttttttatgtcaagatatatatcgatttttatctttataatttttcataatgtaatatgtattattagatactattagatttatatattatagtgtatattattatgtaactcaaaagagaaaaaaaattggagtattattatatattatttattagatagatgaaaataaatgaaccttgagagcaaaatatataccaattatgaactatttgaataatgaaattacactataattaagtttctggccttatctgtaatttattaatttttctctctactctttctctcaaagtctttctctcgtttcttcgacgaaatggccatgcctaagtttctagccttcatgatcttggctttcattgccatttccatggtccaaacaactgttatagcttctaatggcaatggaggtcatcacaacaacaagaaagaatatggaccaaggagtgtcaagagttaccgtaagtattttatttttaattattatttttgttattattaaattattatcctaatcgtggcttgtatcaagaagagtagagagaaaaatgccaaaggccaagccttggaataataataagatacatttactcttttttaatcatagtatttagattaggattttgttggagttttgcttggttcaaattcctttttttcgttttaaattaaaatcttgatgcctccatataattttttttggtttgtatgtaattgtactttttcaagtttttgcgattgcttgattttgtcattataaatctaaatatcgataagacctgaacttcaattcttatatcaattgttattagtgtgcatataggattatggttttttattttattggagacttctctattttgatcgatgttgtttgaatttttattgttatgaatatgtttttttgccatactgcatcaactttcgtccgattttttttttttggagaaagaaaatgtttttcgtgatgataggaaaaagtccactaattacaatgagttaaggaaaattatggcgacattaaggtaaaatttgctc

SEQ ID NO: 83761 - DNA, 934 bp, Cannabis sativa
gctgcacctgtcaggagaaggagatacacaatttgtattgtcctttccaactaccctttaggtacctatgatgatgatggggagccattgaacaaactcgaatagctttcggtgataggtttgtatcaagtcttaattcagtcttctaagcctcaaattctagatgttagatcacaaggagacaggtgggtctctcccgcatctttgttctctgctgatagttttgatgagatactatctagtggtctagtgagcggtgtccattgtgagatactcgctagagatcagagggcgcaccagctagcccttagttaatggcttaattggaacattatatacactatggggcagtgttgccgctccaccttacttcaaaggcattattgcttatttcgggatgtgtccaacataaatctccttaaaaagtatcaagtacctttcggcaatgtttgtattatataaggagctaggctagcctcagcccactccttatgagattggatactattttgatctgaagtctaccccaaagcgtaacaggacaaggtatttctactttagctatattggccattagtggttgggtgacaccaacaacacaatcatgtcaaaagttggtgggtacgccaggaactactttgttgctttggacattcaaaagatccaatactaccagttctagtgggtgccattttataagcgctccatccctacattgcagatgagggattgggtgaatcacatcctgtccctctctgcagggaagagaaacataatcagattggccagtgtggccaacttttagaagtacagcgtgtaccctcctgcttctggagttgtgggagcccagggcctattagtttgtgtggatggagcaccagctactgagggagtttttacataatgtatgaatgcatggttcacatgatttatt

SEQ ID NO: 83762 - DNA, 562 bp, Cannabis sativa
  modified_base (147)..(150): a, c, t, g, unknown or other
attattttattatatatttatgatatatatgatagattattttatttgattttataatttaattttttttattatttttttctgtgaattatttatttttatttttatttatctatttattatttatttttattttaatttaagttnnnntttaaaaaaaataaataaaatagtccagtccattaatcttaaatccaacacaaaattactttctgctttattcaattttttccagtccaatccaatcctacgcatacaccgttaatatatatatatatatatgggtttcaaaaatatatatagggatttaactgtatatatttaaaaaaaaataaaaactatcaatgaaaaagttaaatctcaaataagaaacaatattctcaatgtaaataaaaaacatatagtattactagattaaatgccggcttatcatgacttttcaaagcaatgatgttaaactatgaattcttagtttaataaattaaaaataaaaatttgttatatacccattctttaagtaattaatatgaatatttcaaaaatgatggttctcaaatgtttt

SEQ ID NO: 83763 - DNA, 1685 bp, Cannabis sativa
tgagtctactacttgaaacgatacgtacacttgcgtgtgcaaaaatatcgcaacattaatctaacaggtggtgtagcaacatcattattaagaccataatcaaaataaaaaaacaaataaaaataattgcataaaataaaaaaatacacataagagaccatagatcaatgtatctaatcttcaaatcttcactaccatatacccaaaccaattcagaactggtcccaacccctttgatcgtaactctaacgaccctccaacacccaccctgcaccaactcgacccagtcaagaggctaacaaaccataacccctccccatcaaccgacccaccatcacctccatcccaccaccactgcagccaaatatagaacaatccacctgacaaaaggagatctctgacaattaaaccaacacatccgcaacactcaagcaaaacctagtgagacctacgaccatctcaccatcatagaagccactagaacacgaaggaagagagaaactaaaccaaagagcgaccctctagatctggaaacacaatgaagaaaaaaataccatcgaagaccatctcgaatggcacaacccctccgaccatgaccacacccaagcccaagaaaatgtcagtgagccgtggctgaagagggagcacagggaatcaggttcgcgataaaagcaaaaccacaattcctagagagaaaaccctaggccctatattccacattttttatttatttttattttattacttccaaccaaactcaacctaagggtttccttttacctttttctttttcttatttatttagtttatgtggtataggtttttcaaataaaaagatctctaaaagttgtcctggttatgaaaagttagatgtcttctggaagggctttcttggaagtctaacttgaccatccggaagaagtctcgtgatatgatagatgtcatccaaaagggcattcccaaatgtatatcgtgcccacctggaaggagtcttcagggaagctagccttcctccggaaaggaattattcagatggctagttgttcctcttagaaggaaattctggatagtcgactccaaatgttgcatttcctattcgagaagtcccttcaatgtactctttgatctttcttctaggaagcgtaataattagaagaaaattatataaaaagtttggaaactatgtatatgggtcgaatatggggtgggtagtatcactctcaatcccgccccgaacccacttcaggcatataaaatggcactccacccttgccctattacccattaaggcgagtaatttttgcctcaatggaggcaagtataccatccctatgagttaaatttctatcactattcctatataacttttaaaatattgtacctcaaaaaaaaaaaaaaattgggatattgatttgtcatcctgaattattgaaagttatatttcatttagtctttatttactaataaaataagtttttttgcgtcggttgacgtttttaattaatgcaattaactacaagagaaaatattaaatatttgaatgagacgtgaatcttacgttcaatatatctacatatgttgtaatcaatcaatatatatatataaaggaatgcacaagcaagtttatgtggcattctataactcttttattctatttttctaattttttgaagctttcatatttt

SEQ ID NO: 83764 - DNA, 637 bp, Cannabis sativa
tttttggaggtttcaaaatggatagaaatttatcatttaataatttttatgttactaaatattaatttcttttctttaattttacaagataggttcgaacccgtacacaaatgataagattactgttttacgtgataagtgggtagaatatgtgagagcaaatatgaaatgataagaaaattatgagtatatatttcaattcatgtttatacttttcatcaagtaattagtttcatataacttaccatttacatatttttttttatcatatatatttttttatgagtaattagtttcatgttaaatatatttgtataatacacatatttttaaattacaaacactgttagattaactattgttgctgttatataaaattgtaaaaatctcaaatgtacaagtaatgcattgaaaaaatggcctaaaatttaaatttgttctctattctgtaacgcaacataaattaaagctcaaatttatacactttaaaaatttaattgtgtctataaaattaatttaattaataatttttatgaattataaaattattataagtggaaatatttaatttattttgactttatattatttcagatttagagtacaaatgatcaggttataagtgattaaaaaaaga

SEQ ID NO: 83765 - DNA, 1008 bp, Cannabis sativa
  modified_base (48)..(58): a, c, t, g, unknown or other
atagaagtatactttgttaatacgagacttagaaaatgtataactaannnnnnnnnnnaggttattcttatttataattggcccaaattgggacttgatagtattcttaaatagggttctactgtaaattatttgttgggtatagaatggtaattttctctaataatttatgattgggcttttgcgttttgggctgcgtgcaaagcccatacatatgtccctcccaatagtccacccctaatatttgtctttcctctgtgtttttctttttcttggattggacagggaaggcagggcattggtcttcctttttcttctgactgactgagatagagagagagatatactccttccttcctcctcaacctaacccagcaactccaaagagccttcaaatttaaggttgcagtaggtaattttttccaacctagcagcatatttacatcatatatgccgtctttgctgcaatgcactgcatatatgcagtagcactgtagcaactgcatattttttttttaattattattattaatatttaatagctgatttttgtttatatatattgtttaatattaaaatatattatattttattaatattataaataaaatatattttttggtgtaaattttagtgttgtcattggagtgaaaatactttttgacactaaatttagtgatagtgtaacaccaaatttaatgtgtcattggagatgctctaacaagccatctatttttcatcatttcaaaaatttcaacaacaggtcgctttcagaataatggtttagtgtattaacaaccatatttacttttcggctaacttttacggttgatgatattagcatacgcctgtgcttaaaaattataattacgtacctacaatattctggcttttttattcccttaaatcttagaccatttcaatggatagtgtgtattttaagtaaatttagcctaaaatatataatgaagctatattttgcctaatttttatatttgtacttcaatg

SEQ ID NO: 83766 - DNA, 1219 bp, Cannabis sativa
gacatgtcgcttgaaacatttttggaattacgaaacgaaacttcctcaaagtcctaggagacatgtcgccatgatttaggcaacacatcgcttgggaagcaacaagtctcctgaggcaagacaaaattttaattcccaatctcacatgttgcccaatgataggcgacacgttgcctagagtcttgcatgagaaattttagggtctcgtaaaatgcaagaaagtgacccaaatgacctcattaagtgatctaatcatatggattaatactaatgtcggttcatacattatataaggtgttaagagatccaaaatgacttgattacccattttggaatctctctctaaacaagttctctaattctctcccaattgttctaaaggttttgcaacacatcctaaatcatccaatttcgagttatatttagaaagttatggtcaatatactaatgggttactcagcaggaggaatctcagagggaaaaatgcatgagtctcgcccccatgaagagactcccccatctgcgagacgatgcacaagcacacccccataagcgaccaggggccccacaagctttcttaaagcctcaaaaatcaagacaattggtgtttaccccgaaacttcgcaaggggaaaaatgagccaaagaatgtgattatctcatggctcattgcccaagggagagccgctccttgcccttaaaaggagagtcccaccttgcccataaagggagagtcccaccttgcccataaagggagagtcactccatgcccataaaggaagagtcgctccttccccattgttgatcgtccaatttttgctaagtaaaaatatcgaggtcgtaacgaaaggagagaagaataagagagctcgagaggtaccacgggaaaggagcctcctcccttcaatggtatcgcgatgcaagaggttggaggggcctcttagtgccgtgccactaaggtcagaggaatctccatggtgctgcgacactaagggcttgaagtcctccatggtgtcgtgacactaagggcttaaaaacccttcatggtgtcgtgtcgttggtgcctatgtggacattgtcgttgtcacctcccctagtggcattatgtcgcttacatgcaagtggtaccgtgctgctgagacacgacatggatttgtgccacgactcttcaactaaataagagaagggtcttgacaaaaccccattccttcattacaagc

SEQ ID NO: 83767 - DNA, 655 bp, Cannabis sativa
tggatcagtagatttgtgcaccttcttgcctgctccaaaatctgatccttcattgaaaggtggagttgggatattggtctctcttccaaggcttgccatgcccaagttcaagcaagaaatttattctcttcactaaatactttacaactgctacatgatttattgattttatgtttggtttttctttttgtagatttaatgttattattgtattcgatcgatttagaattcatctttaatcttatggatgattgattatttcttgcacaatcttaaagatgattactgaaataatgcacatatgatgaataattaattgattatgaattataacttcgatttatgttgctatccttattctctacttattattgttttacttaaattacaaaatataagctatttcttctcacatgtatattactattaataaataatcaattaatatgtgatatatatttatagaaaattacctaatatattaattttttaacttttattccgttagttttaataggagtttttatgtataattcagtaaaattgcaaaaaaattaaaaaataaaaactattttgaagtgtaaaaataaaaagaccctacatttatttataatatactagtatattattacgtgcgatgcacgtatgctatgtt

SEQ ID NO: 83768 - DNA, 679 bp, Cannabis sativa
ttcctggttaatcaaggttagtgccttgttatatcggggctgcgataaatcctagtgttattttattttttttctacttaacgtgacatgtccacatatatcttaaaattctcttaactgccattcaatgttgttgcaggggtgcttgcataaattgacatactttgttgacacaaaaagctaattctggccttgtaacagtggcatattaaagccctccgactattgatctgtatagagtagcatcttcaattggtttctatcatagctcgatagtttaaggccactattcattggtgtgttttaagttttcacattctgcatttcagctttagagagtaagtcttgtagatattttgtttaagtgaggaagtaatccttgctctgttcttgtgaccgggatacctaggaaatagtccaccagtcctagatccttaagagaaaaagtattgctcaaaccatgatttattggtttaatgtagtgccattgcttcccataataagaatgccatccacatagaccaaaatgtagatacaatgactagctataacttgaataaagagagaactctcagctttggatgagtgaaatcccatgaatacaagagcagtagacagtttatcaaaccaagctctaagagcttgtttgaggccatataatgccttgttaagtttgcaa

SEQ ID NO: 83769 - DNA, 648 bp, Cannabis sativa
tcagcaaaagcctaatctgatgtggtgttaatcatattcccctttttacccctacgagcatacacataagtcaaaggtggtctatcaataccccctacaagtttcaccttgtcctcaaggtggaagtgagggaactgatcttgtatgacagcaaagtcttcccaagttgcttcagtttcaggtaggttctcccacttgatgagtgcttgaggaggtgtcttgtgagtgcctgggcgaatggacagtacatcttcggggttcagcagccattcgagatcagcagtgaggcttggaggtagttgagatgactgctggtgtggaccaagtgcagctcgtaactgtgacacatggaatacgggatggatcgatgcacctggaggtaattgcaaatggtaggcaacaccactaatgcgagaaagaattgggaaaggcccaaagtaacgtggtgcaagcttctcgttgaggcgttcggtcactgtacgttgtctgtaggggcgaagtttgacataaaccaagtctcccacctcaaaattcacttctcggcgtttcttatttgcttgagtcttcattttctgttgagcacgcagaaggttagctttgagtaacaccaaggtggcgtctcgagcttgcaaggtttgctccacttct

SEQ ID NO: 83770 - DNA, 842 bp, Cannabis sativa
tcaatattttggaccctaatcaggaccctgaccagggtcaggagacccggacctatacctggacccagatttgaacccgagacccaagcttgagccctagactcggactttgggccctggccccaaaccccagccttggaccggacacggaacccaccccgcacctaggaactggagccaaaccccgacttgggactgggatcctggaccccaacctgggaccctagtccctaccccaaacccaatcccagacatggaccccaaacccaagcttgagccctagacccagacttggtcctggacttggagccgactttaaataaaataataaacgaaaataaaaatgaaattacagaacacatttttattttgctttttttttttaaattaaaaaacaatagtagttacagaatacatttttgttttctaaaaacagaatataacaaacaaaattatactttcacttttgtaatttaaaaaattaacaagtgtaaattgcggcaaaaccttcaaaatttacgtatcgttagcaattaacctcccaaacccatattttgttagcaatttgccattttcatcaaattttgactgttaaatgccatactggattgtccacatggacacagtgtacacgtggtacaattttactagtcaatttaatttaatattgaaaaaatattaaattaaaattaattaatttacaattcaaaatacaacattttaaacaaataattattaaaaaaatcaaaaattaataaataaacataaaagaataaaaatataattaaaaaatcctaatcccctgtggcggacatccattttggttcttttatgggcagttt

SEQ ID NO: 83771 - DNA, 635 bp, Cannabis sativa
agaaaacaatgtgtcgttttcccaacaaaaagaagacaacatcacctttaaatgatatgtcttatgaactgaaacaactggaaatgacatcatttgcatcatcttctctagcaaattgggtccatttgactgggatttttgcgcgtgggtcaaccagactcgatatccaccagatcggaaaaatgaaatttgacgtccaaaatgcatgaaatcaattctaaataaatctaaatgtcgaaattaagagattcatactaatttaatgcatcgagaacacttgaaaatgagactttaattttacaaaacaaaccgggttcgaacgtgttcttaaaacaacttcacacatttttaaggattttcaaatcaattttaatactcaaaatagatgatgtaataatgcttaaatgattcgaaatacctacagaataatgaaaactaaaattttcataaaatatcgaacatatatatacatacttatataatgattttatttcctaaaaaaattataagaaattgataaaatcaatatcatttattaaaaattagagttttatagaaaattatatatgattactagatgagagttacgtggctagccacgtaaaggcgagccacgtaaatattaattttatata

SEQ ID NO: 83772 - DNA, 637 bp, Cannabis sativa
aaacagaacaattaaaacaacattgaaacaactaaaaaacaaccgtgaaaacttaacacaatatacagtataaaacttacacattatttttagaaaaaattccaccactccataaaaaagttaaaatttttaatatgtagtgtaaaaaccctataataaaccacattaattcgctatctaattatctaccttggtagaacattcccaccaaatgctctaaatttggtatttctgtaaaatagggagcgcaaaatttaaatttatccaaaatatattatacaacataggctttagtagatttcaatcacacactaacatttatgcaattattaaaattttattatgggattaagacttataaatattaaatagtagaaattacataattatatatgaaaaaattataacaatttatttttttatggccttttttatgccatatttttgtaaataaaaaagatagaaattccatatttgtaaaacaataataagatcggttttatgaggtattatgtgtaatcaagtattatattgtagaactagttttatttttaatttatgttttagtattttaggaactgatttcttctttattttttaattgtaatcggtttgagttattttgtgttacttgttt

SEQ ID NO: 83773 - DNA, 1088 bp, Cannabis sativa
taatagtttttgcatatgtcaaacaataaagcggtggaaacttactattagaaaaaagtttaagattttatgaaagtgatatattataataaaattttagaaaaaagattatctcctacaaaaatacatcaacaaaatttaaatttaaattatttaatatttttttacattaatttattaaaaatataaatttgatttaaataataattgttctattagataattttttttttttcatataaccgacgccatagggtaatttcgtataacgcaaattattttattccccaaccgactctaaatggtataatgcccttctgtacctacgattttcatgaaaaaacctcctctaaagtttaattttcgataaccggaaatttttacaccctttagcttccctttttataaaataggttgaaaaaagagaagctaaaaccctatttttgtagtagtgaacaacaaggttttaggttttcatgaactttttcaattcttcaaatccatcaataaccgatgtgtatacctgagattttacaacgactacccaggtggggcacaaacccatagtagccaacaggttgactgtgtgcaactcagtaggtgcccatatcacttgagtaatatttttaaacaaatcatctctgattctaataaaatttgatttgcgtgggcactttctatcgagtagatcattagacattagaaagacagaattcagatactttcagcatggactcgatgcccaagttgacttgtgccctgctatcagcgccgaggttaacatatagtagacatgactattttctagcgtcaatattataaaattatattttttatttatatacataaattatattatgtttttgaataagtgtttatatatatacatataatatttaacgtagtttgagaaaattatgttaaaaaaacattgtaacaatttgttaaatacaaagcagtagttttgcatttgtcaaacaataaagccgtggaaaactatttttagaacaaagtttaagattttatgaaagtgatataacatttcttataaaattttagaataaaatattatatcctgtaaaattaca

SEQ ID NO: 83774 - DNA, 688 bp, Cannabis sativa
taagactaaatttggagaaaaacattaacctttgggtgaaactaattatttcaactgttaagaggtgaggtcgtaattaacactcttagttgtagtgataatattatcacagtttcttacataaaagttggtcttctatttatcatctcaagtatgcggaggtttgggtctccgtcggtttgaagacatgaacaaagctctttttatcaaaattagcttggttcaaatgcactaagcacgaagttccctgggttagaaatgttctacttttcctatttttcttgaaattgttagtttattaatgcttttgattttatcaaatttttttatgttaaaagaacttgtaacctccccactgatgctatagcacgttgggctatggagtttacttcttgtaactctgttttcatattttgttatgttgtcaagaacactacagtatttaagatttgtacaggtggaaatttccgccagtactattattaaaattatcggtattaaatattattgtcggattcttctagtaataatgggttgctaatactataattagcgaccaaaatatattttcgccggtgataatattaatattggcggattaatagcggtggattctgccggtattaaattttgtcctttatacgctaacacagtaatactggccgacccactaaagtattctaccagt

SEQ ID NO: 83775 - DNA, 526 bp, Cannabis sativa
aaaaatcaaacctcagacaatagctgtgcttgacgagaaatatcctcagcagaaggtccaccattaacaacatcctcagaaaacctcgaatcatctgaaatctcacgccttaaaggaggtagtgaaggcggtgggaccgggactggtggattgagtctaggagggtcggaagctgaggctccgccggtggaggtagtagtagtggaaacgacgtcgtcgtcgtcgtcagtggtggttgttgtggtgggtttggaggagtagcggttgaaacgatcttcatctggaggtggagtagaggaccaaagagaactgttgagccagtccggtactctcttcttcaccattgtttggaattggggaattggggaatttgggaattagggtttagttgaattgggtttcttgtttgtgatcaaatgaaaaaagcttccattgaatttgataataacaatcacaattcaagccacgttctccttaattatttgcagtaaatgtctaacactcttttcgattttgtatagaataa

SEQ ID NO: 83776 - DNA, 1123 bp, Cannabis sativa
  modified_base (36)..(42): a, c, t, g, unknown or other
ataaatcacttcaaatttcttaaattgataactaannnnnnngtaatgggttttatttagggcacaaaacccgacatagcctccttagggtcttctatctccacacatggctccttaggtgggatctagtcgttagtgccagtcctaggagctggtgggagtggccttagaggacgagttgaggagctagttctgaggcctgctcctagtgcctggggtgcaggagtaatctcaggaatagctccatcaactagcatgccccagttgattggcgagctactggagtctatctgtcaacacttgtaggacatgttgcaaccatcttgactagtgactttcttgagttgtggctctccaagaaagcacaaaattttgactcaaaaatcaagattagacttttaagcaacacccgctcgctagattggctagaatataaaaagttgtaaagtaattaatgagagacacagtaatttaaaatagttcacccctatgtcgcgatagtaatggagctacgtctacttcaagtttttattctcacgagataatgacaacaacaagtgtttaaggatcaaaaacttgacgctctagcgagagaatgtcttgagagataagctctgaccttatgagtagttttttgaatatgaaaagtaagctaagggagctctccttttataggtgaaggaggcccacagaaatacgagataaattacaaataaaatgttttccaccattgatgatgatctaatggttaaaaatagcttctgacaaagatatttaatttttggtgtctgacgagtcccgttgcgagatacacagagtttacttttgtaactcctttaggggtgaattttgatgaaaatagcttcagaatatcacttggtgtatgagctatgactttatagagggcttaaatagcttcaaaaagaaagtttaatcgtgtcaatcaaatatatattgagtgagttatggctgttttactgaaggtaattaaggttctagcgctcacgttgacattcgagtgcctaggttgacatctgacgtcaaactagatgtggtatgagtgtgaaaacgtccaagagaattcatttgaaatgcctaagtgataattgttggaaattatttt

SEQ ID NO: 83777 - DNA, 612 bp, Cannabis sativa
taaatgggagtttagtattctcaaacacaagataaattttgtcttccgttactaccgaaaaacatggtaatttgaataagaataaaaactaaaaacaaaacaatacaaacacctaataaaaaattattgatctccttggtcctaggcagcctcataattttgtaaattgactaatagtttctcaacaaatttctgaaggctcttcgtcatagtgaccaatacccaagagttccatctcaaacttttaggcataaatatatatataggtacacatataacaagaagatatcaaagttaacacatttcaccttatttttaacagatgacgtctgggttgacgacagatattcagcagcaattcctttctctttcagggcagccacttggttttcctgatctcacacaaattccaatattccctatatctcaatcttcagaagatggaaatacaacaagcagttggaaagttttgatatgcttaccatcaatgctgctcatggaatcaaaagacaaggtaaagaagttagaagcgtctcccgtcatttaagaccatcaaaagttcaatcagaaagcaaaatatgtagcttaagctccacctaaattgtgtcaaat

SEQ ID NO: 83778 - DNA, 595 bp, Cannabis sativa
taagaagaaattgcaccttcacttatattataaagaagatatattgatatattataaagaagatagcaatggatagtggattcaattataatatgttgatatattgatatagtggattcaattatatagctaaatatgtttgtgtgaccccttgcactgacaaccattaaatcctgaacttacaaaaaaaacacgaacacagaaaacaaaataataattactagaaagtatcattatctgaaaaaagtaattaaagtattattacaaatggaagttttgaatattaatcatacacatgcctgatacttttgtggagttgaggcacatttcaccaaggagaaagaaagaccaggcattttcatcttattgtggccagcaagctttgcaatgtgctatgatataatacatgtaaacaacagagggatcatcatcttcatcacatatatgtatatgtatatatatataccttgtagagaggaatgtcattgattcgagcacctaatttgcagacagcaacagagattgcccattccatattcaaaggtaatgactgaaaaggacagtacaacataactccttaatttaacacttaaga

SEQ ID NO: 83779 - DNA, 1215 bp, Cannabis sativa
cattactccggccagattcccagacgttcgaaccgtacatgcattaatcactctcttacaggtattaactctcttgatcctttttccctattcactgtcaaatcccatcagaggaatgggttttccttagggtattttagatataaatttgggcttcccactaaattagctgaggtaaatcgatgccagaaaagggtttcggatgggaaaatcgtttttatattaatttccagaaagggttttattctttttgtcaaagtttttcaaattttagcattaaatttcgactgcatctgtgatctgcctggtactatgcgaaatccttttgtgcaacaactctgtttgatagtaaatgctacagatgtgatagttaccaaatctggtcataactatcccaaaattcctctcctatataagtgcagaacatccctgtggctttgcacttatattcctatcatcactaagtgttattctctgcaaaaactttccattaatagctgctacagtttaaatatatgctacagtcactataataatctagtatcccagccgagcccatgtttgaacacagtccccacaaaatttctctctgatttctccaaacttcggttatggcattatactagtctccagttttcccagttgttgcaatcttctagccaatatttccccatagttcataggccattatcttgcaattaccctgtttctagtctctcgaatatcactgtccaacctctaatcggtttgccattatccctgactcacaacaacctgtccagtttaatcttccaggcttcgtattattgttcttttatttttcctattcggtcctattgcattaatattatctctcctgatcccagtcaatacttgtccacttgtaccatggatgaactaaccaaatctctttctgttgctctcaacctcacagaaactgaatgtaccattcaaactctccatgagcccgccccctccaacactcccgattccgagatacaacccctccctttattcttggttgtcaaagtccatacggtcaaatcatttaaccgcaaaagcttcatggaaaaaatgaccaaggattggaataacatttctcggaatcccgtgaccattactgaccgttccaatggtttatttcttgttgagtttggctgtgacggagataggcgccgggttttgctgcagcaaccttggacttatctcaaccaa

SEQ ID NO: 83780 - DNA, 669 bp, Cannabis sativa
gagcctgctatggctgaagctacagggctcaaagaggttctaagctggcttaaaactatcgatttcccttaagtagtgctagagactgattgtcaagtacttgtcaatgctattcaaaacaacgtaactatgtattctccgtttggattattagttgctgattggatttctctgatcaatggtttaaggaatgtttctcttttctttgttaaacaatctgcgaacaaggctgctaattttttgactaggaacgcctgtttatactcaggctgtagttatagtagggggcatgtacctactgatttgcaagctattgttttaactgatatgctataataaaagtatcttttttaaaaaaaaaaattataaatgtgtttatatttttttttttatttcatattaaattttagtaaacatattattttagtaatacattaaaatataaatattaactttatatttacatatttaagttttatgcattttttttaaaaaatcaattgaaagtaattaacaaattaaaattgtaaatatatatatttatttgtaaatatttgtaaaattgtataaaattatgtaattatattttttttgtatatttttttgtaatattatacatttacttgtatataaataaagattaccccgattaaatttgaatagagctta

SEQ ID NO: 83781 - DNA, 717 bp, Cannabis sativa
tgcatatttaaaaaccttatatagagtttgttgctattgctgagaaccctttaattatagctgataaatgatttgttgaccatgggtttttgtcatccatatattcaggacaaagattggtgagaagtatgggacccctatttgatggtatcgtaatagagccatgcttgttacatggagacttgtggagtgggaacatcagcgctgacaaaaatggagagcctgttattcttgacccggcatgttattgtaagttgtaatgagcctaatgccagttgctcatcttttgctagaacagaattcattggaagtgaactattaagacattataaaactaacatatcaacaacacatttgaaagctttgaagtttaaattcttaaaactactggtgttttccgtactagctcctctgctttttactaggacgatgatgttagtcattattgagaggaaaatatgaagaagggattctgtataattagctagctctcattacaagactagccaactcctaacaaagtctaacagttgttaggctgcaaattttgatggaaggggaattccgtttacacaagttgagtcttcattagattaaaagcacaacgacaatactcgtgaaacttgatgattacaatttttaaaacatactacttttgagttttgtatcgtataatatgtttgttcatgaccaatgaatcagtaatggtattttaga

SEQ ID NO: 83782 - DNA, 994 bp, Cannabis sativa
tcattgtcgttggctaaaagcgaagtcaacaggttggaaaatgagtttcccaatactttttgaaagattacacatatatagtttttcccagcataagagctctcttgaatggaaaatgaatctcatttctctaaaatgagctactatttataggctaataagtaaatcaattacatgaattaattacacaatatataactaataatgaataatcaccaaattcctagtctttaggcacccacaataatttggtcttcaaagatttaggagctgatttcatggatctttagagtaagttgttttatctgatcgatttaactgaccaaataattgcttaaatccctttattagagaatcggatttctttacacaagtcggcccacacagcttatctaaacgttgctaactggaaaaccattagtgataggactgtctagctgattcaacaattctaacatagtatgttttaattccttgtctctctctcgggagccatccaatcttagtcaccttcattcattaagtgccacccatatagttatttgacatgtcacgtgtcactcaattttatgccacatcatttagacgattttcgggatagcaataaccaaaagcaccaatgcaccgaaactatgaaaacaggtaatagattgaaaaatctatggttattccacaatgaaaaaaataatgacaacaataatttgtcaaaccttatcaagagaccaaaagaagcaatatcatctatatcagggtctcactatagcaaaagctaagctaaggtccaatacaagacaaacgtgtagggattaaccaagagcaaagatttttcaaattttatcttttttcctttaataagttttagaactgaaagttagttggtgttgtaattgtttcggttatttttattattggcagttgtcagttagttcctttcatcttttggtttgttgttatgctcgtgtgtatagaactcaattggttcagtaataagatt

SEQ ID NO: 83783 - DNA, 968 bp, Cannabis sativa
ttggcaagagactcttgtttctctacaggtcgtgtgctttaactggaggaatgttcctctgaagtgcgttctattattttgaacgaatttattaattaataaatcttatgatttttattaaaaaaaaaaattactgtaaaataatacctaaaaaaaatatcgggaattaaactatttttaattttgttattaccatataattaagtttgaatttagtatatatatattctgatgtaatatgataatttttaatatttaatttttttaaaaaatattttataattattttaaatttgatgtttttttttttttttgagaaaaaaatttgatgtatattatgtaaaattcacttttaaaatacatgtcttgcctgccgggtcaacccggccattacagctttgctatctggaatgaaaaaaaaaagaaaaaaaaaaaagaaaaaagaattaccttatttaatttagaatacactggagcattaggcagtggatcctaaattggagggaaagtccaatctatagaaccgctaaaataaataataaagaaagtagtaaaagagagctctttaatcaaaaatttgaaaagctcccgcgttttttaactcttccgactcatctccctccctccctttcactcttttccctctttttttctcttccattctccgcctatttccttcctcatttcagatccaaactcaaacctattttcttcttcttcttcttctctctctctctctcctactttttccttctcagatcaaacaacccgtttctcccccttcttcgtcaacaatgagcagacaacccagagtcaagaagaagtcatctaccgacattggtaccggagacgtaactccaaagcaaattgctttcatcgtcgatcgatatctattcgacaataatttttctcaaactcgctctctttttcgtactgaagccgcctccctcattgctcagtctcccagt

SEQ ID NO: 83784 - DNA, 767 bp, Cannabis sativa
tattaattaaatttataattttgattaattatgataggttggagaaagtaaatgttggaagcttaaggggaattgcaaagataataggaacaattatgtgtattggaggagcaattgttatgggattagtgaaagggccaacactattaaactcaccacaatcttcatcatcatcatccatagcacctcagaatttgctcttgggttgtctattcctcttcatttgctgctgttgttggtcattttggatcattatgcaggttaatatctaacctatacatatacatatatacatatatttaggattggctaaaagatagtttttttagtgggctcacctagtctagtacctaaaacaatattttaaaaatacacatattttttaatagtttttgaaaatactacatttttttttaaaaaaaaaaaatctaataattttattggtacctaaagatgttttttttaattattgagtggcatgggaatttaggaaaggattaaggtggagagtaatgtgaaactcatgtttgttacaaaaaaaaatgatatgatattgttgtactaaaatcttgtagtaccactttcaaaaaaaaaatcttgtagtacccaccacattcacacctttaaaattgcaccaaaagtgtgatccacttgaaatttccatccatcccaacacttcccactataccaaacgccactaaaagtatacaccactaacacaatatgactttattaatcctacatttcttaaaataaattaggtcata

SEQ ID NO: 83785 - DNA, 629 bp, Cannabis sativa
tctcccaaaaatggaagctcaagcaaggatgaaagcttacaaaagtggctaaaaacccgtttattctccagttcatgcaacgaaaggaagctgagacatgatcaagcagggaccattgaatgtctgtgatgggtttatgtttgccaagcctatcccgaaagacggcttgtgggcatctgcggatctctagttgacatagttttgggttagagtatatgatatcccaacttggttctggtctcagaataatgcaattcatgttgctgaaacgtttggctcattttattattgacatgtggcacaatggcttcccaaccaatgaatacatcaagttttaggtgcaattccaactcaaatggccgcttctagtggaacacatacttcccatgaaaaaaggagtaaacttgtggttgtggtgctactttaagtatgaaaacctcctgcgtgtggcactatgggtcacaaagaagctggttgtagaatgcatcgttgcatgattcagataattttggaaggacgatttcgatgtatggaccatggatgcacattgagtcacgttgtaaagattgtttctcgatctgactatgccgaatatgagcttgagcgtatgcaacgagatgtggaggagg

SEQ ID NO: 83786 - DNA, 727 bp, Cannabis sativa
ttcaaaatccaaaatagaaatataaaaagatttaataatagaagaacaaaaaaataaataatcattgtttgtgggaaacaaagtgtttataggatacaagtttgagtgaatttttatcatgaaatataaccttataatgaacctgttggaattttggatgaattttacaaaaatttgaaggtaataaaatggaaagaaaataatctttattccatttctatgtttagttgtattttaaaatattggagtgatcattctaatagaatgatttttttcattattttagagtaatggctattctatttgtaaaggaagaaaagactaatccaatgtatagattttaaatttgattcaatttcattcttattcttattctttccaacaaaacgctaccttaaagaattgaagtgtgtaatagagccttacaagaatccaccaaaatgtatacatacactcaatctgatacaaacagattcagagaatgatgaaggtgaaaccagatcaacaaattatgtttaaacaagcaaacaccacaaacaatacatatatatatatatatataaatgtataaatgtttatatacttaagagaaattagtgtatgtaagtaccttattaatgcaggttttatatatattaccaaccagcatatatagatcaaagtagcactggtgctagcaacagtgaacagatctttgattgtgaattcatatgtatatatatatata

SEQ ID NO: 83787 - DNA, 615 bp, Cannabis sativa
ttttcccccttgagcttaatattgacattttcatttcttagccactacgtagcctagctagatataattccctcttttcacccctccgcaagatgcattgatccttataagatattaatttttattgcccatttgggagttgtggggaggggcataagtgagtgtcaattgagtgagtatttttcatttttccctttcactttttctcaaaattggggacaatgttatttgttaagtttggggggagtgtttctcacttttattgttcttttgctatctagctagtatatgctatttgtatttatattatatattttatttttcaaaaaaagtttttacttaaaaatttcacccccctttgaaaaaaaaatctctaaaagaaaaataaaaaaggtatttaaaataagtttgggggtgttagtaaaaaaaaaaatttattatagcaagtatatgtaaaattgttgttgagaattaaagctagtggcaagagttgtattttgtgtgtggggtttctttagggaaagatttattgtgcatttcgtaggtcctataaagattaatgtgtttagggttgtttgaaccgaaattaactttccttatcctaccttcacccta

SEQ ID NO: 83788 - DNA, 790 bp, Cannabis sativa
ctagagcatgaaaaatagattccttgtcctcgtgacaaatcggacaaatgggactaataaccacataacgtttgagaagttgcaaacaagttggaagaatacctctccaaataaagttgctaaactttggagaaatctttaacttccaaattttcctccaaaaatttgaggtagcatcttccaaccaattttctcttagatttttcaataatggctacggactttttacagaaaataagccgttactttcaagtttttaagaccagcaatccatatgataatttgaactcaggtgaatagatattataagatcacagtcacaggttgacaacaagtcatcgatgattttcaagtcccaatccttaaggtccaaacaaaagagactgtaaacatttttatctttcaaaccaagatggttggaataggcatacgggtctaaaggataaagtaaccaggaatcatgtaaaaaaactgattaattattaaatttatggtcccaatacacgattctaagactgattgctaattcaaatatttatttgttaatataatgtcaattttttttttggccaagactcccaaatcacttagtaaagaaggtgttcttattcttatcactgccccatttgccccaccccttacgggcacgatactgtatacaccaccgcatatgataaacaaggacaaccagcacatccacaaacaaggacaatgtataattagagatggaggaaccatcagccttacttcagatttctctcacatgatattcacattattattattatta

SEQ ID NO: 83789 - DNA, 752 bp, Cannabis sativa
tatcaataataaaaaaaaaaaaaagagagagagagatttgatgcacacgtgtaaaaaagaaatagaaaaaaagttatttctcaaattataatatactttatctacacattacttactctgagaatcacaaagtcattataatcaatggtccaaaaagtgtcagcattctatggggacaaaaccaatgtcaccacattagaagtatcttaaaaaattaaaagaaatcttaaaaaatatgtaaattttctgtgaaattataaaattctttaagtttatgtaatttttaattgttatatcatttcctagtatatatttagattcttacatatgttatgtttttttttagagaatatttttttaaaatgctacattaataataaataataaaaagattaaaaatttaatagaaaaagataatagtagaagaaattgataaaggaccccacatcacttccttaagtttgtgctgtaaataaattgaaagatagattcataggaatattgttcagcttcattaccatcaaatgattacatatacattgtctttattttttttaatgggagaaggtaaaaaaataataacgaccttttgtgattattatatatattatttataaattattatgataatgggagaaggttattatttattatattatcattataaaattcttgtgaccttttgtggttggtttaagaattaagatgaaaagagttctctaacatttattggtgaaacaaaagtagtgtca

SEQ ID NO: 83790 - DNA, 1176 bp, Cannabis sativa
gtatggagttatattattatataagctattataggtgaattaatttgacatatgacatgttaagatcccgttggtgagtcaggggcattttcgtataaaattttgatctgagaagggtaaaactgtggaatttatattatgatgtgcttatggactatattatgatatactatactggtcttgtccttttttaggtgttttctgacaggtcgatgcggtatagtcacaattgggaatttcgggccgaactgggttttgggccgaaattcattttcgggattatgtattggaattttattgatgtgtgaatattctgaaatttatttgagtgtatatgtgataaaaaatgactttcttgcccttgatttatgcttatgctttattaaggccctagggtcattttggtcatttgaccaattgatttactttgcaacaaaatggattttcggcattattgaaaatttaatttctgcttttgttctagccctagccgaatccccctaccctctctctttctctcaaattttctttactttgcttatttctcacaattgagtttgtggtattgaagcttgggagttagagctttgattttgataaggtttgaggtagattttcaccgtttgattctgaattttattgttgaagtttgaagttgattaagtatgcttaattattttctattcttgagatgcatgtgtgtagaaaatagattgaattatgatgcttttgctatgtcttttagctagttgggattaaagttaatgttttgattattggggaacttgtactgagttttgatgtgtaaattttaagtttgaatctaatttttataagctggatgtttcgggtgagctcttgtcatagtgtttgatgatgagaggtgcatgtgttggtaaaattactcatgttattgttgtgttggagcttgttttaatgctcttgatttccttactgtggtgattataaattgtgaaacttgtatttggagttttgatcatgctttgggtatgtttggtgtgcattggggcttgattcgtgttgttgtatctgggatttcctgggtttggaacctaggagccgcggccctactccttgggcgccgcggcccgccctctgctggtggcctgggattcgagcccaggtgtcgcgaccccatgtgggagtgccacggcc

SEQ ID NO: 83791 - DNA, 882 bp, Cannabis sativa
  modified_base (562)..(563): a, c, t, g, unknown or other
catacagtgtgtagagatgacgacctgtaccgtctggacactccatacgtgtcactcaaagacctttcctttttggactgctcctgcgaatgactgctggacaatgggccagtacgatggtgtgcatgccttgtactatggcctgacgttagggacaaaacttggcttcgtaccaaataaaagcatggtcgtcacttttgtagtatgacagatacagacggagctctcccgcgacatcatacggggatacaacttagtataaatccttctgcatccctcatagtcgtactgacggaagcccttggccttcgtagggcacttcctttctactcccaggaataggagatgccatgcgcactaatgctccacatgtccccgccttgcgacaaaggtatcctttgcggaagcccctcacgggagctagggcttaaggcattattcaattgatgattatcttggtttcttctgttagatttcacatgtcatgctaacaaaaatctggacaatagttagtaataagaagttcaaaaataaagagaataatttatatggatgttccttnnatttaattgtatgacttggactttgtaagcatttgaattgctcatacataaaaaaaaaatcataatgcaaaaattagtatttttgtagtatataatgtggtccggtttgaaccgtgactattaaattcaaaactataaactgcaccgtaccacacggtattgtgaaaacataaactgtaaccgcaccacaaaggattttaaaccatatttttttgtacggtgtggtgtggtgcgggcggttatgcagtgtcagtggtttgatgaacacccttacaccaaagaacataaaagcttgtcagggctagattataatagtttc

SEQ ID NO: 83792 - DNA, 867 bp, Cannabis sativa
  modified_base (43)..(85): a, c, t, g, unknown or other
aactttatatgtgtttattttaattgttttagaattcatattnnnnnnnnnnnnnnnnnnnnnnnnnnnnnnnnnnnnnnnnnnntaaaataatttccaacatttttgctcccgaaatagatggtggatgccacttctggatacgaactgttaagtgtcatggatgcatattctagttacaatcaaattaagatgcatatcgcggattaggaacacatcaaattccaaatagataaggccgtgtactgttacaaggtgatgaaatttgaattggagaatgctagagtaacctatcaacggttggttaacaagatcattaaggatcaacttaggagaaatatggaggtgtatgtgggtgacatgctcgtgaaatcaaagacttttatagagcatggtgatgacctcaagggagcctttatgctcatttggaagtattgaatgaaacttaactcaggatagtgcacatttagagtttcttctgggaattttttaggtttcatagttagttcccatggaattgaagctaatttggagaagattaaagccttcgtcgacatgccttgtgataccctaaagtttaatagctggattaacaaccctaactaagttaattaagtgttcacgagaaattatatgattatatgatttaatatgtggaattatagtgatttgtagcatttaagaccccgttggtgtgtcaggggaatttttgtaattttgacccgagaatggtaaaaattatggtatattgtatttatgaattatattattatatagtatgattattctatctttctacatgtgatttttgacaagtcagcacagtttagtcacaaccgggttttttgggccgaacagggttcgggg

SEQ ID NO: 83793 - DNA, 862 bp, Cannabis sativa
ttttttcttgaaaaacctcaaaagaacttcattaattagaaaagatggtggtgaataacctccaaaagtttgaaaaaccattacgttcattgcctaaactccagtttagctgaaatatgtgcagcattgtaagattccctaggaatccacctaatgttgcagtcagtaatttcaagagcacgcctcagcttgtcaaaagaagaagccaccatttattgacgcttatttaggatttttggtttcaaactactgttattagagcatctccaaagacaccaaatttggtgtcaaaaaatatttcaactccaaccaaaacaccaaaaattacactaaaaaaatatttttttattattatattaattttcttataatataaaacaaaaaatatatcatattaattaacaaaaatcaccacaattgttatatttaactaataattttcaataagttaaatttttctaatttttttaaagttttgtagaatgtcttaaataactataatatacacgactatataaaaaataactaaaaaaatatgttaggtatcgaaacaaataggagtacatcacttttagaaaaatgtattatagaattttctaaaataaatttttaatttcataaatataataatataaatattaattaaatatatatataaataccgtaactgctgtgcacggtagaaaaaacttgataatggtgcaaagtttggtgtgtccttggagcattaatcacaccaataatgctgttttagtggctccttggagctactcttagttaccaagtcgtgtacctcacaaaaatttctttcaaactattcacaacaagtttgattgataaattatggtgtcgtttggtaaca

SEQ ID NO: 83794 - DNA, 1261 bp, Cannabis sativa
tgtcggtgccgaaaaagttaccggagtagctgtcggtgtcagaaaattcaccggagtagctgctggtgtcggaaaattcactggagttactgttggtgccgaaaaattcattgggattcgtattgtcgtcgaataaattactggaaaaatcacaaagaaattggtttcttcaccgagaaattggtgatttttctgctattttttccggcgacaacgccaattcagacaatatttatggagtttgctgtcggtactggaaaagtcgcaggagtacctgtcggtctcgaaaaagtcgccggagttgctgtcgccatcggaaaagtcgtcagaattagcattgacgccgaaaaatcatagggaaaatcacaattttttagttaattctcacacttcaaattacacgtcaggatatttttttttcaaaattttttttcatggcgatattttttatagttacagtatcattcttgtaaatttttgatattttttaaatagtttacaatgctgaaaacagagttcttgatattctagtttaccacgtgtgttcaaaaaaattcaaacatattttcggcactgtaaactattcaaaaaatttcaaaaatttacaaagatgatgttgtaagcataacgaacaccgccatgaaaaaaaaaattaaaaaaaatattctagcataataggagattaagagtaacacgtctcatttatataaaaatagtattaaatatttctacattttatttcaattttttttcttttatggatttcttattatttaccaaagaatagctaacgaacactacaaaaaaatattacttttaccatcttgcaaattgtactggtaaaaaagtcaaaaatttaccaacgcatatttgcactggttaaaagatcaaagttttaattaacaaaaatctgccaatatttttaatcaataaaaaattaatgtgtatcctatgaaataattgtgtcttttaacctatataatgtgttgtgtcatacgcggttatatttaataattattattttaatattatttggtgactttgtgattatttttattataaattatttgtactctcactcaaaaatcctaagaaggttatttaaaaataaataatacttttggttataaaacaaaactaattataatttttttgattagtaattataagtataaattagtggtcatataattttatttttttccaatttatatcacattctaattaattaaatataataattctgttttttttttttttt

SEQ ID NO: 83795 - DNA, 538 bp, Cannabis sativa
aaaatgcacagattcccctcccctcccaaatatctagaatattcaacaatagtgtattgtgcagctttcagcagtagcatgtaatcgtgaagaatccctgcttttcaacatcaatagatgttttacagcttctggccataatgtatgcaataaatttttatcctattctttcaatcacacttatttgtaaaactgaggattgacctatacattactggtaaatctacagctcaatgtatataaaatgtggggaagttaatttctatttcattattgctatgctattaatattatttgttaattatatacgggaagatacatgctgtattaccacatcttccataatcagtctcccttatagtctctctattaactcaatatctcaatagactgactaaataaaatgctatgacgtggattaaagccaccatttttacgttaaacacctagtaggaaaaagaagaatttagcttataaatcattcctcacattttacattttataggcacgtcaacctacccctcatcctcaccatcac

SEQ ID NO: 83796 - DNA, 1924 bp, Cannabis sativa
cttttggctggctattggttggttgctgctgggttgttttgggggctatttgtagtggccttattttttttttatttggttttgtttaatgaagtttcctttttagtaaaaaaaaaaaaaactttaattatatttatatatatataattttttaacaatattttactaaaattattaaaatttaaatatttagttataaatacttaaatttttattatctcatactttataaataaatatattagtgtttttttttttttttttttatatttactaataattttaattgtaaaattataatatttaatattatatttaagttttataattattttaattaatttataattaacaagtacatatctatttattatgattattattaaattatagtattttttaatgtgtcgtgctttgcttttttggattatctcgtgttgtaccttttgacctagtctatttgtgcttacgtatcatgtcgtgttgtgtttaagaatatattttttgtgttgtgtcatgacaatgtgtaacaccgtattgtgttgtgcccaagtccagattattttgtgcatgtttgtgcttgtcctactagcgttcgtgtcagcttcgtatagtgtgaaagaatccaacccatatttacagcactaaatcaaattattagaagataactttgtaatatgcttggtgtttgcatttcaaaagagagttttatgtacaccataaaaaattgtataaaaaaccttattacaataatttttatttatttttaattgatgctattttttttctctttatattcttagaaaatatatctataaaatatattttaaatattaagataaaaaaattaaaataacaatttatatgaaatttattagagaaaaaaattacatatttaaaaaatgcacgaaaaacattagaatgattattaatactaaaacaagataatgtgaaaataatatttttaagatattaaaagtgatttttaaaattaatttaaattatatgttttaatattagagtatacttataatttttatagaatataaataaaactctttttttaaaaattgaaacatttccctaaactatgatggttgtagaatattttttttagggataatatatgaggcactattttttttgtaaaaaaaaaaaatatatttttatatttttacggttttttgtagaaataataaaataacaagaatactatataaaagtaacatgaaaatgacatttaaataacatcaaaaaaaaaataataataacatacaaataataaaaaatcaacaataaattaataagagtataatataaaaagaatgtattttctataaataaaataaaaaaaaaaatcgtaaaaatatttaaaattcaggaaaactgtattcttgtaatttattttgttgtttttatgtatttatgaaataattttttttttttttacttttataaaattattcttgaattataaaaaaggaaatattgtaattatgcttgttaattttatatgtttatttattttgaaatggatgtctgttcttctgaatcgatcttcgaattgttctaaattagtacatgtgtttataaaaatgaaaaaaaaaaataataaacaatttaaaaattagtttgcaaaatttttttcaaaatgagacaactctagaaagataatactatttgtctttttacaaaatgacaaattttttaaagttattttcgtttttttcatgctttggaatatatttttcaataatagacttatctagttttagaacactccacatgtttttttttttttttttcataaaaaggctccacatgctgtttaaaatatcattttttagggaaaaaaaaacaaaaactagtctataaaataaattttaaagatatctatttaatttctttctctctctctcttttt

SEQ ID NO: 83797 - DNA, 505 bp, Cannabis sativa
aaaattgaaaacattcttacagtaaaaacaaaagtcatgctccacctaaaacatttccaatataaatattattgtgtggttgaatacactcattaaacaatgttgtgcctttacagcaaatcatttttcagaataattaattgaggactttctacaatgtatgtggaaaattgaaagcgagaaagataaaaccaaaggtaccaaactcattaactagtggtgagttctgtgaaccaaaaaaaataaaaactaaggctatatttatttatttgttttgtttttagtcatgtgaattatagaaaacaaaaactacttgaaaaatttcgaacacaaggtatatagaaaagcttctttcacgaaaaataagaggacaatatataattggtatacattttattttctataattaaatctctatatatctaggtggaattcaaagcagaagccaactactatcttatttgttttcttatgaaaattcttttgttggttaaatgttattata

SEQ ID NO: 83798 - DNA, 642 bp, Cannabis sativa
tcattatgtcttcatgtaaaaaaatatattttctacaagtgttgaaaaaaaaaattatccccacaataggattacttacaacttttccgatagtaaatgtatatcatctcaatcttcaaataaaaagtgcaagagtttcaaaataatgataataataataataatattatgtacaatttaaatgagcattatactttataatttgttgacgatttttatattatatataaaatatatgaaccaattattaaaatatactaataacaatatattatatttttaagccgcatttaacatttctagcatttttctcacttaaatagtgcactttatagctaggcgcgtacacccctacatatgtcaaaacatgaaaggttaatgttgttaacttgttgattataataaaaagagagctcgtataatattaataatgtatgtatgtgagaatttaaccgagaaagaatctagagaagatgagtttgagactgcaaatggatatgattttgttcctttctatgtgacccatagtgagaatctagtcatttttgcctgttaaggaaaaatgttaatggacaactgaccaatggagttaaaaaatcacaatgcggccgtcttggtcttcccatgtttgccagttactat

SEQ ID NO: 83799 - DNA, 597 bp, Cannabis sativa
aaaaaattatgttgtgactaaaagattgtcactaaaggtagtttttattgtagtgtgtatttcacattatgcattaaaattaggtttcgatctggatcaaaatttgaactagctccgtaaatattttttttttctttttcagcacactgacagtcaaactttttaaatttagtcatattaaaaatattttaacaaaatctaatctaataatcatctattcatgattcaaaagacaactaatataagtaatctctattttgtatataggaggaactggagagaggtgatgctccagcatcaattcaatgttacatgcaagaaaaaaatgtatctgaaaaggaagctcgtgaacatattaaggttttaataagtgaagcatggaaggagatgaataacagtgaatctgatgatggattaatatatccaatctcattgattgaagatgccacaaactttgctaggatgggattattcatgtatcaacatggtgatggtcacagttctcaagataatcaatccaaagaaagaatttcatccttgattattaaacctattccgatagatacttaattagttaattaaaatcatttatcaatg

SEQ ID NO: 83800 - DNA, 707 bp, Cannabis sativa
aggaataaattctgctttgaaacagcatctgtgtcacatctcgcatatggttgaaggttcttttcccttgaaatatcttgggatcaatcttagacttaccaaatggaaggcttctgactgtgattgcattattcaaaaggtccgtaaaaatattcatcattgggctagtagacatctctcttatgctggtggagcacaactgagtcactcggttctcttgggcattcgtaattattggatggagatttttattttaccccaaaaagttacaattgaaatcgataaacactgcaggatgtttctttggagaaccaaaggcaaccgtagcaaagttcatctctcttcttggaaaatagtttgcttgccaaaaaattatgttggtattgactttagagaagaaaaaaaaaagtggaatattgctttgatggccaagtttgtttgggccatttcaacgaaggaagatagtctctgattaaagtgggtgaattccatctattttaaaagggattgatttttggtgtttctctccttcttcggatgctagctggtattttaagaagcttaccaaactcaagaatgtcatagacaaaacgagatttatttgagacatgtttgactagaagattcaaggtgagagtttttcatctctctctctgattgctgttgagaaaattgagtatcacagattgttgaggcattggctgtgt

SEQ ID NO: 83801 - DNA, 1120 bp, Cannabis sativa
  modified_base (824)..(825): a, c, t, g, unknown or other
  modified_base (949)..(951): a, c, t, g, unknown or other
ggtttttatgaacacccctaatttcatccactcatcatttatttgactgcgtaggaacctccattcgttcgccaccctttcattttcaaaacgtttaaaagcatctatatattcttgcattttttgagtaatttcgtcctatttgatctcttcggtagatagaagtttgtgtttgttctcatttctagacatttagaagtataagagaagaacacttatgaagtatacgagaagtataagagaagaacacttatgaattagaaagggatttgcttttatagagcagaatacttgttgggaaggtaggaaaaattaattaacattaaatgtgtaattgtacacgtgtaagacatgcaatgtgcttttatcgatagaatgtcgatacattgttgacaggttgttgataatatgtggataagagcaattgaggctaaacattattgatattatatcgatgttatgtcgatagcttgtcgatatcctcaacagatagaataaaagttagaaaggtgaggaaaattaattagcattgaatgtctaattgtacacgtgtatgacatgcaattcgcattgtcaatacgatattgatattatatcggtgatatgtcgacactctgtcgatgatgctgccactcgaaatcctgacaggtcttatcgagggatatcgatggaatgtcgatagtttgtcgaatatgttaaatttttgccctttttctttactttttttttataattttttggtatttttctccaacttaccttttttttatttaaaattgcaggatccactatgtttcttgttgtatcgtacgatggtgtttggnntgttgagggttttaattgggtttataaaaccgaatgcagtttgatgttgacggttagaactgacacaaccatacaacaaatgcttttttatttagttttcaaactttgagacatatttagtttnnnttttctactaggttatgcttttttaggtagatttgtctttaatttatcttctatggattatgaatgcataataatatttgtgagaatatttaatactaaaatataaatttgcatcaatttttaatatgttatacaatgtagaaaaaaaagaagacgcccctcacttaca

SEQ ID NO: 83802 - DNA, 1123 bp, Cannabis sativa
agcatcattcatgaagggagatcaaccccaatcaaagtcatcataaaactcatcaacttacggcttcatgaacttgtcccttcttgtgttccccgagctgtagagcaaacttgttggaatcctcctcctgagggctgggtgacatgcaattcggatgttgccattggccgatatcattccgcaggtgcagctgtattcagagatgcctcggggactattctcaatgttgtcaccttccgtgtaaccaattgtgaccccttgtctggtgagattgctgcgatccacgaaggtactgctgcggctgttcgtttcggctacaggaacgtggtgtttcaatcggattcccttgatgctgtcaacgccatacgcagcaacccgatggaaaccaacaagctgcaattcaacattcaagataaggttgctaattttttcatcctctctcgcagtctcaacctctgggaagtccaatggattcccagatcctgcaactgtgtggcccactcggcggctcattgggcaaatcggtacaacatatttggtgttcttgatttggccacttttgatgatttcctgcagcaatacattgcagatggtcatgttttaagttagttcggctgttttctttcctgtgttgttctctaattttggtgttttgtttgttgtttgttgttctgcttctgttgttctcttcccctgttttgcctttgcttgttttctggctagggggtttggtgttgtgtctttgtttggtctgttgtaaccattcaccaaaaaaaaaaaaaatcatataataatttaggggtttgatggatttaaagaagtttttatccactacattggagcccataataacctaccattaattcatttattacttgtctccaattataattttagatattagctgtactaatgcacccattttaagggtgttcattatagaattttccaaaagtgtaaatttattcagaagaaataatatatacgtcagttttgtttaccagctgtgttgacattaaattattctgaggacaattttgtatatcatgtgttttggatagggataaaaataagaaagttctatttgcgtcctataaagttataaatacactttattattaaa

SEQ ID NO: 83803 - DNA, 673 bp, Cannabis sativa
aaaatttaaaaacaaaaattttataacaccatcttaaaaattttataaccatataataaataccaacacaaaaagtcaaataatataaatttgttaaaaaatatgaaaatttatattttcttaggggctaagtgtatgatacgtacattatataatatataatagtatggatttaaatctcattacactttacatgtagtgtataaaagactttatctctcaacacttatatagtgtatgtagttagtgacggagctagaattttaattcactaagagcttgaattaatatttatttttcaagagcttgaatgtaaattgaatcaaatgacttatttttattttaaaaaaaaaataaaaaaaaaacatattaaatagaatgttatatatatgtacttagaaaaaaaaaagagtgtcgagtgtttttcgaaattggtgttaaattttagtggtacataatggcttaattaattcaggtacataattaaattaaaatatgtataatctaatactttactctaataatgataaatgacatctcatgtatactctttgtcatttatcttaatttatatcggcttcaaaaattgtatttaatttatgtcttttatgatagaaatttgtgaggtacaataatatatgagaaagtaataataattttgattttaaaaaaa

SEQ ID NO: 83804 - DNA, 2169 bp, Cannabis sativa
gtcaatgatgatcgatgcatagagaaaaacttcctgttcatttatacctttcttcccaagatcccataagaattttacccaatcccacattcgaataccggtgtcacagatagggaaaatgccccaaggagaggaccgccaaaggtggaaggcaaagttgcaagaaaggaaaagatgctccgtagtttcagtttccgatccacacagaggacatcactcattctcaatcaagaacctcctccctattatcgagcgaattggaagagctttggatagaatacaccaccaaagatacttgagtctctcagggattttactattccacagtttgttccataaggagggggccacctcgcgtggactcactcgatcctcagctagggctctataagccgatttgcaggagaattggccgttactttccaaggtccagaaccaggtatccttgcccatgccagtagggctaccccctttcaaaatagcagagactgtttcctggttgaaataactgttaagtttttggatgttccatcctccataagactgaagtaattcagcaacctttgattccctattcaaaatccgcccattaggaatgggagtaaatccctttagatgagcaatccaggggtcagaccaaatgagcgtatcctgaccatcagccacgcgcttacaggcacccttagagatgatagttctggcccttgtcacgtttttccagaaccacgagtctgacgccttcggatcacactcaagaaaagacttacccttcaggtatttggcctcaagaatacgacagcataaagattggttgcctgttagaaggttccatccccatttagcgaggaaagcctggttcatatctttagatttccagaatcctaaccctcctagagacttagggagacatagtttatcccaggcttttaggtacagaccatggtttcccttctccgagccccaccaaaaatcacgcaccaaaccatcaatttttgacgcaagcctgcttgataatttagtggtttgcatagcgtacagagggagagccaaacctacagactttataagagtagctcgccccgctttcgagagcgtcttggccttccaaccatgcagtttctcagtgaggttatcatggataaaattaaaatcagcatctttttgtctagatctgaagagagggagccccaaatattgaacttttccttccggcgatccaattcccagcaggtccttaatcctctgtttcataccattgggagtattcttactaaagaaaattgaggtcttcattttattgaccttttgacctgaccaggtgcagaatttttcaaggcagtcccagtaacccttggcttcctctaagttggctttaccaacaaggataagatcatctgcaaagaagatatgagataaaatcgggcctcccctactcagccgtatcccactgatggtcttcgaaagctgggcatcttccaggatcctagataaaatttccgcaacccatataaataaataaggggataaggggtcaccttgccggagaccacaagaaggaaagatcttgcctactgatcctccatttaggcacacattaagtgaggtggtagagatgcactgagaaacccaaatacgaaattctgggggaacaccaaagcagtccagcacatgatctataaagctccagctcagtctatcataagctttcatgagatcaatcttgattgcaaacaatccttctctacctttctttcgattgaaagagtggacgatttcctgggctatcacattattatcttgtatcgcccttcctggtacaaaagcagcttgggtggggcagataatcttaggtaacaaaggcttgatcctgttagcaatgattttagaaatgaccttgtatactacattgcaaagagagatcggacgaaagtgattaggtcttttcggattctggaccttgggaatcaggacaatattagtggcattaactcctttatgcattctcccagtaatgaagaaatttgacacagcatcacagaagtcgtaccccaccgaatcccaatagtgtttaaagaataggactgacataccatcagggcccggagctttgttactactcattgcaaaaagggttgcccgaatttcctcatgggagggccttctaataag

SEQ ID NO: 83805 - DNA, 593 bp, Cannabis sativa
agtataaatgttagtttaaccgtgcgaagatatatatgtaataaagtgtgtattttgtatttttggtgtgaaaatttcaaaaaaaaaaactttcaaaattagattaaaaaaatatagataacttattaaattgtaaggagtgacactttaaggttaaggttaagaggtgtattctatattaattactgactaaattatggcatacatcgatctttgctatatttttaagttccctttaatatttatctattataactctatgctcttctaaatgtttcacaaaaataatgttagatttattaaaaaatttaaataaaatttaaagtgtgttttgctgggagtattaagaatgaaaatacagatagaaatcaaataaaataataaaaattagttcgtataatttttttttatcactttacaatgacctttcttcctattttaccaaaaatgtgaaatattttgaaattttgttatttattattactaagttttatttaatgaaattaaaaaattaattgttgtagtgttgtgaatgaaatattcaaacaaaaactcgttgtgattaaattgattatcatagagaatataaaatg

SEQ ID NO: 83806 - DNA, 662 bp, Cannabis sativa
tcgaaacatataaaattaaaaattgttaagcaaaatatatataaataaaaaataaaaatatttttcataaataataattaaaatcacttataatttaccctgtaaatatttataattagcacaagagtctcatcgaatcagaatatatagctcattatctatttgaagaacatatttttccaaatatgggcagctaaatgtttatcgcgaatcacattagataagattgctcctcaaaatttaaataataaaattatgacgccctcaaacaacaaatctagctcattaaaatatacatttctattattaatagcaatcactagaactagtgaatatgaaaaaaaaaaatacataaatttagataccacatgtatgagcctaattgaatctaaccaagagaactagagtttcagcctctaacactaaaacattacatgaaacatcacaaaacaaaaccaaaaattaaattatattagaatggcaagagttgaaccaaataaattaatatacgaaactcaaattttaacacacaactcaattaactaccgaactagacctgactttaggcgaggtcaatttgtttgtggatgatgggcttcatgataaagaatgtgaaatgggaatggggttgttgcgttcaatcctaatggtcatgtcctctt

SEQ ID NO: 83807 - DNA, 674 bp, Cannabis sativa
ggtgcggtttgggaaatttgaaaaaccgcatgtgcgagttggtttgaacaaatagttaaaaatcgcaccacccgcaccgcgaacaaccctaatgctaattaaagcttacacttttcttaacaaaaaatttgagtactataatataactggtagcaaggagttctttgtagggttacatatacattctttattattattattattattattattattattattattataaggcaaaataaacattttattaaataattctcattaccatgcataaataatgtataaaagtttgatatggaaagaaaaacaaaattgcatatacagtatagagcattatatacaatataagattgctattagacacataatatttaatatcattataaggtgatgttttgtagtattgcttcacattgaaaatagcttttttacttcttccaaaaagtaactatatatattttagtaacttacctagatttagattataaggaccttaaaatgaattattctaaaaacttagaaagggtatatattttacttcgaatataaagaattaattaatcggtaatattagagcaataatagattcatatctctttgttcgaaatactttgagagatgataaaattttgaaatttttaattaaattatatgtaatactttcaacaattaaa

SEQ ID NO: 83808 - DNA, 845 bp, Cannabis sativa
ggtaaaataattcccaacagataagatctgattcgtgtcagaggataagtaaccgtcggtccgggttccgaatagggtactgtcaaataagctccgggatcaacgagccaaagccttcccaggtcctactgcctctctagaatacttgaaggtccgagtaactctgatccttcccaattgtggatagatagtaagtcttggagcactatccgtactcgctaacactgaggacctttgattggctcccggaatataataaccttcaacatctctaagtggcaagcatatactaatcatggatcatccaaggtggcattcttccgtgactgccacatatcaggcatccaaaaatacggattacaatgactatactatattttcacataatcaattttcaaagtgaaaaatctaacactaagcaaaacctacattccacagatacataataaaatttccctaagattaaaacctaacactaagtaaatccatacaaataaaaaaataaagaaataactagaaaaaactcacctttgacatgctgtcggattggggtttcaaactcgcttgaagggttttgaaatgggatttccaaatttgaaatcgcctaaatgatttcctacaaggtcgaaataggtgacggtggttatttattcagttgtgggtggtagtcgtgggtggaggttgggtcgtcaatcggggtaggttgcgtagcgtgttaatttgtcatggggttcatctttgtgttattttttttttttaaatttggaccccttttagacattaaaatcgagtaaatactttgcaaaaaaaaaaaaaaatctggtaaatactattttggaccccgt

SEQ ID NO: 83809 - DNA, 1394 bp, Cannabis sativa
gtttaatatgtcccttttgtttaatttttgtttgaaagagataattatcattaattaattagccgttaaaagcattggtagtattttctaaaaggataattacactatatattgaaatttttaatttttttacttttatattgtggagtagatttttttttaaaaaataatgtgtaagtcttagtcttatactgtgtacagtattaagttttcactgttatattccacggttggtttttagttatatttcactgttgtttttagctattctatttgtgttctactattattttataaaaatacaatatttttgaaaatatttttgtgtgacagtatttttgtaaaaattaacctaaattccagtatttttgtaagttttcattttctaaatatgttatatatctctatattattcaaaaatataatattttattttatattttttctacattatttttggcacatttatttttaaaaacactctaatggtatactacattttaaaaatattataattatgatgtgacacattattatatatagatataatttttttattaaactattatatatattgcacctttaatttttgttgtaaaaaaaatatagcatcaatatcattgtatatatcaatgaaaatttcaagaataacattcttttattttcaatggtataacatccttatattttgtcacctaaactttctacctcatcaagtattctccaaaatattaccattggagatgctctaacaaaaaattaaactaaagtctcacaaaaactcaagtaactccagttggtggagcattctctctaacgctttgtctatttgctcaattcttgctaaaagattgcatattgaggaagttttctgttctatctgtagagagggagagaaaacgattgtacacatttttttttatattgtaactttgccttccacttttggagatcttctccgtgggttatttttccaattttagaatttggtgcccgtgtgtgggattgagttaaattcttgtgagatctaaagactagaggtgtggatgtacatgggtttgttcttttatgcttccattgtatagtagatacgatatggaaagctcataacgacaaggtacacaatcatttgatgtgtaatattaaataatatattgactctatctatatgtgttacggagattatggttcttgtttattttcttctccgatgacaactgagtctcctatttggtcccctcctccaaaagactaggtcaaaatcaattgtgatgttaaagttggttgagattcgatgtgcatggtggctttgactagggaacacatggagacagctttgtgagtggctaccgaagtgctcaacttctctgaccctctaattggagaagttgtgg

SEQ ID NO: 83810 - DNA, 1375 bp, Cannabis sativa
gaatttggcggtcggtttcagttacggtttttttgacatggcggtccgtttcagtttttgaattaaaaaaatagtttaaccaaaaaaccttcaaaattgcccaaaaccgccaaaaacagaaaactgccaaaaaccgtacggtcggttttatacagttataatttctaaacgatcggttacggttttcgtaaaataaaaaccgtaaccgaccggtcggttataaaattgtaagaaccgaccataactgaccgattttcacccctaaattaaactatcccaaatgcaacaaaacttgagcaacatttgtcaaaaataccataagacttagaaataaatatatatataaaaaaaaaaattaagttttaacaatacaataattagtgagctttgagttgaacatttacatattggacctaaataaatataaaaattgttatttttataatgtgcggtgcggtgcggtttgaatcgcataataataattcaaaaccgcaaaccgcgctacatcgcgcggtttaagaaaaattcaaaccgcgaccgcaccgtaaaaaatttcaaaccccatttttctatggtacagtgcgatgcgagcagtttgagcggtttgatgaacactcttaatattaacccataaaataagatgatattttaaattattattaaggagtgtaccgttttcctaaaatataaagttatttttcaacatatttatcttaaatactaattaaatatcaatctaacttaatatttgattcagttgcacgtagcctggtgggaaatctgtcaaagattcattatgggagaatgtgagcatgcatcaatagctgaaggaattttactacttggtgagttttagagattatattggcaaggtagattacaaatggttgcgttaaatcattagagggagtctaattttgtttaagtcaattgcttttataatctttaatgctttactaattaattttattttttgggcgtgacctctagtctaggagtttttgaaagaacacaaatatcactataattctcttgtgtcaagtttttatctgtactatttttctgttctgttactgcaaatttgtattctgcggtaataagtatccaatctattattacaaatctttaccgttgtacttttctttaatgtttttaagaaaatctattgaattgacatatgccaaaaacggtttttcagttgcacatagtcatgctaaggccatctccaatgagacactaaaatactaaatataatgtagtttcacactacttttactttaataggacactaaacatatcctcataaatggctttgtctacagtgtcccatcaaatttaatgggacattgtagaccacactatttttttaaaaaaa

SEQ ID NO: 83811 - DNA, 653 bp, Cannabis sativa
gatgatggagaaagagaacaacttgaacacgtggcagtatacaactggtgagccaactctgcacctcaccacttggtggagataaaccgctggacacttgctaacaccatctccattcactactctactcctttttaaatcaacttttaactttattttatcacatttttctacttcaaattactatttctctccaatcaaaccacttcaaattttactcccaaaaataacatattattttttatcatcatcaataaataaatattgatgttcatattaatacttatgttacatttataagaaattaaatttacactattttttttttaaaaaaaattgttgttgtcatttatattttatttaatggttgttgtttcatttcttattttaaatttgatacattatttgctattttttttttttgtatattttgtttaattaaatattagaataaaataaatcttaaaaattaataatttgttttttttttaactataattcataaacaacagtttacaaaggaattggcttgtccaaacttaaagcttgactagcacaaggaaaattaactcctattcacatagcaccaaccctattaataagagtataattagctaaacaatgtgtagattaatttgcttctctgaatacaa

SEQ ID NO: 83812 - DNA, 1174 bp, Cannabis sativa
  modified_base (725)..(726): a, c, t, g, unknown or other
ttttataacactttagatggtgatcgataaaagctagaaaatattgaaaaatcatgcttgttttttgatgatggcctcaacaagtaaagattctaatggaaaaattatcttggttcgaacaataataattagtttatgttagttgaagttttttaattaaattaagaatattttaatttttaagtgtattattggataataaattatgtttttgtgtattgtgttagataagtaattatgtttatttaattttatttaaaattttattttcataaattattatatattatatatttttgaataaatttaaaaattaaaaatatatatattattttaaaaatataataccaacggattaatagaggcccaattccaccattattgattcagattaaaatttgatgaattaaataccaatggagcctgtccctaatatataatttgttgatactatttctttttattagtggtgggtgtgtgagtccgctgctaataccacgtaatagtaatcgattattatcggcaaagcaatagcagtagaatcccgctagtaataatattagttgcgatttttactggtattagaagtggagacctacacctctaattgagtctcacattgctaatgtgtggaaaaataatagaacatataagataaatgggctactcctcccattgccaattgattttgagatgcgacctcatttatcttatctcaaattctnncatggtatcagagcaaaacaaaaacctctagcgactatcttacccaaaaaaaaaccgatcaaagtagagccaaaaagaaaaaggagccaccaaaaatctaaaaaaaataattgatccaagagccaaaagtcgaaaaaaccacttgtgatttgaaaatagtgagccaggccaccgaaaattcaaaaagagtcgcttatgattatgatcgagttgtctaagatggtaaacaaataaaatagctacaatcttagtggagatgttagagagttccatattgctaatgtatggaaagatataatagaatatataagataaatagactactcctcccattagcaattagttttgagatggaacctcattcatcttatcttaggtagcttttggttgggagaaatgaaaatataagaatagaaatgggaatgagaataggaataggaattgaatg

SEQ ID NO: 83813 - DNA, 762 bp, Cannabis sativa
tgtaataaaattgaccctttttctcctcaaaaaacaaatgttggaccttttttatacttataatattttgaaaatacagctacttactttgatttacaacacacctttctcttttcctattactttttcctattatccaaaatatgggtagtcatcacaaaatttggacccaacaaaatagccacagcagaaaattttagttttcttcacttcacaatttattatactcattatactctccatgagtgtagatatgtagttttttttaggacaattaattataaaagagaattgctaaaaaaatattattggtgtctagtattttttttagtgtcatattgtgatgaatgtaattaaatattgagtatcatataatttaagagaaaataaattttaaagaatattactaaccaatacactacttataaaaaacattaaatattgatacctaatagcaatactcattataaaatatcttatcctactttttatacatttacaatataaatacatcccattttttatacatttacaatataaatacagtttgtaaaatagttgctttgatgatgattgtcaaatgaatgtgtcaaatttaacaataataggaatataaacataattgatttttttttttctaaaaacatataaacataattacgtcaatattaaatagttaatttttcattttattttagagcataattataaaagttatgcggaatatattatttattaatttttaaagataaatactatttt

SEQ ID NO: 83814 - DNA, 1443 bp, Cannabis sativa
tacaagcattaacttcctcttaagtcaaaaagggatatctaaagaatcaccgagtaaaatatgataaccaaaaaagaaacaagcaagaatataagtttctatgtgtagtactaatgtttatgtttatcaataacatgttaaattaaattacacactgccatagcactaacaaaactacccctaaaattataatcaaggcaatgagagcataagtgggtcatatctatcaaaaacaagttatcttctggtgagtcgtaacaagcctgttgattcaaatctatttcagcatcatggtgttggaatgcattatacatgtactaatttaggggactcatgccaccaaattatgctttcacatgtcaataaattagttaatattttaagtattgcaaaacttggcataatgatcaggttacctgctgggcacgcttgtaatatgcatcataataaccagcagaaagtgcatatgttcccattaaaatcctcattttgacctgcaaataatttatcaagttactcaagtcaccaccaaaacataagtgtactgattatctccatacacagaaccatcttaaacaaacaaacaaattacaaaaaagcttcagactagctaattaactactctgtacctcattaccaaatcccttggctcgagaatccccatatagagagtttaactcctcagcagcagcttgatttccatacctgtatatatatatttaaaagtaaaagtcaagagaaaacatacagtttggataagctgtgtacaatctagagtttaagtgtttggatggctattagtattagagaagctgaatgtccatgagaagttacaatagaggaggccttatcaggtgcggtctccagagtggtctgtattttgaaagaaaaatggggagactatttccaatttaattttgtagtgtccctctttcctcaattgctatggcataagatgatcttaagtcaaaggggtttatggcgtaattgaagaatgaatctcagagctgtgttgagggtaatcctgtatatttctttttgtattatacttgctgtactgtgactgatttttgatactgggagagctctaaaactggatgcaggacactctgatctgaaccagaataaattctcttgtgctcttttatttttattgtaatttctgcactttgtttctctggttcattgttagttgttgtgcactttagaacgaaaacagtgttgcactaatgattttgttacaccttagccccttttttcactctttttacttcgcagctaattggaaacattgttctcaagtttgaaaataacaaatctaatatttattccttaaccttgtcagaaaaatgctacaactaccatttttctgcacacctttcatcaataaaaaggaagagtaacatgaaaaattacctgacgccatcataacgtgataggtta

SEQ ID NO: 83815 - DNA, 854 bp, Cannabis sativa
tataaattattattcctatgttatgactaaaaggtcgtggctaaaagtattagtcccaaaaattataatttaatgtatttttatatcacaatacttattgtgaatacaattaaattagtgacaacttgtaattaaatactatattttagtcataagtaatattttttgtgtgactaagagtcacatttagtcagaaaaaaaaattatattgtcactaaaaataacaatttttagtgttggtatgtttgaggtgatcatttagtgactggtgagtattagagtatatatgtaaatatatacatgtagatatacgtaagcatgcaaaataagaaagcggaataaatgagaaatgctaaagagtactaccggttctagcatattttaacgtgccatatccttattagcgtaattgtatatcgggtattatataatttcgcgtaataatttttaaggaatattgttaataaattgtagagcgctacttttaaaaagtgttgggcactagaacgccacctttaaaaagtagcaaataataacaagggaatgaatggtgtgaaaggagatataggataaatgtggggactcggcgttcataaatggggtttgttttggtgagagagagagatggagagaatggagttggagaatattgggagtggagaagcggtttcaaagtgtggggatgtgggaatattctgtgtgatgtgcaggtggcgtgcgtggcaagagtatatacaacataacgttattattatgagtattgtaatgtgtggatattttgtatgcattatacagagagagagagaggaatgaatgacgttacgtactactctctcgaattttttaccaattaa

SEQ ID NO: 83816 - DNA, 672 bp, Cannabis sativa
ctagctcaaagtgcatgacttaacttgatagttgttaccatgtagaatgatagctcaaagtatcacaatgtggtttaacaagtttgtaagcatttagaaagatggttcataaaagtagtgagaactagtcaaaagaaagaaaattaactaatcaaggacatggatcgaaactgaaaacctcaagaaccaccacccaatcactttccaattaatcaaaagatcacactgaagctgattaaggatggatgctattgccggtggcagttcttgttattttagccaagactagcttagaaccatgtttcatatattggcattaccaaaatatccattttctatttgtcaaaattataaattataagctctatcaagtcattttctgttacgttattgcatagcaaccgaatgaaaggacaagatcaaaagatggaattcaagaaattatctacgagaggaaataaatattacatgacaattatattgcactctttctttcatcatgcctctggtcattctgttctgttatttgtgtggttttgggttatttttataaagatcaacatagtagtaagcaccacattgtaaacttgaaatttttatttatttcatttaccaatattacaagaggaaattaccaaacataatatgagacccagcaaaacactaacaatt

SEQ ID NO: 83817 - DNA, 643 bp, Cannabis sativa
tatcaaccatcatctacctctttaaaatagtgagagagttatgactgatggattttctataagttgtttaggaacaaatttctatactattgaaaataccttgacaaatttttttacggtaattttaagaatttttaaacagttggagaaaaggaaccaaacctagtgaaacccacgaacaaattaaaaattgtatttgtaagaaaactctgagtaaaaaataagaggaaacatttgggttaagaattgttagcaatggaagtttgaagttttgagacaatgtgataatggagaagatgagagattaacatgggcaaatgaaaaaaaaaaaagttgatagaggttttcagaagttacaagagaaagatgagaagatattgatggagaagaaagtaaataggtagttttataaaaaaaaataaaaaaaaaaaaagttaaacgagctatataagaatgtgagaatattaggtgcttacaaataacaaaatattaacaacaaaataaaaataaaaaatagtacaatatacaaataatatatgaaaagacattgaataatattttttagaggaaattacacttactatgggattttaaaagttcttatgataaatatggcacattttagtttgaccaatttatatgg

SEQ ID NO: 83818 - DNA, 594 bp, Cannabis sativa
actgatgacttatagccataattcatgtatttaataagttaaagcataggttatggatctagacagtgcggtaaatgttggaaataacataacactccattctcattcatttttctgattcagtatatgatctattactcttaggtaattaatagaaaatggtattgttccccaagctccgggttctattcattcattccgaaatatacaccattttagtgagagcatgaaagaccttttaccatgtaactatttttggtttgttttgcagcttaagaacataagtactctacattagctagttaaagttattttgcatctgtagaccttttatggtaataaatttaggctatcaactgacaactgggttaagtagggtttgatttatagtgtgaaaagagctggcatgccgtcgtttgaactctactacagatcgctatcgatagagccaaaaacctttagttttgatgtgcatctctatagctcatgttgtaatttgttttcaattgtgaataattacactagccataaaagtacttttagtttactgaagaggggtatgccaaaggtttgagggtccccacatattgtagg

SEQ ID NO: 83819 - DNA, 811 bp, Cannabis sativa
  modified_base (765)..(785): a, c, t, g, unknown or other
aattgtgttacgtggcagcttaattaattaataactatgtttaataaattgaaaaattgtaagagttttagtaacaatacttttgatttttaattttttaattataaaaatataagtaaaatttgtgtttttaaaattttatttttaaaaattaaataaaaaaatgtgttataacatttttattttttaattttaaaaacagaaaacaaaaatgtgttttacatattatttttatttttatttttttgatttatttaagtcggatcaaggtccaaatatgagactgtggttgtagtctttgtctaggattggggctgaggatggaggccgagtcccaaggaccaaattggggtcggaatccaaaatattaattaagaaaaaaaaatctatttaaaaatttttcaaaagtgatttttttttgtttttaaaatttttaatattttgattcccaattaaaaaattaaaaagtgaactaaatatagttttacataaaaatattgcatataatataattcaatacactataatacaatacaatatgacctaagcgttacaaacgaacccatataattatctttgaacaatttaataaacatgtataccttttattattatataatattttaaagttaattataggttataaattaaattgattgatgaataaatcatgatctatttatttatttatttattgcaatgaatgattttattgaaaaaaaaatgttatacactttaaagtctaagtgcatgtttggcatcatnnnnnnnnnnnnnnnnnnnnnttttaaaaacagaaaattgtttttaa

SEQ ID NO: 83820 - DNA, 1316 bp, Cannabis sativa
tgggttgaaggtgtgtgtaagtagtatttgtatatatttttttttatttgtgctgtatattcatttatttagcgagctatatttttgtaatattgttacttttttttttttggtaaaaacttaaaaaaacccttatatttttaagtgatgatctaattttttttttttaatattcttgcataataccacaattggagacgctttaacataactttatttttttaatctaggaccttagttgtgaaaatggcacatgtctggtcggtgtttaaagttttcaaataacctcttatgaaattacttatgctataaaaaataattgatctgtgttgtttggattggtgcttatttagggctgttgagcgtatttgtagtgtgacacatcaaccgagctattagaaaatgactcgagtaattttacccaaatcttgaaccaacctttgaatgtatgcatgtattgtgtacgtattttttagactttaaaatgacttatatcgatattcaacagggaactgtgaaacaatttcccagtagaccttaattggtagctaagataccgccatgttaaagaaagactcaagaattggagtgattttaagtcttcttaattaatctaatatgtccaagtacgtacaactatacgtggagatggggtcctgactgagcgttttcatcaagttttggtgtgatcctccctcttgcctcctatcctaagcgtctttttactgacatttatagttttggtgcacttagcttttagaaaagctagaaatttctgctcattttctcaacaaatggaactgtgttttttttttctgcattcttttatcattaaattattgtgggaataaaatgattctcacttgtttttgttttgttgtggattcccctctccccaccattacattactggttaaatacaatatatgagttcatataagctgctggtgtcatttctctcttggtcaataatacacgcctattacgcgtttctggattttaaaaaattcagattgagtgaactcaattgctctaaagaagtttcaatgaagtttccttaatatagagctttagatgatagactttaattttgccacttgttatttttatagtcaatgttgtgtgatggggattgtgtggctctagcttggtcaaggtaagtgtaacccatgctgtattattaaaagatcatttaataatcctccaatagctgccctgccgtaaccatcatttcctaagtaactgaaatttttatatgtttccaagattatgggactcttgtataattaatgtaaagagcaattgctataaagcat

SEQ ID NO: 83821 - DNA, 655 bp, Cannabis sativa
ttttttttttttcaaatgaaacgtttcgttttggctgtatgatgtatcacacttttttttttctttctcttaataccaaacattttataaagcatgtgattaattgttatggtgcttggaaaaattgagtagttggatagatcagtgtatatctatcaccactctgaatgtttgttttaatggagggtaagttggtaagattaggccctcgtgtagcgtaactcgctttcttcttatctgtttgtttattcggacagcagaaattctatcaaggttgttggaagaaaccttgggaaaggagattattaaaggtattagattgtgccgagagggtccgattctgtcacatattctttacgggcgatttaattttagttggttgggctaacttggaagaggctagaggttactggtagtgtctagaagatttttgctctagtcagatcaataggtcaagaaacttaaaacttcaatcttcttcagtaagatcactcctgatggggtgaagagagggatcaaagaagctctgagagttggagacctagtggggaatactaaatacctggggctccctgtagtaagatctagacagaaggatgcgtactataactttatttggatgatttgaccactacgctacaggggtggaaagctg

SEQ ID NO: 83822 - DNA, 754 bp, Cannabis sativa
tacctatcactaaaggctggcctagcctgttcaatggttgcccatcgatgccatatgcacccagagggcagtagggaaggacatcataagttccgtaagtcctcctcctaataggcgcaacctcctccacctcagactcagttttagaactctcagcccctagtcaacatcaggcacctctccctagccgaccttcgactctacatcatgacgggattgtgtggcctgctctacaactctaactctgtccattgttgccaccttggcaacatgagggtcatatggtggtgcactatgacacgatcatttcattctagccatagtatatatctatcaatccagaatcactcaaagggagcaaggagacagactgaatgctatctctcaaaagtaaagctaacgtgacctatgacaaagcggttgtcacctccccagatcgacactcaaaatcaccgacgtagaagagacaaggggaggtgagcaacttcctaaagctacatacaaagttctggtcaattgtacccaagggtactttccaggtaaatcacattgtacaaggatgggtatcagcgaagtattgtctcaagtacatttacttagacaaatagtgagtcctaagttgtgcacttgactataatggactcactaccaagtcttataaagatttcccaagggaaccacgcataagattatagttgtatatgcctaaaaggctatcataagactctagttgaggttaaaagaggacgaaaga

SEQ ID NO: 83823 - DNA, 559 bp, Cannabis sativa
  modified_base (369)..(391): a, c, t, g, unknown or other
aaaaaaataatatgagggtatttttgattaatggatacaaaaaagaggtatttttcaacttatctcaagctagaaacctaaagcttgatccaccaaagatgtctcctagcgggtaacccagagaactaaagtcgaattgacctacgatcttgtaaaaagcgatcaaatgtaaattaagagggaatgcttgtaagaaacttctggaacaaaatgtgaaacggcgtccagcaaaaactaagatcgcggaaggctagaaacctaaagctggatccaccaaagatttcttcgagcgggtaacccagagaactgaagccggattgacctacgctcttgtaaaaagcgagcaaatgtaaattaagagggaatgcnnnnnnnnnnnnnnnnnnnnnnnatgtgaaacgacgtccagcaaaaattaggattgcggaaggcgacccacatggcatacttttgacacgatctcgagaatttaggcagtttgttccatgtgtcagaccacatagaggctcacgacaaaaaagaaaccatctttttgttcaacacccactacactgatatt

SEQ ID NO: 83824 - DNA, 734 bp, Cannabis sativa
actcgtcccctttatcctgtgcattatgatgcaaaatataattgagttgagctatatgtgacacaattagtctagtggagatgagtttaaaataatgtatgcacttatagtattcagtcttaatattaatacaacatcacaattgagtattaagttttcacatatataatacgagactctctaataaaaagaagtaaaattcatcaaggaactctgactctctatacttttattaaaaagaagtaaaaggtaaagaaaatggtacaaaattagaaatataaataaggtttgaggagttttaagaggacttatccgtatcataaattaaggctgagtctgtgattactattctctatcattatcaaacacgcaaaagaaaaggtgcaatttttttgtgaggtaaaaaatggctgcactgaagtaattaaatttaaactgttactaatttatgagagtaagaagagtatagatggttatggaccttatggttaagaggtaattaaaaatagagatgacatacacatcaaatattccagttgtgataccagtggttggtgagttccagaccatgtcccagtacctatacaaatacacgtaaataataaatcaataaaaaaaatataactaagtaaatataaataagaaaatgaaatgtacatatacattttgaaaatagcaaataatattgttgataaatttgacacaattttatgttataccctctattggattct

SEQ ID NO: 83825 - DNA, 1299 bp, Cannabis sativa
ctaaaattggagaccactgccatatagtggaatgacagtggttggccactacacaaaaagttggccaagctacatttcctacatatttgtattaaataaaaatgagaaaagttacaaaggtccataagtgaccactgtcataaggaaatggcagtgctctccaaaattggagactactgccatagtggagtggcagtgcagtggtcggttactacacaagaaaagtatttattggccaaattatatttttatcatccatgtacgaaatacaagtgagaaacaccacccatggcttcccacaagccatgggtgaccactgccattgtttggctccaactggtggcagtggtcacccgttagggtttcggacatcgaaataaggtttttgagtctggagactcccaaaatatgaatcaccataaaaggaaaagtcaaaacgcaccccgaggggtccgagagcatgcattgccgaccacttccatttggccatgcaaatgctcgcaactggtacaagataacataaacttcctttagtaaaatgggcataacattctcaattttaataaaaatgacctggttcaacttgaagtggaaagataatttcaagacagatcaaaatgtgcctcacatccatgactaaattctgaagttatcgggtacaaaattggcttacaatgtaagttggtacattttactcaagaattagaaaatggagctaagcgagggttggtggagcacactgccacaacctatgtggcgttgtgtgcgagcatcaacactccacaacacatgtgttcagcactcgccaccaacatcatgcatttctaggagaaaggtgacatcccaaacctccatttcaaattggtgcatcctcaatcgaaaataaccaattgtccaatatttatgggatatttgcctggaaacaagaggattgttatagatatttatttactggtaatattttttcatgaaaagagtggtatacgagatttttagcgagatatcccaatgtgtgggggatcactaacaaaccctctagcctatatatacatcaagtaggaggctaagaaagggatcttctttttggcctcttctttttggaccatttttctctcttttggatctttctcttcgtgaccttccccttgaagttcacttgacagcaaccaagaacattatattatttccatcaccttattctttgagtccaccatactcagtcgacactagttctcaaaacaccattgatacacacctttttccacaaattattggtttattattcccaagaactttaca

SEQ ID NO: 83826 - DNA, 745 bp, Cannabis sativa
atttatctcaataatgggtaagtgttgttcaaagaatttcttaaacgtttagattaatatgtagtttatttttaatagatctgtgtggttgttgtttgcattgatgttattttgctgattttcctttaaaatagcgagatctggttttgtcgtcaaactaggttttttaacaaattatcgatactttttcgattatatatcgatatcttctcgataattaaggtaagaaggtaagggatgaaaattttcgataatttttcaatagtatatcgatactattttaacttaggacaaaatatagcaaaaaataacaaaattatcacacaaggcagaatcatcgataaactatcgataatcaattgaatattaccaaaaccatctttaactattacccccactttctttgcatccacattttgtgataaagataggctgcaaagataaactccattttaacttcactgcaatcttctttcttgagggaaggatggttaaggatccacttgacaagctcctgtccccataccaaattgaaattagtctcaattttcagattccacttgcttgtaaatcaaagtcttttgatcaagtcacatccacccaaaagattgcttgtggtattcctattcacttcatcacacaaagcacaatcccctagttcattgccaaagatcattccaagcctggagtgggttggtattgcattaagatacaccttttaaaggaaaaatttcaaacaatcaaa

SEQ ID NO: 83827 - DNA, 1707 bp, Cannabis sativa
gcagctcgacctggagtgttcggtctcgggacatctgggattatattttgtagtcgctgtgcgacctgggttatatgtattttgaaatattatgtcttaaaagtttgtatacgggatcccggtatttgtaaatagttttgtatattataaagtttattatttaatataaaagttttcatttgacacgtttttcaagaaaattctttgattagcaaagaaagctttgtaattgaaaaagcactatagcgtgccttagcattagggcgttacacctgccttcaaaatcttgtgccccaaaaaaattccctctgttaccatgaaatggcactttcccagttaagtaccaagtttgactcctcacatctgattagcactttctccaagttcttcaaataatgaggaaccgaaaactgagaaatcatccataaagatgtctatacaagtctcaatcaagtctgaaaagatcaccatcatacacctctgaaatgttgttggagcattacatagtccaaatggcattctccttaaagcgaaaatgccatatggacatgtaaagtttgtcttttcttgatctcccagtgctatggctatttgatggtaaccagagtagccatctaggaaataatagtactcttttccagccaaccggtctagcatctggtcaatgaatggaaaaggaaaatagtcttttctggttgcctttttaagcttcctgtagtcaaatgaagattttccaactagaaaccgttcttgtagggatcaattcattttattttttcattttttatcactatcatcccacctttctttggaactacttgcactgggctaacccatttactgtctgaaattgggtaagccaccttagcatctaattacttgaccacttcctttctgacaatctctttcattggtggattaagtcttcggtgtgcatcaatagtcagtttagctccctcctccattagaattcgatgcataactgttgagggactgattccctttatatatcagccaatgtccacccaatggccttattatgtgcgcggagtactcttagcagcttatcagtctccacatcagaaagtgaagctgacactatgactggaagattcttgtcttttcccaaaaactcataccgtagatgatcaggaagcaccttcagctctagttctggtggtttttctgtagatggcacaggcttctttggaacaactcccaactcttcatagtactttctattcaatggcccataggagtcaagcctttcagcgtaccccatctcctcaattccatcttgctcattcaaatcgtcttcagttagactcatttgtaatgaatctttcatcaactttttcttctccgctatagtgtctacaagatctaaaaagaaacagttatcgctggcctttggaaaagtcattgcctttagaacattgaagatcacttcttccccttgcactcacagcttcaattcacccgtctgaacatcaatcaatgcttaacctgttgccaagaatggtctttcaaggacaatcgaaacatttctgtcttcttccatgtccagaacaatagaatcagctgggaaaataaattgatccactttgactagaacatctatgatgaccctgttgggttttatgccataaataaaactccatttcaatgtaatccggattattcaatatcaataaaaaaaacagaagt

SEQ ID NO: 83828 - DNA, 900 bp, Cannabis sativa
  modified_base (37)..(42): a, c, t, g, unknown or other
aaggatgctaaaaatttacacatcatctaaaaatatnnnnnnttattttatctctcttccacattatttttggcactcttacttctaaaaacactccaatttatagtattttttaaaaatgataattataatctcacacattagtattaaatatatatcctaacttttagctacaataactttttagtttcaattttttattaaaaaataatgaatagcattgatgctacaacataacattcatgcaaatttctagaataatattctcttctctccaataatataacatctcaatatttttccatataatatgtccacctcatcaagcatcctctaaagtttaccattggagatgctctaacaatactccatataaaaaacttaaataattactttcataaaattattagttttattattgacttattttatagtcactaaattttctatactacattgtttttttacgaggaaattatacttattataggattttaaaagctatttacaatatgacacttttaaatttatttaatttatataatatgttttttgtttttaggtatttttatggtatttaatatgccatatatatataaattaggttttcaaagctcacatttaatgattttttttgtttaggtagttttatttgtcactgatgccggaaaagccgacaaagtttgctgacagcgccataaaagtcgccggagtagttgctggtgtcgaaaaagtcgtcgaaatttctgttgacgctacaaaagtcgttggaattggcattgtcgccagaaattacacttattaatgcgattttaaaagttgtttacaatatgacacttttaagtttgaccaatttatatgtcatttttttgttttaagtatttttatggtatttgatat

SEQ ID NO: 83829 - DNA, 1711 bp, Cannabis sativa
attctattaattgttattattaaaatttaaaagaaaaattagtttggataataatattttcctttacatacaagattgtaatttgaaagatgaagatgtggacaacacaaatgtcactggtgctggtgaaagtataaagagaaaactcctcattcttgatgatgaaaatgaagaagttggtgataatgttgaagataaaaataagcaattaattagtgtttattgttggagttttgaggaggttgggcttgtaggccattttcatttgtgtgatttaagtgtgattttagttttttcatttccttatgtgtgtttattttttgtctggttgttaggcctttaggccatttctctttgtgtgttttttacattacatggttatgtaataatactatttccactttataaatgttttaattgggatttaatatgacttcaaatactattttattttatcaatttttataataacaatactaagttatttataaattaaataattattaataatacagtgaaaatataataaattatataataatattaaaatatataatcaatatcaatatatcaatataaaagaatgcctaaaggattccacatgcaccctaattgtcattatctcctaatctttctacttctattttttttttatttaatcttaatttgtttatttatatttttgctttccatatgtacattaattaataggctttaatgattacaatatccttatatacaatttttaacttcccatatattgattgtttttaataggtctttatgattacaatttcatttccttcaatttcttttgggttttagaagtgagaaataaacaaaataattcattcttttcctcaatgaaggaaaacttacagagagaggtgaaggatttcattctattcctaggatttcaaaagagagaaataataaaaaaaaaaaaaaaattaagtttatcttttgcctcatcgaaggagaacagagagagagagagaggtgaagggattgaagctgtagatcttagaagtttgatttgggttgagaggagatttgagtagtttgatatgagttgagagatctaagaatcgttttcttcttcttcggtttttgcattgagggtgatctagtgttatagtgtgattggtgaaggaggagggcactactcttctcagaagagtcacaatatttgggttgatgtttgtggtctggtttgttttttcttctctcttttcatctttctattatgtataatatatagccattattagaaattaatcccatcctctttcacccatcatcagcccacataatgtgtggctgattttgtttgaaatgaaattatatgtatgtataggaagggcagagatggttgtggaagaggttgaaaatgtggcaaagatggtagaaaaggtggctttggtggctgagaagatgtcatctgaggtggtagatgagcttccgaaaaatggggcactcaagaaaactattatgcttgtacaacgactatctcataaagctgctcaagaagctcatctcgccaaacaatttattcacaaggtacgtgttaacgcaaattttcgttaaccaaatttgagcgtaatagcgacaatctcacgcaaaaaaataaaaactgaaaaataaaaaatatgaacacacaggattttttacgtggttttgcagttacaattttgcatagtccacgagtcaa

SEQ ID NO: 83830 - DNA, 1035 bp, Cannabis sativa
  modified_base (206)..(209): a, c, t, g, unknown or other
tttcaaaattaattaataattaaataaataactcatacattttatacgtaaatttttttttatacatgagcagctaatgagactatttttaatactcttgtatatctattctatataaagtgtatttatataactaaaattcttggtttatgaaaaatttatggtgactttttatttttatttaataaaatattatttatatatannnnaataataataaaacaaatcccaataataacaaaaaaatctaaaacaacctcctttttttgcgattgaggaaggggaaaaaattcttacgattgaaaatttcatcaattaaacgcgattgagggaggaagataaaagatttctacgaccgaaatgttgagggaggaagataaaaaatttctacgaccgaaatgttgagaatttcagcaattgaatgcgattgagggaggaagataaaatatttctactatttggagaaaaggagaatacttttataatacataaatattatgctgtgggtttgactttgatttttgtttcttcttttggcatatgtcatatgatatttctcttcataattttatttttgtgattgatttattaatttttttaatagttttaagtcttctgccaaagttttagtctttttccatatccaaattgtgggtttgatagaaatttaagaatagtcacggaaattcgaagaaaaatatttatttctttcactaatttttttaggttgtgaaaagtgtaagcatggcttaagaaacccatttgagaatagtaatatactactttttataagagatatttttggtgggtttctcttaaattctgatagtcactcttttcacccaacatgttattgcttaaattctactgtatttaaattaaaattggaagagaaacaaaaaaaaatacgattttttccatttatttttagttgcttacccttttcataaatatatgtgtatatatatataattatgtatgtacttatatgtgtttgtatgaatgtctatggtgttacttgataaactataaaac

SEQ ID NO: 83831 - DNA, 562 bp, Cannabis sativa
gaatgtccatttacataaacgagtgtcttcaccttctttttcaattacgttcacgattaaatctagatgcaccacccccagacctcaacatagatccctcaggatactgagatcactaggtttccaaacgaacgttgatgaacttctagatcatgctcgtacccttcagtctagactctggtgtctcgataaattccttcccgctgtgcctttaaatcagcatgagcatgacatacaagtctccatttcagaaccttcaccttcaacatgtaagtacttccttacccttttacatttgccacttaacttggagcgagtaggttctatgtagggtagatgaattacttggtacgcatgcttgggtatgtttggcctatttttgtttgtatttttgctatgtctggcggtgtttaggttttgtcctcgttagagtgatctgaattttcactgagataggcatagttaactgtttttgctatgcttgtagaaaatattaggttttttgaactccctattttttttttcttgttgcgcattattgttgagtgggtgaattcaacaa

SEQ ID NO: 83832 - DNA, 655 bp, Cannabis sativa
catcatagtggaatttaatcttttatttgatgctgtgaactgtgaagtcatatagagttagccgaacctgaagatgaatagtttgatcatctgatgggaggcctaactaagcacagaccacagaataagcatttgtttgtctagttcacttgtttctacaagctagaatatgctaggtctggagttgcttctactgcccatgatccccatcacttttcttttgggctacactcatttagttcttgtgagcacatatagtgtctgccctggcctatacttttcaatgtaatatccagactttctaccatgcctccccaatctgtttcaaaagttccagtttttcgattcagttcttccctgaattttgatctggttgcgaaccctttccctcgcaaacattatggatgaaaggtgattttagtattactctcactagtgtgagtgtgaggatatcccagtgttatcaactggagcttgttctttgtgactgtagttcttaaaggtcaactttcatcaagctaccaaagttgtatagtaactagaactagaagtctgcgcttaactttgtcattttctccctagcttctatattcgtgcaacagattagtttaggcacaatggcctaatgttgtagctatacataccacaagtattt

SEQ ID NO: 83833 - DNA, 890 bp, Cannabis sativa
ccagggtatggccagccagcccttatctcttcagaatctgcagcctccccaaggagggccagacaaccaggtccccacgccaataaatccttctgtgcaaccacagttggactaactcagggacatgatccagggcatagctggcccaaaaccttcagaccttaaacttgatcggtcaaggggatcaccatgctcgacatacataaatgccttacccttccaaaagttcagtatgtcggtatggaagatgtataatggacaagaagacccgctggctcacatcaaatatttcgagatgcagctcgacctctagaaggttactggtgatgtgagttatcgcatattcccagcaacactatcagagatattccaacactggtactttaaactcactccgtggagattcaacttgtgggctgagttctcacgagaattctatatgcaattctcgtcctcgagacttgtaccatcgtagttggaagaccttattgtagtcaaacagcaacaaggggatcctctaaaggattatattcagagatttatggttgaggctaccaaagttaaaggccttacagaagaaggccgatatatggccatattggggggcatactcccactaagcgacttctaaacagatatctaaaagatatccaccaacaacatgaaggagttccttgagagagctaacagctttatcaaactcaaagaagccatacaacaggcctaggtgaggcatgtcgacaataggcagtcacgaggcccccatcagcctcataacccaccaggcgcacaagcaaacaacagaaactctgcccagacttcttgtagtaaaaacactaaaaacaagaacagctctgggagaaacaatggcaaaaagggaaagtttaaca

SEQ ID NO: 83834 - DNA, 640 bp, Cannabis sativa
acggtgatggaagaatttggtattcttgtcgcctgccttaagccaggaagcacgagcccgttgtttccaaaagatttcctctttatagagaacacagtcaagatcattttgaagggccttggctcgatgaatatcagcatcagtaagagtaggggaggaatagattttgttgagagaatgttgaagttgttgaatggtatgtttgaaatgttgcttatttttaccccactgcttgagtttgtcgacacaatgggattgaatggcgaggaaggaagaaagacaattactgctttgggagtgaggaggtgaatgccagttggaaagtacaatattgggaaaatctagttcagagaaccaagaattttcaaagcgaaagcccgaatagtgatacagggattgactgggatcaaaaagtaaaactttgagacacctatggtctgagccgaagaaagggagatgagttagggaggctctagggaaaagggcagaccagttcgcattgatcacagcccaatcaagtcttacaagagttttaccatgcttaaaagtgaatctgtttcctttgaagggcatagggaagagagaatacttagagttaaaagtgttgaaatgaatcatggcattagaaggaggcattgta

SEQ ID NO: 83835 - DNA, 515 bp, Cannabis sativa
ttattatttaaatctcataaattactatcacatgagcaatataaaacaacacacaatcataaccttgccaagagaagcctagattggacagctaggagctgcttcgatcgatctttgtaggccctgtctgctgtcccaaactcgtgcctggtgtggatcccttgcaggttgaatgtggcagcccataaccttgctgcttgggcgactaatttctgttgttttagagctctttcgaatagggaagtggtaccctttgttgccactatgaattttgttttttgtggtgtttcctcttcaataaaaaagtttctttaatcaaaaaaaaaaaaaaaaaaaaacaacacccaatcatagaattaaacttgatgctattattattaattaatgtaccatgctgtactataataatcttataataataacctatataaatataaaagaattagttcatccgtacaaggagaagagatgatcttccttcctagttcctttttcattcaacttccacaatcaac

SEQ ID NO: 83836 - DNA, 513 bp, Cannabis sativa
gaacgagagtggaatttcagtaaattgtctgctgatttctcatctgttgatgtgggaaggatactttctttgcctttgtccaataatgctgcctctgactattggatttggcatggtacggggggtgagtatgaagttaaatctggttatttttttgcttgttcctcatctgctgatacacatgaatctgtctcgaacccaaacactgcatggtggaagtctttttggcagctcaaactacctcctaaggtgaaatttttttcttagaaagcaatacataatgctttgccggttgctgctgaactttttaagaaaaaatctctcacttcagcttcgtgtagtttgtgccttaatgcctgggaatctgtgggacatgcattgttttcttgtaaacatgctagacatgtttggaaaattgctggttttacatttaataacaaggttgttgtttccatgaaaatagaagactttttgttttagatttcagagtgttataccaaatctgagttggaa

SEQ ID NO: 83837 - DNA, 659 bp, Cannabis sativa
ttgttcgatcccaaattttgatatgatgtcccgtgaactttttagattattaatatttttcttgaactcttgagatttttgaaatttaagtatttttgttcaaatttattaacagaagtctgatgtggatgaaaattcaagaaatacgatttgataattgttaaaagttacgatttggtaggcataaaaattttggagcacaatttgatacatgcacaattatccgttagtaaaattgaatgtatttcaacaaaaatctttaaatctaattatctttataattaaagagaaaaattaactacctacagcaaaaatgataattagtctaccaagtaatacacaaacatgaaaatcttcaacttcaaattaatcaaatacttattatttattattatatcttgaaaggacatcaatatctatcttgaaaggacatcaatattgtttttttttttctctgcataaaagcaaacttgacaacatgtcaattgtcaaccattacaatagagttcaaatcaacaggagcagtatgctcaagatacttataattgttaaaaaatatcgttttccttttattattaatgttattattgtttacttttttttttctttccatttgtgtgtattaattattatattgtaaaatattaacgagtagagca

SEQ ID NO: 83838 - DNA, 666 bp, Cannabis sativa
agctgaaaattaattattatttcttttattaattatatgaaaattaagttcacaaacactcttattttataaagtggtattaattcaaacaaatcaacaaaaagtatggctaattaacatttttgattccgaattttgcatgccaaatcatgttttcgaatttttcgttaaaaattttctccggactaatgagattattagatttaatgacttatgttcaatttcattcaattttaataacgtaataattgttcttgtatcaaattatgccccccgaacttatggaatcatgttctcaaaactttgacaggtataccaaattgtatcctctaaactttcatccacatcagttttgtattattaaatttaaataaaaatttttaaatttaacaatctcaactgttaaaaaaaaatttaactacgtgaaaagtttaaaaaatataatttagtacatgtgaaattaatatttttaattttaactaatctatatatcaatgtaaatatatattatatatagcttcttcttaccattgatattcccaaagcttgatattctttacggcaaatttctgaaatatatgcctaaaagaaaattacattcttaaaattaatacatgcatatgaattgaaatatatcaaattaaaataaaaatgaagagcataata

SEQ ID NO: 83839 - DNA, 788 bp, Cannabis sativa
tcgaacatagcgggtattttcacaccctttagcttccttttttataaatgggggtgaaaaaactgcctctaaaggctaacattgtagtagtgatgtctagtttcctaggattacaattctatcatgtttatcgatctgcgacacatctcatgagattaaagtatgctcttttggtggactcataatatatatagatgatcatgggggatttaccacatcgtctattgtctattgtattatgacatttttaaactaatataatagaattctatctcaaaagaaaaatattatacccgattttataacaatacaaaaaagtataaaaaattgtaccttgttctatcaaaggatacttgacctcagcccctaccatactcttcctaacgtaatagacagaatgttggacctttccttcctaccggactagggttgctctgactgtatttttggaggatgccaaataaaggtagagatcctctccctgagctggtttggatataactagaggcttggccatatgttctttcaattttttgaaaggttcttcgcattcctcggtccatttaaatttttgacttttcttcaatatattaaagaacgggatgcgcttatcagtagactgggagatgaagcggctcaaggttgctattttcctgtcaagctttgcacatccctatgtttcttgggggatggcaagtctagcaaggtttgtatcttttttgggttggcctctatttctcgctagcttgctacgaatcctagaaattttcttgacttaattccaaaag

SEQ ID NO: 83840 - DNA, 921 bp, Cannabis sativa
ttaaaattaacgtaaaaaactaaaaaaaatactattaaacaaaaaattctgttaaataaccactttttatataaaaataaatatatatatttatattttatacctaaaaaattgcaaaaacaattaaataaaacatttgtcataatttagttaaaaaatgggaatgctaatatagtgaaattgactgatgaaaatgatatatcatgaagaaacaatgtttggatttctcacaaaaccccaactaactaaaatgaaagaaaatatactttttttttttaaagtagtaaaatttacttatgttttaaatgttatacacttattctttttattattttttttttgtgtggcaaaaccttcttaaatttattattttttttttaaatatgaggtgtcagttaaatatatcatcattaaataccaattggatgacccattatgtacacatgtgtatgcatgaaagtaaaacttcgaagcaaatacactaataatgcagttattatttaatagtgatatccagctgacacctcaaatttacaaagaatttgaaacataaggaaataattttaccacaaaaaaaaataagggatttaattgtgtaaaaagtcaaaacataaaagagtttcactgtaaataacctttttttaatatattctatttataattttacaacctaaaatatttatttataaaataataaaatactatttaaaagtttcaaaattacaaaaatataattttctatccaaaaagtaagaaaaaaactaaaataaaactagaaatcaatctcaaaacaaatataaattaactataaataaattataaaacaatcaaaatcaacgagaaaactaacctcataacaactataaatcaactctaaaataagtaaaaaagaatatcgaaccgtttactcgaagtctgtaa

SEQ ID NO: 83841 - DNA, 538 bp, Cannabis sativa
gctttggaggaagatttttgagaggaatcgggatgtggaaagtgaagaatatgatattcttttatgtaatatcaacgaactgtggtctgagggagatgagacaatgttttgaggattgaaggataatggttgcatttcaaagaaaggtatgatgagcaaagaagatggagaaacacatttggaggggtcttcgttttcatcctgggctagatagctgacactttggccaggatgggaatgaaactaatcttcgatgaagactttctatctataaaggaaatgaaggacttggcagaaaaaaaaaagtgtagggagttaggaaatttgacttaacatcaattatgagaagagtctcaagaaatcagggtaggttcaaaataatcaatgaagatactctcatggaatataagaaatagcggggacaaggaaaagagaagagctatcaaggcaacattatgcaagtctaacccagacaaagcaattctacaagtggtcaagaaggtagcggtagattgaagcttcattggaagtatttgga

SEQ ID NO: 83842 - DNA, 538 bp, Cannabis sativa
caaatatgcaagcatagaacctaacagaactaatctacaacaaatgcagtgcttgcctgaagtttgactcgaaacaggttgattccatggcatcctactggcaagagtcccgcatctgtacattataggatcattaagtgagcaagcagaaagaggaataatgtagaaatgtgatgaagctaataaattatagaagaaaaaaactcatattcaaagcttctaaggactatatatatatatacacaataccatcatttcactctcagtttctgaatcaacctcttcttcactatattcaattcatatttaaccattttttcatcacaagggaaggccataaaggctgacagccataccaagaaaagatattgaaaataattagcattaatgattaagcaagttcacaaaaaaagagagattaaaaacagaagaacagagaaaaaaaaaacccattaaagtagtgcacctgggagtgctttcctctctttgttgtcattttgtccaatgtcaaaattctattcttgaattaagcaagatg

SEQ ID NO: 83843 - DNA, 1083 bp, Cannabis sativa
ccgttgataacacgtgcgtgcaaatggtgcgtctcttggaagaagttgtaatgacgataagtcgattgaaataacctttctttaatgcatacgatactcgaggcagacaatgatgaaaaatgaatactctgagcgaattttaaatgccatcttttcaatttcccatctgacggactaaatcgtgcttttcgaagagaggatttggaccattcatttcaaattgcaaggattcagtcgaagtattaaataaacttataaaacccattttctctcttttttcactatctcaaactttttaaatcctttgtaaaggtgtacgtgggtcggtttggtcagtttatgcttcattttatttaacccaacgtacaagtcgggttataaaaatctaagtgcaacccacccaattgagaaaaaataaaacttcaacccacctaatgaattggtcagtttatcgagttaacccgtctaaatcaagcactaatgtttatttttttcacattcagttgttatattttaattaattgtgataatgagacaaatatatgttcaaattaaccaccataaaagaaatatagtagtttgatttttttttttttttttttataaatatgtatatgaattatattatatatagatcatgtataataaatatatatataaaagcctcttaatcgggttgatcgggttagttcgggttgattgggtaggttggtaatatttttaatccgtccaatataaagattgggcgagttatatttttgtcaaactttttgttttgtattttttgttgggttatttggtttgatttgggcgatttataaaaatttatgtatagccctaatcctttgccttcaacctggagcccgttattccaaaaaaaaaccttaaatctatcgactgtttcgagtggtgagtgcaagaagtttttgattgtctgattcagtatttcgtgaacctttgtttagcccaatttccaaacgcagagccaataaaccccaaactactccacccccacacgacgaggactttaatgcacaagtcggcttcgatcgcgtgattggctgggtacacagctcctagaaa

SEQ ID NO: 83844 - DNA, 568 bp, Cannabis sativa
ataatccccattctttattggctcgggttctaaaggcatgctactacaccaactccaacttcttagaagcaaaaataggtggatatggatcatttatgtggagaagtattctttggggaagacaaattattgacaaaggcattaggtggagggttcagtcaggaagagaggttcgaattaatgaagataaatggcttcctcgccctaccactttctccctccgaactccagcaaaggttagccaaggaacaactctagatcaaatgaaagatgagcaaggtaattggaataaggagttaattgaacaaagcttccatttggacgatatcccccttattttgggaatggctccttgttttaataatgccaacgatgatcatgtgtggcacttcacaccaaatggaatttacacagtaaacagtgggtatagagtggctgtcacaaatgaattagaagctgaagcatcaacagataaaattacaaggacttggtggaacaagatatggaatttggaggtccctcccaaagtcagaaacttcatttggagggtgtgtaatggatggatacc

SEQ ID NO: 83845 - DNA, 959 bp, Cannabis sativa
  modified_base (274)..(275): a, c, t, g, unknown or other
tgtatataaaaatcctggccccaaggacaggtctaaaaaatatatatatatacaaagggcccggggacaggccttaatcgttgtctccccttagaaagtaaggcagctattaagatgaagattgtcttaaataaaagaaaaatagctgtaaataaaaaaaagagaagaaaaagcttggtgaagtgagctggattcaaacggcttaatcaatgcgaggaggaaggcgaggatcaatgcgcgcctcaggcatggcatcaagtttcttcttcttctnncgaaatttggcaatcatctcctcaggtttggggtagaagtcaagcttgatgctctggccatttaccaaccagaccatgtaggcgccatcatcaaagcacttaatacaacgcttgcaggaaacgggggagaggagctcatctctcttagccttctttaaggcttgatctttaaagtccttgagctccttcatctccacggcaaagttagccctggactccaagtccgcctggtgcaattcctctaaggacctcacctttgcggccatctcgtctagggcctccctggcctcccgaagctcacgtttggccttggcagtagcctcgccctgcgccctcagcgccccccggtgcctcgcctccagcctatccctccgaaggacctcctctcagagcatcgcctccgcctgggcttccctttgtttagcctcctcctcgagcttcgccttagtaagagcctcctttctctcagcctcctcctggaacgcccgcctttcagcagacaggtcctgcaggatcttcacgacttcgtctatgcccccaaattcggacaagacgaagtcatgattaactatagtcttggaaaggcggctggtctccgcagtaatctggaaagggaagtaagagtgagaatgaaggccttaagtaaaatattgaggaaataaataaatcacaaagtacttaccg

SEQ ID NO: 83846 - DNA, 547 bp, Cannabis sativa
atgagattaatatatattatgtgttggaggttgtattatatcatatatagtataatcatacaaataaaagttgtaacatatgaagagttacaaatctaaaaataaattgtaacttaaggatcaaatgtaattaagtgagttattacatatggaagttatggaatcaatgagataagtttctagctgttagaaactgttacaatactcaattatatcatttaaatgagtattgggatgttggaggaagatttaactcggagagaagttacaaaaattcaattttgagttttctgaaaacagttgtttaatggttgtctttatgttgttttatggttgttttacgaaaacctagaaccaatttttgaaaacgtccataaacgtacatgaattgattgagcatgtttatagctctcttgttcaacgtttttatcctattaaataccaattaatgtgctggtaacatccatgtggtgaagacactttgatttttatatgtgatcctcaaaacactataaatagaggtcttgggttcactttgggagagaac

SEQ ID NO: 83847 - DNA, 595 bp, Cannabis sativa
agaatttagtttggagaggaggtatgaatgtcttcccactatgactatgcttattacaaagagagtggctgtatctagcttgtgccccgtgtgtggaaaaagtgcagaaacaattttccacttactggtgcaatgtgatttggctgctgcttgctgggagaaggcaggggtgttcattactggtgcagccgagacatcatttctggactggtgtattcttgcttttaaaaattcaagcaaggagaagaaagacttaattgctactgtttgttgggcaatttggggagctagaaatgataaggtatggcaaaataaaatgtctactgcttcttttattgttgcatttgctgggagttaccttgaacaatggaaatcagctcaaagctccaacttggagtcatctcaaaccggtttagttgctggtgatggtgttgaaagctggtgtgcgcctcaaagaaatcaagtgaaggtaaatgtggatgcttctttatttggagttgatcaaagttatggtattggaatggttgcaagagatgaccacggtttcttcctggaaggagtcactaagaaattcagtggtgtggttcggccagag

SEQ ID NO: 83848 - DNA, 610 bp, Cannabis sativa
  modified_base (75)..(76): a, c, t, g, unknown or other
tagactatgtcttatttatgaatggcttaattgtgaagaaaataggttttaaagtttatttgttaattaagagannttgtaaagtctaattaataaatatacttttgcggcacataatgtggctaagtgggcgtttacccacaaacggtttggttgactacctatttcctccatttcgtcggaactcttttgtaatgatcacgaggtctaatttctttttatatatgcacacttatttcaaaaaaaaaaattaataaataatataaacgataattttatttgataattaattataattattaaataaatagttttaacatttatatgattaaaattgaaaaatatgacattagtgaaataaaagataaatggttaaaaaaatagcaaaattataactagtagggccactatagtgtttaatttgctattattttatcattttttattccatataatttaaatcctaacctaggtgaaatagtataaaatgaataggatggtctcattctcatccaactctcacaacctagtttacatgatatcaaacaactagagtttttgagatcctccattccttctcctatttcaaaatcctctctctctctctctc

SEQ ID NO: 83849 - DNA, 515 bp, Cannabis sativa
attctcactgacaatcctatcttccagaattacattttttaaatcaatgtcaaaaggcctacgtgactggagagcagacacgaaagaggcatgaaatggaaatattaagaaatatggagaggtaaaagcgagtaggagatcacactcagatgtggtcacactggaagtgtgggcagaggttatcgcatactggaaagacccaaaataacatgtataaaatgaaagacgtaaaattgaatatccattaacttatgatttttctctcattttgctaacaataaatttactttaaattacatgcaagagccgaacaaaatgtgaaaaactgagggcagatgaaattaaaggtggatgggggtctaagaccatagtcggccacatcatgagcggggtgtaatgttgtcagcatatttgtctaaaaattcatattttttgaataatatattttttaattttttatattatataaaaataggctaatctcgagacgggagaactgttggaaatattttacc

SEQ ID NO: 83850 - DNA, 747 bp, Cannabis sativa
ttgttttaaaggctaaatataattatttttttgtatttattgatttcaatgtgtgtaattatatgtgttatatattgagagaatacatttttgtgtattctattgtatttaatttaaataaaatttaattaggtgtattattaattatttattcattgtaaatgtggagttcaacggttccacataatgacaataacatgaaagcatttattataatataataaactttttattttatttttttcagtatttattaattaggcctattattatttttttctgaatataattaggtgtattattaattatttattcattgtaaatatagaatttaacggttccacataatgacaataacactactataatttctttcatatttttttagagcgatattttctttcaatatttaatatgcgttttactatatatttctatttatttagccaataaaaaatttcacatgcaaatcaaatcattaatgacaaagatcctgccaaagtaacaacaatataaaatcataattactaacatatataaaaaaaattattagcatatatatatatatataaataaattaatggacgcacagtaataaactgaaaaaaaaaattgatagtcttcatcattcatctaaaatgaaaatatatatatatatatataatactttttaatgggtaatacccattgatgggaactaaaaaaattaataaagtaataatgtaataacttttttatgacaagttt

SEQ ID NO: 83851 - DNA, 597 bp, Cannabis sativa
  modified_base (373)..(382): a, c, t, g, unknown or other
aaataatgtccatgtaacaaatttgaagtaagatatttattatataattaaattattatttaacttgtaacgcctcaatttctcgagacgtcacactaaccagtccgtttaaaattatttataatgaagacaataaaagacttcttttaaaaaaaaaaatagttaagcatgagatcttattatttttaaaacaaaacattaatttgttcataacctttaaaatataaagctttacaaaaattatttgaatcataatccttaacgaaatatttttaaagcaaaacattgtgataatcccttaacatgtaatccacgccttagctcgccaccctcactgtttagttttgcctttacctgcacacagagtacccgnnnnnnnnnnctcagtaagaagagctatgtaggacataaccccccaactagataacatagtcataagcataacaatatcacaacatcaaattcaattcataccatacttgcatacatatatccacacattatatcacatatcattctcacatacgatataacatcatgtcacagtgtaatcttaatgcatgctatactcacacacataacacacagtatcttatc

SEQ ID NO: 83852 - DNA, 683 bp, Cannabis sativa
  modified_base (71)..(71): a, c, t, g, unknown or other
ttagagatatttgaaaatagaatgtataatatttttaccttctaaagaaactagtaataagaaaagttagngcaatgttagggcaaaacgataaaaaaactagaaagaaaccttcagactctcatcagcttggttcttctatttcttcacttcatggagggaaatgtttttcagcaatatgaaccttcgatttcttcttaacaagccgatgctcacttgttttttctaggcagagcaaagtctgaacaatcatcttcaacaaggggccatttcccttaaagtttgttggcaagagatttaacaccaatttttgaaggctttttcaacaatggtaatggggaagataaaaccaagtaatggccatttatagaacagaaaaaagtagaaaaaacttggcaaaaatgttgttagatgatgaaggatggcagttaagaaagatagacaaaatagttttttttttttttatcaaaaatggttttgatcgttggacaagttttcaaacagaaagctacaatgaaaactaaaacgaaactgaaaaaaaaaaaaaattgatagaaagggaggaaaaatagattgtgaaggtggtacaatgacatcatgcatgtgtaaaaggtattagtgtaaataaaactatatcagaagtaaaaatgtaggagtagctatgtaaggatatataggtaata

SEQ ID NO: 83853 - DNA, 2542 bp, Cannabis sativa
acaatttaagttttttatggctaaattttggtgggactctacgcaagacataccaaattcatctcgttgacattatgttcttctaaatgttttggaggataaagaggctcatcctcttaattggcagagtaagagaccttcttaagcaaggtttgatttggaaaataggcaatgataacttagtacaaactattattagattcctaaatttatatttatcacacatataaatctcatgtttcctttccccaccctttaacttagtctctttagtcttaccagtcacaattttcaactgagaatcatatcatgaatacagcaatggttcaatgatcttattaaaagaaataaagaatatgcccacctttacaatgacaataagaatttcattagttatttatataagtgatgatatttagaaatttccttacaaaccaaataaataaaattgacaatgattcctaagatccttaagaactcaatgtgtactgtttttattattatatgcaaacaaacaagagatgcaaacacatatgaacatcaactaactaaatcacctggtataaataagaaagcccatttctagtgttttcgttttccttgattatatctagtgttgaatgccagtcaacatgttagatttaccatctctcatacttgtccataagcatcttcaagcgctttagtttgtactgaatgaaccatctgcaacttttgatagccaaagcctgacctttcgttttcctgtttcgagttgccttaagatattatagagaggaaccgtagccccaccaattaatccctcatctttcccgcttgaaacgtctcgaacctgcactaccataccagcaagagcaccaatatgcatgaccatgaagtaagtttggcataaaagatgcttcacaatataaatgtgaaaaagatgttaagaattgaagaaaccttgtattgtgggtggaccaaatggggtaccatcaatgtacaaagcacacttcacattcagctttgttcttctctcatcagtagcggaatcagcagcatccacatcaagaaaggttaatgcataggccattctaatgctgatgagttcctttgaaatttatgattaattaatacattgattaatttgtgatctactaagaggtatgatgatgcatcatgagctttggagtatgccattgatttctcgcatcaacagtctggattcatcgactatgcgtttgctgtcataaactatataactgcacaattcatgccttggaagtggtttgagtgatcttaagtcagtgagtggatccaagacgacaggggatttagagatacattcccttgctggatgaacatgctgccaccagaaatcagagagtgccaatttaagggcatcccagtattcagcatccctataaagtcggaacaagctgcttcctttaggagtccaaacatagaaatccatccaatccctatccacaatctccatcaacccctgagcctgtggaatgcagtaaagcggaattcgtgaccaaggggaagctttgctcatatcaccattgaaaaagggacacttaatctcaagaactcctcgtgaagacaaaccataaacaagcccatcaacaaccccatctggtgaagctgccaaccaatcatctcccgggtttgttttagctgaataaacctgaaactctggaaacaatactgtatttcctgtgatcagtttgtatctttcaagggcttcctcttctttgatattgctccaacatgtagcaaggttaccagagaacggctcaatggccccaatcttctctaaccacagttggactcttcgcttacgccaaaacccaatggcagaagcaaaagtacttgcagtcaatttattctttcttagttgctgccaattcttgaaccagtgctggagaccacttgattgaagaattgaatgagtttcaggagaagcatatctgttattcagtactactccaccatttatcccaggtctacaaatgttatgactgtgtattctcctatagaacagacctttaataccacaacccaaagaaacttcttgactgcaataccaatgaaagaaaaaaagaaagaaaaaacacccatgttacaaattcttaataaataaaaaataaacaaacaaataattgaagagaaagggctttaccagggaaacatgtgaggagtaatccgataggtaaagagagagaaagtgaagcttttcataagcacagcccagaaagaaacttaagtaaggtttttgcaagagttcatgggttcacgtcacctaagtcgaaattcaaggccaaagactctgtaatcaaatactcttaattattaaactcagttcatttctaagtttcctcacaaacaaaatgcacacacacatatatataagcatattatttcaaataagttttaacacttgtgaggcattttctcaaacacttgtgaggaattagggacttcctaataataataataataatttttagaaagaaaaaaaaaaaaaaaaggacaaattttctctctctaaaataac

SEQ ID NO: 83854 - DNA, 689 bp, Cannabis sativa
gccaacattctccattgtaatgtcttcaaaatgtaggtctgatgctgctcctggtttggaatcaggccaagttttgattcgaaccccattttgtgtgttctttaatgtgcaactcttgacgtaaacacctttgacaggctcctcatctttgtactttcctaaactaccgatgctgatgccgtggccaggtccgcatgtgacattagtgattgtgatttggttgcttccatccccaatagagatgcaatcatctccagtttcgattgtggtgttggtaatcttgatgttgcttgattttccaatgtggattccatcggtgttgaggctcttttcgggtgccaggacatggaagtgttggaaggtcatgttcttgcatccaataaggttgacatgaaactgtttgctgtctttgcttgtaatgtcttcgattatggagttggtcacaaagttgaaccttaaattctgtttattatatatttgcaaataatgttaaataaaaaacaaagaaattgtttatacaggaaactacactctataccttttttatatggccctcttttatttttaccttcttttttaaaatctgtcatttttaccccctttttttaaatattgtaccaattttgcccatctcacttcaagatactctccatgtgattcttttatgtaagggtattttgggtacaata

SEQ ID NO: 83855 - DNA, 652 bp, Cannabis sativa
agtagaccccacatttgaaattctgaacctgtaagttttccatgttggacacaaacacatccctcactaatctatttttttataactgtcaaaacagtacatacttatggatacactgaacatgctttataataataaaaaaaattaaaacttctttgaaattcactattattaaattttttatttatttttttcaaggggagtttgtttgttgggtgaaatctgtaattatgatcttgaattaagtagtattgatcaatcaaatttaacagcaatgactcataagggcctataccttgtgtaacggtgaaagtttcatggagctttgtcatttggtgaccataagggcctttaccattatcaaaatgatattgggaagaccctgaaaacccataggcggcttctgcagctgcactgacgaccgactccactgtttttaaagttcacatataaaattattatacaaataataattagtcttattcattaaatgaaattggttacaaatggaaaataaacatggagagagtgagagatagaaaatagaaaatagagatgaccttgtaactatcatagctccaatcaccaataaggaggtcgaattcagcttcgggtcctggcaacattccatttatagtaataacctgttgga

SEQ ID NO: 83856 - DNA, 688 bp, Cannabis sativa
aaatattgtatgccttgtttcaaaaaataatattgtttgccttgtatggttggtttggtggctaaggatgcctgaggtttgctcattgaaggttgaactaaactctcgtttagtttagttgaatcggttctaactgaggctataagaatttgtgaggttctgagtttgataaaagaaagaaattggagtcatctgagtatagagacagaatacatattgtttttatgtgatgcaagctcatcaatgttctttaaatatgattttcttgtttggtatcgttacttaagagtataagaattcgcttgtagatttaaataatatttctttttcttttattaaacgattaattagtgtaatgattctaattttgctaaaattactatattatatcatgattgtatgttcaatttagagtctgtttcaactaatttggtatcgtgtttgaaagttaaataaaattaattgttcattcaaagaaaatatatattgtttgcctttactaaataaatattgtacatgtgtgtcaagtaaagaaaagtataaattgtaaagtaagtggctaaaacattccccaaccccaatccccacgttgttgccccattctatgggtttgcatgagtaagtggccacaacaataataggaagaataagaatagtaataattttgtttcaaataataataataata

SEQ ID NO: 83857 - DNA, 960 bp, Cannabis sativa
accaatgatgagaggacgatgctttgagtctgtctatcagcttatctagacaagactcaaaacaataaaataaaagatttgtggcatgcaaggctacgacgtcatcttagtaattattatattattattttttcaaaatacaaatgagatacattgataacaattatttatcaattattatattattaataattaagatggcgacgattacaagtgtatacagtaatgacaatgattttgaatgtagcaatgagtgagatacgatgatgacaataattttaaaattgatgagttttaaataaatttaccaattgttatattttctattttaagttctcaaaaaggtcatttaaaagagttttctaactgcatgatacaatctcacaatttaagttaatttacttattacattctcatttatttatactcttcattttctctatatattcaacatctttttttttaaaagatttatcaattgctatatattttctttctcagaatggtgacaattacaaatgagatacagtaataaaagctttgaatttagtgatgagtgagataaaatgatgacaacaattttaaaatagatgagtttgaatagatttatcaattgttatatttttttcaagatggtgacgattacaactacaagtgagatacagtgatgatagcagctttaaatatagcgacgagtgaaatactttgatgcatgataacgattttaaatttgatgagttttcgataaatttttaaattattacctttttgaaaacatactttataataatatatatctataatataataattcattaattattttacatatttttagttcaaaataataaaaaaaaaattaaaactttacaatattaatttatttttcttttgtcattaagagtagaaaatgataaaagtagctgagtacttatttatactattaaaaaattataaaaa

SEQ ID NO: 83858 - DNA, 6218 bp, Cannabis sativa
tagacatatgtgcacccactcttactgcaccaaggcacaacaagggcactgtgcacccactcttagcgcaccaagtgacaacaaggccgtgtgataaccgcacaacaagggttccgtaatggggcgtgataacctttttgtgatgcgtgttcattcaagcgtggtgcgccaaggcagtgaatgggagtgtggtgaacttaggcatgaaagcccacatactttggtgcaccaatgccaaactgggtacatggacacctatatcaacagcacagaaaaaaattatttttcggtctaagtcttttgttgttcccgaccaacacttttgaggctcatatcaagtcccaaagggaaggaggacacatgttattgctacggccgcaacttgtgttgatggaagcaccacaaacaccttgataacctcaggccttgaaagtgtgttgttataaaaaagggggagggacgaatctgagcgacacagggctgaatctcagtggatcgtggcagcaaggccactctgccacttacaataccccgtcgcgtacttaagtcgtctgcaaaggattctacccgccgttcggtaggaattgtacttcaaggcggcccgcacaacttgtccgctgtgcgagcttcaccaacgacacgtgcctttgggggccgaagcccctactgcaggtcggcaaacggacggcgggcgcatgcgtcgtttctagcccggattctgacttagaggcgttcagtcataatccagcgcacggtagcttcgcgccactggcttttcaaccaagcgcgatgaccaattgtgcgaatcaacggttcctctcgtactaggttgaattactattgcgacactgtcatcagtagggtaaaactaacctgtctcacgacggtctaaacccagctcacgttccctattggtgggtgaacaatccaacacttggtgaattctgcttcacaatgataggaagagccgacatcgaaggatcaaaaagcaacgtcgctatgaacgcttggctgccacaagccagttatccctgtggtaacttttctgacacctctagcttcaaattccgaaggtctaaaggatcgataggccacgctttcacggttcgtattcgtactggaaatcagaatcaaacgagcttttacccttttgttccacacgagatttctgttctcgttgagctcatcttaggacacctgcgttatcttttaacagatgtgccgccccagccaaactccccacctgacaatgtcttccgcccggatcggcccgccgaagcggaccttgggtccaaaaagaggggcagtgccccgcttccgattcacggaataagtaaaataacgttaaaagtagtggtatttcactttcgccgtttccggctcccacttatactacacctctcaagtcatttcacaaagtcggactagagtcaagctcaacagggtcttctttccccgctgattctgccaagcccgttcccttggctgtggtttcgctggatagtagacagggacagtgggaatctcgttaatccattcatgcgcgtcactaattagatgacgaggcatttggctaccttaagagagtcatagttactcccgccgtttacccgcgcttggttgaatttcttcactttgacattcagagcactgggcagaaatcacattgcgttagcatccgcagggaccatcgcaatgctttgttttaattaaacagtcggattccccttgtccgtaccagttctgagttgactgttcgacgcccggggaaggcccccgaaggggccgttcccagtccgtcccccggccggcacgcagcgacccgctctcgccgcggaagcagctcgagcagtccgccgacagccgacgggttcgggactgggacccccgtgcccagccctcagagccaatccttttcccgaagttacggatccattttgccgacttcccttgcctacattgttccatcgaccagaggctgttcaccttggagacctgatgcggttatgagtacgaccgggcgtgagaggcactcggtcctccggattttcaagggccgccgggggcgcaccggacaccacgcgacgtgcggtgctcttccagccgctggaccctacctccggctgagccgtttccagggtgggcaggctgttaaacagaaaagataactcttcccgaggcccccgccgacgtctccggactccctaacgttgccgtcagccgccacgtcccggttcaggaattttaacccgattccctttcgaagctcgcgctcgcagcgctatcagacgggtttcccccgtctcttaggatcgactaacccatgtgcaagtgccgttcacatggaacctttcccctcttcggccttcaaagttctcatttgaatatttgctactaccaccaagatctgcaccgacggccgctccgcccgggctcacgccctaggttttgcagcgaccgccgcgccctcctactcatcggggcctagtacttgccccgacggccgggtgtaggtcgcgcgcttcagcgccatccattttcggggctagttgattcggcaggtgagttgttacacactccttagcggatttcgacttccatgaccaccgtcctgctgtcttaatcgaccaacaccctttgtgggttctaggttagcgcgcagttgggcaccgtaacccggcttccggttcatcccgcatcgccagttctgcttaccaaaaatggcccacttggagctctcgattccgtggagcggctcaacaaagcagccgccccgtcctacctatttaaagtttgagaataggtcgagggcgttgcgcccccgatgcctctaatcattggctttacctgatagaactcgtttacgagctccagctatcctgagggaaacttcggagggaaccagctactagatggttcgattagtctttcgcccctatacccaagtcagacgaacgatttgcacgtcagtatcgctgcgggcctccaccagagtttcctctggcttcgccccgctcaggcatagttcaccatctttcgggtcccgacaggcatgctctcactcgaacccttctcagaagatcaaggtcggtcggcggtgcaacccacaaggggatcccgccagtcagcttccttgcgccttacgggtttactagcccgttgactcgcacacatgtcagactccttggtccgtgtttcaagacgggccgaatggggagcccgcaggccgatgcctggagcgcgcagatgccgaagcacgccgagacggcgcgcgctgtgttccacaatcgaggggacgacatctccacgggcatatcaacagcccgggcttgggccgcccccccaatccgcatcggtccgcgctccgagtcgatcggcagaccggctctcaccgttccgcatccgaccggagcgcatcgccggcccccatccgcttccctcccgacaatttcaagcactctttgactctcttttcaaagtccttttcatctttccctcgcggtacttgtttgctatcggtctctcgcccgtatttagccttggacggaatttaccgcccgattggggctgcattcccaaacaacccgactcgccgacagcgcctcgtggtgcgacagggtccgggcacgacggggctctcaccctctccggcgcccctttccaggggacttgggcccggtccgccgctgaggacgcttcttcagactacaattcgaacgccgtgggcgtccgattctcaacctgggctgttcccggttcgctcgccgttactaggggaatccttgtaagtttcttttcctccgcttattgatatgcttaaattcagcgggtgatcccgcctgacctggggtcgcgttgaaggcactgcgttcgcagcacattggggtcgtacgggtctagtcggtcacggattcgcgcacgacggggcaccgatataatcgaaaaccaccgaatgtcgaggcgattgcggccgacgactcgaatttaggccaaccacaaggcaatgctcatgggaagccagtctccgccccacctgaacacgcttttggcagtgcacatgggggcaacggcgtgtgacgcccaggcagacgtgccctcggcctagtggcttcgggcgcaacttgcgttcaaagactcgatggttcacgggattctgcaattcacaccaagtatcgcatttcgctacgttcttcatcgatgcgagagccgagatatccgttgccgagagtcgtttagacatttcgataaacacgcatctcgattggcggacaccgtctccgggccaccgcacgagccacgcgataatcttttattgttccttggcgcagattgcgccggggttcgttagcccgccgagatttctcccagcaggtgcgggcgggtccaaggagcaagctcctctcgcccgcccaagctgtttaaaacgtgttcacgggtcgttctgctgttgcaggtttcgacaatgatccttccgcaggttcacctacggaaaccttgttacgacttctccttcctctaaatgataaggttcagtggacttctcgctacgtcgcgggcagcgaaccgcccacgtcgcctcgatccgaacacttcaccggaccattcaatcggtaggagcgacgggcggtgtgtacaaagggcagggacgtagtcaacgcgagctgatgactcgcgcttactaggaattcctcgttgaagaccaacaattgcaatgatctatccccatcacgatgaaatttcaaagattacccgggcctgtcggccaaggctatagactcgttgaatacatcagtgtagcgcgcgtgcggcccagaacatctaagggcatcacagacctgttattgcctcaaacttccttggcctaagcggccatagtccctctaagaagctggccgcggagggaatcctccgcatagctagttagcaggctgaggtctcgttcgttaacggaattaaccagacaaatcgctccaccaactaagaacggccatgcaccaccacccatagaatcaagaaagagctctcaatctgtcaatccttactatgtctggacctggtaagtttccccgtgttgagtcaaattaagccgcaggctccactcctggtggtgcccttccgtcaattcctttaagtttcagccttgcgaccatactccccccggaacccaaaaactttgatttctcataaggtgctggcggagtcctaaaagcaacatccgccaatccctggtcggcatcgtttatggttgagactaggacggtatctgatcgtcttcgagcccccaactttcgttcttgattaatgaaaacatccttggcaaatgctttcgcagttgttcgtctttcataaatccaagaatttcacctctgactatgaaatacgaatgcccccgactgtccctgttaatcattactccgatcccgaaggccaacagaataggaccgaaatcctatgatgttatcccatgctaatgtatacagagcgtaggcttgctttgagcactctaatttcttcaaagtaacagcaccggaggcacgacccggccaattaaggccaggagcgcatcgccggtagaagggacgagccgaccggtgcacaccggaggcggaccgatcgacccaacccaaggtccaactacgagctttttaactgcaacaacttaaatatacgctattggagctggaattaccgcggctgctggcaccagacttgccctccaatggatcctcgttaagggatttagattgtactcattccaattaccagactcgtagagcccggtattgttatttattgtcactacctccccgtgtcaggattgggtaatttgcgcgcctgctgccttccttggatgtggtagccgtttctcaggctccctctccggaatcgaaccctaattctccgtcacccgtcaccaccatagtaggccactatcctaccatcgaaagttgatagggcagaaatttgaatgatgcgtcgccggcacgaaggccgtgcgatccgtcgagttatcatgaatcatcagagcaacgggcagagcccgcgtcgaccttttatctaataaatgcatcccttccagaagtcggggtttgttgcacgtattagctctagaattactacggttatccgagtagcagataccatcaaacaaactataactgatttaatgagccattcgcagtttcacagtctgaattagttcatacttacacatgcat

SEQ ID NO: 83859 - DNA, 908 bp, Cannabis sativa
aaaaaaaattcgtttagtgtatatataatatatatgcactgttttaataaagtcaaagccattcattatgattttataaaataaattaatctatataatctatccttcaaaaaagaagaagaagaaaattacatgaaaattctacctgctgccgtgtgtgaagaaattattttcatattttttttttggcaagaggtgaagaaactgccttttttttaaagaaaaataataataaaagtgggaaactgttagttttactgatttatttgtaaatttgaagctaattaggttttttatcttttaaaatttgacacgtatcaaattatgtccctgaatttttaaggtcgttaaaaattgctcctgaaatattgagattaattattagatttaagaacttttgttcaattttaattagtaagataagtctaattgtaattttatgactaattgtaattttttttttctgttgctagaaattataactacgtggcccataatgtggccaaatgggcgtttgccaacaatgttacgggcatggtagagatatctcctatacctgttagtatcttttgtaatgaccatgaggtctaacttcagttttatttataaacgcattttcaaaaaaaaaatatggacgaaagttgaggaatataatttggtacatatcaaagttcgagaaacatgatttggtacatatcaaaatgtggggagcatgaaccaatcattgaattagtaaaatcaattaaattggacaaaagtcattaaatctaataattatttcaatatagtttaaagagaatttttaacaattaaaaaaattataatttaggtacatgtcaaaatttagagaaaaaaatcttaattagtttaaattttaatacctcgaatattccaaaatgagagaaaaa

SEQ ID NO: 83860 - DNA, 1814 bp, Cannabis sativa
tatgtgaatgtgaacacacttaattacaaatgtatccattatgaattaacaggtagaatgactatttagtttttgaggctgattacaaattctgtgctttgtagagaattaattccctatatatggcagttcttgtgtacttgttcttattattagggaataagaacaagtgatgaaaaaaaaaatgctcaagtcaagtgaatgaatttgaatttgaattattactacatataattaactcacagtaaatacagaataaagtaccaatgtaatatatatggaaaaatggggtgggagggttgcaagcatcatcgcagccttgagcagatctcaactatgttggcacctactcaaaccaccaatcatgtgcataagcatagcccaacccaaaacttacaattattgttcattaattagtatacacagttcaaatacaagcaatagtcaataacaaacaatgtaataatattgtattctaaattctgatgatgaggaggttggattggcttggcttggcttggcttaaagattcatcttccagacagtagtacggccagaaccatcccctgtaaaaatctgtcctcctggacccttttgaattgtcctgacttcttgtgttgtgaagaatctacctttctcttcaaagcttggcaatgcatacagacgaacagaattatcattacaagagcaaagcaaaatgttgttttggtcatcagattcttctttttcttttgcatcacaagtcttaggagggagtgttatcccattaagtgcaagaacaccctgaaacaaacatatcattacatattattattattattgtaattataattagtagtactaagtaatagattaattaggatgaatgaatgaatgcatacatgtccttcctcatgggtatagactgtctctacgtggcctttctcagtggtagcccaaattttgatagtgccatccaatgaagatgagactaaataatatccacaaaatgcaagggacatgacaccatctgaatgacctttcaaggtggccacacattgtaaattgtgatcccacacctacaaaacaatacaatatatatgattatatatgtatgcaagtaaaagagtaagtaatgcaatatatatatatatatatttatatgagtatatgtactaccttgattgtgtggtctaaagaagctgaaaaaagtctgtttccaccataacacaaacacacaactggacctccatgtttcatggaagatggaacaccaagagggatgaaggattagcagtaggagaagctccatcagaggaagcttgccaagctaatatctgaccactttgggtaccagcaaacagagtaccattgacaacagtcatacagttgacttgaccaacaggtccctctccatcaagagtgattgtaatttcaggtccagtggtagcattattctgagtgttccaaaccttgatttcatttgggagaccaatgaaaagccaagggccttcattgatcaaacacccaattgggactccaaaattgatgacagcagttgttttagcagtgtggcagtcccaaatgtaaagcttaccatcgtagcttgttgtgtagagtttatctccagaattcgaatgaggcagagcaataccagtcaccgcctataacgagccaataccacattttccagaaggaagaaagaaggaaccatcatccaatccaatccatgaatccaatctacgaatccaatccaagaatcaaaaacagtgaaaagtaaagaatgtagcaagagtaccttagtgtggccgtggagatttgcgaggtaggagtaa

SEQ ID NO: 83861 - DNA, 870 bp, Cannabis sativa
tcatttttgtctctaataaaggcccatgggccgaatagataaaaaaactattatttcatacagcaggggtcccaggctcctttatggatcaacctagtcagaaggggccaaaggcttgacactttggacggtaggggttggggtctcattgctctggttagtcaaaactgtggacttggctgcctcaaggctttatatggccacctgacctacacagtaatttagatatgcctctttagtatctccgaggtactcaaaattctttgatgggtttgccttccaaaattcataaaagacctcaagggcaaaaatttcagagtttttgacctccttcatgagctcttcttccctagtttgcctggattttacgtcctcttccaagttcgtcttatccttggttaaatttgcaagaagagtatggaggccatccctctcgtccttgagctcgttgacctccttaattaaggcgtcattatctgcctcgagctcggtggttgatggtatctcttggatctctttgttcagctcctcaacctgactgttagcagcaagaagtttcttgttcacctctcccagcttacttttcacgtccatgaccctcttattggcggcatccacctccctctacagattgttggtgatggtaagattcttcgcgaccgtggatttggctcaggagtaggcgtaggccatctttagattgaccagcacggaaaaaaaaagttaaagctcgcattggtaaaaagacaggataaaagtaaagaagaaaatacttatgcgagctgcttccttcaagacccgcccatcaccagctccaaggaaacctcattgtctgcctcggacaactgattgctcactttggggagtgac

SEQ ID NO: 83862 - DNA, 1142 bp, Cannabis sativa
aaatataaggatatgattttgtccaatactctcacgaaatatattctgtgtaccctagttattcttaaatcaatctcagctgttagatcaaataactctttaatttgatgactaccgtacatcacggattacaatccgtgaaagtaaacaaaattatatccctataaatatatacatatagtaccttttttagagagagaatatattatattactataatatttaggtcgtgcttttttcttgtttttgttattagctttttttggaacaccaaatttaaatccaaaaacatagttgacctttttattagagatgcatattaaattaaaatacgtaaaatcttaaaatcatattgtaccagaaagttatcatacctcggcattgcatatgatctcatagcaataatcatatctatatctatagataatctatatatatatatatatataaaagagatataaacaggtaaggtcacactctaaaatctctctaattaacattattgattctcaatttaattgtattttttgttttggcctttttttcttttttttttaattaagatattttaaaataattttttttaaataaatgataactctaaaatttttggttataactcaaaaatttatccttatattttggcttttggactttttttcctataatttaaaaaataattatttttttatcgctcattactaaattctttatataaatatatatatatatatcttagtttacgttctttttttctttctataaagtgttattttcttaccgacttaaatattaataagaagaatggagaattgataagtcttaatatgatttttattgatgagaaagtaattattatttttattcatatttttcatcttctacttttttttatcaatttattaattattaaatactcagcctaatatttattttacaaaaaagtctaatgcatgcaacaataagaaaaaatttagtttctaattaagtttaaaaagctattgagtgaagattctttgtattgtttataaaatttaaaaattgtggtaactacaaatgagtacaaaccactatcaaatgactataaaattttatttttagttacaacttcagtagaaatactagaaagatagttaacattc

SEQ ID NO: 83863 - DNA, 733 bp, Cannabis sativa
atgtttaaatgcttcccatggggcttgtacaggaaaccaaaaggaaacctatattcaaggcttcttgccatgtcctccaaatcatgtctagtaaaaccttcaattttacagtgatcaaagtactcccaacaccctccctcatatcttctatttccaaatggggaaaaccataaacccccatgtataagcttcactgtgaattcaccctcttcattcactgccacaatcacaacaagctatagtgaaccagaaatacaaagacaaaaaccaaaaccaacaaatagcccctgcacaaagcctaaactaaacattggaagttaagttaacaaagtgcggctaaaccccccaaacaattagcccctgcacaaaaagacaaaaaccaaaacgcaccccacatgtgcaaaccatttccttttggtcaactgtaaaccacgtgaaatatcaaaagcatataccccactgatcaagataccccactgatcaagataccccactgatcaagacaaaaccctcgacagtgagaaaagattcttcttttcctcagacctttgttttttactcaatattcaaagccactttaatacccatctaactatttgacctaacaacctaatcccaacccattataaaaacccattttccctgctcaacgacacgtgaaccagaaacactcaacataaaccctaaaattttaaaagtttagaaatcttaccaggtgggggatcgtgcgaac

SEQ ID NO: 83864 - DNA, 587 bp, Cannabis sativa
ttcgtgtcttcacacgtgtcaaatggtacattttttcgatttttgaatctaaacgacgccgtattcacatggcaatggtggttatgaatttttttccactactttatttttttgagttaaataaactaattgataaaagaaacagctactgctgaacaattttattcatacaaattttattagactgaaactgaaaaaaacaagttatatatggtaaagttcaactgataagctatatgaaaaaatgataatctttagtataaagatcagttgataaacttgtaattatatgatggagatttaaatagtttacaatatcgaaaacataatttttggtattctaatttactacacgttttaaaaacttcaaacttattttcagcactgtaaactattcgaaaatatttcaatatattggacagagatttactaaaagattgtaataaaaaattgacggtaacactcatttccatctcggtatgtttgttagtgttatgcttaattcgccttctattgacttgttatgtgtgctatgttagataaattaacaattaacccaagatctatttgtatataacatagaacac

SEQ ID NO: 83865 - DNA, 559 bp, Cannabis sativa
taaaataataaatcaaacctttataacctacaaaagtaaaaattcatccctaaaatttatttgtgactaagaaaactgacaattgaggtataaatgtttcattatttattaaaattgtgcaaaatagattaatgaaaagatgaaaacatatagtaaaataacaatcatataaaaagaagaaaaactgtacagtactctttaaatgattatttcaataaatttctatctagttcgacatttaagataattttttagtttaatttttttttatggttatgtatgttgtagctatttatttgtaaattttgtaacaaaaaaattaaataatttataatataaaaaataatgtttaaatatttattgtacttgtgattattttttcttatacatgatacagctttttattattaacatgattatgataatatattaaatgagaaaattttaggtaaataatatcacatgttatttaaagtagaaaagaatatactatctaattaagagtagtaaaaataaaaaaaaaataaaaaaaataaagatattattttttttttaaaaa

SEQ ID NO: 83866 - DNA, 842 bp, Cannabis sativa
aaaattattaattatatatattaattaatgataaaagagtaaataaaaaataatatttattgtgctataaattaaattagctcatcttataatttgtagcaaatttggtaaaaattttaacacgggagcatttttaattgagtgctaaaatagtagtataagctatattttagggaaaaaaaattcttcattattgtgctatttcttgcgttgaatttgggctatagcattgtttcaaatttgcacaataaatatagtttttttcattacaattttatcactaatcactaatgatagatattaatacatgattttaaattattatattatcattataactattttttaaattaatatttgatttattgatgatcactaattacattttaccttctgtactaatttacatcttaaaatgattatgtgcattagaccacaatagcaagtattatagcaattttttgtactataggctaaatttaacataatatttagactttgtataggagatatagtcttatacaccatatttatagccaatcaaatataccaaaaaaaaaaaaactatgtatatgttttgtcctgcattgttcatgtatatgtaatttgtgagataaaatgttagggtgttcattcaatctaatctgtattattttgctcaaagtgtattcgatccgcactaagtgcgaatttcgtattttaaatccaattcaatcggcataataactcaaattcaatccgcaaaagtacaaattggattgattattttaaatttgttactttttaataataaattatttaatatttattataaaatattttttcacataattaacaacaaa

SEQ ID NO: 83867 - DNA, 737 bp, Cannabis sativa
ggctttttgtagtgacactccaatgtatatttttgactactgtatcttccttggcagatccttaatctcttggaaattgaaaaatcttttcgacaatctattgttcttccagttgaagcagaatatcgggctatggccaatgccacatgtgagattacctggctattagcccttctttgggactttggcatccaccacacaaagatctcgacattctttattgcgataatacaaccacaatccacatttttgacaaccctgtattccatgaacgaacaaagcatattgagattaactgtcatgttgcccgagagaaggtccaagaaggcacactgaagctaattcaagtcaccaccaaaaaaaacatagtagatatttttaaaaagcctctatttcctacttatttccatatacttgtaaccacgatgaatctaagaaacttacacatttcatcttgaaagaggggtattaggatttgtttagcccctacttattgtatatatatacatcttatttgttctaataacctaatcaagccaagtaatattcggttattccattttaatatagcagagttattctctctttaaaatgtaaaagtcatctagctaaatatcccgtcatagtgcaaaaaataggataacaagttaattattgttttctttaaaaaaattcataatgattttgcattgtcgagcctaataccatcactattaggaattattttaccaggatct

SEQ ID NO: 83868 - DNA, 1609 bp, Cannabis sativa
  modified_base (29)..(41): a, c, t, g, unknown or other
taaacaagattgtgtgattaaatgtattnnnnnnnnnnnnnagtacacagggtttaactgatagggtaatctacaacgtagtttatatggtgctatgtcctttccaaggcattagttaaagtaagcttgggttcaatgcatggagtatgcatcggaagggacggatattgaacttgaattagatatgataaacttaccgtaatatttattctattatttaatatcacctaattgatcttagatcaaatgatctcaatcctaagattgttaggttctagttcaattgtattatttgtgatcttcaatctagttgttaaagtcgaccaatggatcttctcgtgacataggaatttttataattttacatgttttgtgccaaacaacattagaacgtggtgtttggctattataatcacatcctagtgtttttagtatagcgggtcaattatagttagatatattgggaatatcgagaatagtcagaattttggaagtgaccaaaatacccttaggtgatttctatgttttaagtgtgggcaagggcaaaatgatcattttggcccatttgcctttttgtcctttagtggacttttgtggatttattatgctgatattaggttgattttaattaataaaaccaatttcctttattcatttatttttacaaaaaatcaaacaaaaaaaaaaaaaaaaacacactctctctctttccttcctctctctctttgaaaccccctaaaactagctagggttcttatttttcttcttcaatccagtaatttccaacaactctaagtgttttccaagccaaggtaagctcctagcaacttcctcttaagtctcttgaattttaagaaattggattatgcatgtttttgtggttttacttgttgttgttgttgctgttagtgtttggattatgtttctgtagttaaattatgtttagatatgttgatttgagcatgttttgatagtttgttgttagagcaagctttgagttttagaactcaagcttggctctttaatggtgtttttcaattctgagcttgggtagttgttttattacttggaatatgtttattggggtataatatgcatgtctggaaggtttggtaaagtttggaatcaatttgattaggttttggagttttttgggttttctggtataaacctgctaaccggttttacaatgcctataaaatctattacccgaatttgctgttgggttccccaaaaaatttgtgttgtcgattcgtgctagtttcagagctttggttggttaattccctgctagtttacgggattaccatgttaagttgcagtagatagggttttggtttaaaacctaagtccccggttgtgattcagcatgtcacttatccatgttgttatcgatgtgatttaggagcctgtaattccctgagcagttatttcactcaggttcgccgacacacctgaatttggaattgaggtaagattagtataatgtcatgcatatgtaattacatgttttgcatacatattttttatgcctgttagattacattgatagcactaacagtatacttagagttgtgctgattagtgataaatgtatgttggctgaaat

SEQ ID NO: 83869 - DNA, 1305 bp, Cannabis sativa
tacatgctcacttctaaatttgatgtttctttcattattcctcaattcttttctctcattgccactcaattttcagttaacattaaagttgttcgttgtgacaatactaaaagagctcaattatacattcttctatgctactaagggaatctcaataaataattcttgtgttggtcgtccttaacaaaattattgtcgttgagcgaaaacgtcaacacatattaaatgttggtagagcattattatttcaatctcatttatccttaccttattggagtcatgtcattaatactactgtacatcttataaatcgtactccatctaaattactaacaaaagaacttcatttgagatactttataacaaagctcccaactatgatcacctcaaagtctttgattgtcttgcctttgcttcgacattagaaaccaaacgatacaagttctccctaagatctcgaccttacatttttataggttaccccctggtatgaaagcttataatcttttaaatattgaaactcaagaaatcattcaatctagaaatgtcactttcatgaagatatttttccactttctgaaactacatctcccacatctataaatgaattgttctcactttctttgcttccttctacaggacagtcacatactccctctaaggacatctcacctgttcccaaacctaatgacatttcatcctctaacatttttcctgtcaccaacactactcctgatgaagtaccatccacacccaggaacatatcaactacttctcctatcacttccacagtgggaagaattttatctaaacttaaacgtctttctgattacatttataataccactactgcttattctactgcttaccctattaataaatatttgtcttacaataggttaacacagaactttcgagcagtggctcttgctgcccatacctttgtagaacctaccagctataaaatggcaccaaaagatcccatatggcaaaaagccatggatgctaaaactgatgcccttgaagccaatgacacttggattgttgtcactcttcctgatggccaccatgccattggctgcaaatgggtatacagaatcaaatacaatgctgatggatctgttgatcgatgtaaagcacgattgattgccaaaaggttttaaccaaaaacaaggtattgattatcttcacacttattcccctgttgcaaagtttaataccttaaaacttatgctcgctgttgcggccattaacaattggtctctgtaccaacttgatattacaatgcctttcttcatggcgatt

SEQ ID NO: 83870 - DNA, 887 bp, Cannabis sativa
ttatggtcaaagagcagctcttaagtttgctcaatacactggtgctcataccattgctggaagacatatgactaaccaagtcatcattggtcatctatagtaaaagcgagatatcactgtccaaataagcatcaaccgccttgaagataagaatgataagtagttatgtggttatcaattattattcacacgtgtttaaataaaatatgatcaaatcccacgttttatgaaacggttatgtaattcaaatttaaatgtaaaaaactgccaacctatagtcctataaatatgggcagattctatagaaaaaaaaacgaaaaacttgaagagaaaaagattacaaattgtaatattgtatcaaatactcataaatatcttgaataagatacactcgtggagtatgcagatttaactacaaaaccacgtaaaatgcctaatgttattattataattattattattatacttttttaatcttcatattaacagtgtgaaatttattacgaaaaagactcattattggttaacgaaaatctgcgttaacacatattatttattaaattaaaatttatgaaacccgatattcaaatgaactaattacggtatgtcacttcttgttgtgtttgacaccacctttagtatttttcatattaatatatatacatatttttttattcacttaaattagaatttgcacttattatttaattatatataattttgtaagcttatttttttgttaaattgttttctattttggtctatgtatattaattattttattagtactttttttatataaatttatttagtttattttttttttatagtatacatgtataatatatcaataacattaataaaagaatgaatgttcactaaaaaaa

SEQ ID NO: 83871 - DNA, 732 bp, Cannabis sativa
acaatatcatcgacataaacaatcaatgctgtaaattttccaccaactgagtgttttataaacaaagtatgatctgattggcactgagtgtaaccatctcttttcaacactttcgtaaacctgtcaaaccaggctcgaggggattgcttgaggccgtagagagatttttttagtttgcacacttttccctttgagaatcgaccctcaaatcctggaggaatgtccatgtatacttcttctacatggtcgccgttaagaaaagcattctttacatcaagctggaataaaggccattcgttgttgactgcaatagataagagaactcggatggtgttcaacttagcagcaggagcagatgtcttttgataatcaatgccacatgattgggtaaattctttagccactaatcggactttgaatctttcaatgctcccatcagccttatacttgaccaagaagatccatttacaaccaactgtacgtttgccattaggcagatctgtgatgatctgcgatgacccctttcctgagagcaatgggaatgcttagatctttagacacatctccttccacaataggttcagcttgagcatcttcctgtgtttgttcaagaatgaatggaatcggattttattcttgactttgttgagtgtgagtggtaacttgttcaatgtttgctagattcttctttttccttgagtaaacctggatttctgtgtttgggatgtggac

SEQ ID NO: 83872 - DNA, 726 bp, Cannabis sativa
cttataagttgttgtatataattatgatgcatatgacgtataagattgatgagattatttaactttaaatcttatctagtcataccaaatactattttttaagagagagataacaccattaatacttagtcttaaagaaatatatatcttgcatattttttcttatgatgaagatgggcggaaatattggagccaaccttttctaatgaactctcgatccccttgatttgggtgagacttggccacttgggtgtggttgaatatatatgtattataaaagtattatacgtttaatttatgtagatagtatgacctaacaagaaatactaaggggtatatggtgccaagtactacataaatttcatgtatttttcctaacaattttaaagcgctataaaattaaatttaaaattggaatataagaaatatatatccccaatgctcagaaactttcaagtatacttgtggctgacagtttcaaaccatcgggtttatacccaacagtttctaattaccagggatttcatggcttttaataaacccccaattcagatataattagttcaaatcatttcgtctttctcaaaatttttcatattttagatctctctatctctcaaccgcaaaaatcctctttcggctctctcgttcgaacgacaagaaatacccacaaccacctccgccactgagcctcagtctctcgctccacctctctctctctctctc

SEQ ID NO: 83873 - DNA, 638 bp, Cannabis sativa
ctggggttgtcgtgttgaactcaaacttacatgctttgcaataccaataggtttaaattaagttttgagctatgccacatattgatctaatgctaagcaattatttatgtgtctcacatattgtataaaaagtgtcacgtggaatttgataaacaatttaatgatcccagttgagctagtcatgtataataattgattttttatgagattagctactctttatactgatgtaatctattaatctttttattacagttgattttttattgtgaaaacccacccaaactcttgtgttgaagttgaaattataattacgttaacatgcttagcatgtgatggtttcgtgataaaaatagactatacctctccactccagccagacgtacagctaaaccagctcattattatatagccacctcagcatttattgtgcggggcaaggagtaagtgtagactactctaaattttctttgatgatataatgatacatgtcatgtaataatgcaatgcaatattaaatatgcatccacatataacaacacttaataataagattattctgtttaacttgggttaacctcatcaattacaggaagcttactggggttgattaccaataatccaactatatgtaaact

SEQ ID NO: 83874 - DNA, 1052 bp, Cannabis sativa
gtctttagaaacatgacactatttgtggcccaaagaatttatgatgcacatagatcacgaatcccttaaacatttaaaggggaaacacaagctcaacaggagacatgcacgatgggttgaatacattgagacatttctttatgtcattcggtataaacaaggtaaggagaatgtggttgctgaggccctttctcgtaggtattccttaatctctactcttgatgctaagttactttgttttgagcacattaaggaactttatcctgttaaccatgatttttgggagatttatggtgcttgtgaaaaatatagtgagggtaagttttatagacataagggtttcttatttagcataggttgtgtgtgcctaattattctttacgagattttttagttcgaaaatcccatggaggagggttgatgggacattttagaattgctaagaccctcaatgtattaaaagaacacttcttttggccccacatgaaaagagatgttgagagaatttgtggtaggtgtatcacttgtaagcaagctaaatcgagggttcagccaaatggtctttacacacccctacctattcctagttcaccatgggttgatatttcgatggattttgtgttaggtttacctaggagtaaatgtgggagggattcaatctctgttgtggtagacagattttttaagatggctcattttattccttgtcataaaactgataatgcttttaatgttgcagatttatttttcagggatattgtgagattacatggtacacctagaaccattgtatcagatagggatgctaagttcttaagttacttttggaaaacattgtgagaaaaacttgggacaaaactatttttttctactacttgtcatcctcaaaccgattgtcaaacagaagtagttaatagagctttatccaatttatttagggctataataagtaacagtattaacacttgggaggattgtttcccacatgttgtgctgagtttgcttataatcgttccatgcattctgccactaaattttaaccatttgaaatt

SEQ ID NO: 83875 - DNA, 1581 bp, Cannabis sativa
aattgtttgaaaaattaaacaattaattcaaaaaataaatgagcttcttctttatcatagacgatccggacctagaccgtgatctggacacaaacacaaactctgactaggacttgaccccatcccgaacttgaacctcgacccgaactcgaacccaaactcaaactcggaatagcaacaagaacttaaaccgaactaggactagactcaaacccaaacccaaataaaaacccaaaccgagacccaaacttgaagctcgactaggacccagtttggttgcccaattcttgggtctgggtcccccatctatgtttgggtcctaggtcccaatctgggtccaagttcgtatttcagtttgggttcgggtctcaagtccaaatgtgggttctggtccgagttcgggtcccaatcctagtctgggtctgggtttcgggtccctagtctgagttttgttcttgggtcctggatctggccttgattcttaggtctgcgtctgggtccggctcccgatttgggtccaagtccctgtcttggtttaggtcccaggtcacaggtctcggtccgggtcgaagtcccgatatgggttttggtctaagtgtgggtttaggtttgagtcctgttacagtcccaagtctgggttctcatcccagtccatgtccgattctaattccgggtcctggtacggatctgggtccgagtcctggattcaaacactgactacgagttaggataaagccttaggtccagattcggatctcagtctagttccaattcaggcactgagtcccaggtcgagtcctaagttttggtttgggtttgggttcagagttgtgtcctggtattcagttcctgggtttcgggtccaaagtcgagtcttgtttctcgagtttgggtcaagttttgggtctcagtcctggtttcgggcctaggtttgggtcctagtcccccatctatgtccgaatccttggtccaggtctgggaccaggttcgggtttggggcccaggtcctccatgtaggtcacagttcggttctcaggtcccaagtccaagtctcaggtcccaggtcccaatcccaatataggttctagtcccagtccaggttcagggctcgatccttgtccgggtctgggtcctagtcctaaactcggtccaggttcaagtcccgggttcgagtttgagttctagtatgagtttgactctaggtctgggtctaggtctagatctgggtttttgtttgggtgtgggtttgggtctaggtctgggtctatgtttgggtcggggttcttatacgggtttgggttcttatccaggtcctaggtcacgggtgttgggttccatgttctaggttgcaggtcctggcacaagtctaggttcgggtattgatcccaatctaggtctgggtccgtgttcggttccgcgtctagatccagttctcggtccaagtccaaatcctgttccaaggtccgagtcttggtttgggtcctagtttggaaaaggttccaggtttgggtcttggtgcgattctaagattcagacaccgactacgggttgggtccaagcaccgggtcatgggtcaagatc

SEQ ID NO: 83876 - DNA, 1611 bp, Cannabis sativa
taatttataataaatattatttaatttaaattaaatatttatttgttttaaagctaaattaaatattatttaaattaattttatgattatccaatatacttaaattaatttcacagaagtaattaaaaaaattacaaatatattacaaaaatattttaaaataagtccgagtactaacaagttaataaatctaattacaagttaacctaaaaaaataaactagggaagaaaaattcttatacatttcagtatcaatcgcccaagccttcgtgaatcactgtcaataatcgttctatccactgtcgctgtaaatggtaacaatttaatttttgggtcatatatcttctttttcttaaactgtaaaaaagaagtaaatatttatattagtttatatatattattatttgttaatgtaataaatacgataattaataattaaaacttacagctttttgatcatgtatataacggttagggtttgcacgtgtaatgatgtcagtcatgtatatcaaaacataaaaactatattggtttttaggttgttttggatcccaagaaacgcatttgattctcctataatcttgtatgctctgttaaaattatattaacattttaattcattaacataaatatataacttaattaattaaaatatttattacataaagagtaattaaattattatcttttcaacatttgcattaatttgtcggaaaactttgtggccccgtataggaaatggataattttccttggcataacgatctctagcatccaatgcgcactaaaaaattatattgggatgtatgtatgatagagtaaaaataatttcaagttataatatagaaaacaattttaaattatctcttaagtagtgtttacccgatattttagggaataaagaacatttggtgttggttattcatcgaaaataaccaatgagccaatccttgtgatgcattctcaaaagactcttccgatccttctctaaatcgttgataccgttcactgtgagaagctctggattgtaaaacttgaacatttgtctcaaatcatttaaattctcttagatgtgcctgcattaaattgttaaatattagtgtattataataatttcagtagatctttgataaggttaattagattaaagaaatgtatacatcattccaaaaagtatttcctggttgccgatgaagtcacccaacgccacctgctacaaattttctccaaatatcgtgatctgggtacgaggtgctatgaatccacggactactcgaattgtgattatctcatgtttatcctagactcacaggaattcttcaaccatctatttaagtgacttggggattagtgtcatgatctctggtgtgaataatagatctgcttgatcaccactgccttttcaaaaaggcatgggccattttcccttcgacacatcacgtcttgatgatggttgagctagtggatcctatacaaaataccatataatatatcaaatttggtcctaattttaccaaattttcggcagcataatggctataactgaacgtccccaaaatttcaaacatgcctaataacaaataaaatagataaaataattgattatccatc

SEQ ID NO: 83877 - DNA, 593 bp, Cannabis sativa
taaatctgtttatggtaacaaatatcaagttcaaattttcggttttttttttcaaaagatttttgttttttcagttttctttggatgaaaaatgtatatgtatcattactagtcatcaagttttcatctatttatggtagatataagcagtgcagatttttattcccttgtttgagaaatgtatgatcagattagatttttatgcttataattaaacttttctatggctagacaccaatttatttgggagagttcattccacccttctaatagaaataaatgtatactgatttcagcctttaaaaataggatttggttctttgtagtctgaccaatattttctggccctgtaagctttaatttctttctcaattgatatgctttccattaaatattgtttgtgcagttataacttaaaacggatgcccggtttgttatgcattttggaggcatttttctttttagtctttttttttaggttcaacaatttgtttgaggatagtctttttgtgtgtttttatttgataaaatctaacttttagtagtttattctaatataaacaatagactgagcttcatttgcaaattttaga

SEQ ID NO: 83878 - DNA, 693 bp, Cannabis sativa
atcgctctctccctaaacctaaacctaaaaatggctctctccctctggttctcgctctgtccaatctctctttgttctgttcctagacgatatttgtatccttcttgacgaagattctcccactgctcggagacgttaacggaaaccacatcggagtcgatctggagagagcgatttggagagaaccaaagccactcatagctgcctccaaagccaccactgctgccttttctctgtttccaagtattgtttttttttatgaaatttgtttattctggtttattgagtccatctttgtgttgatttgttcattagtttgtgtatgtttgtgttgatttgttcattagtttgatttgatctttgtgttcatgaaaaatttctaggattccgatttaagttattcatttatttaatctctcttcttcttcttctttttgagaaaagcttaattaatttctaaaatccttatcgtgcacctatgtctctattatgccttagtaattttgtgtgtaatgtttctaaggtttagtgtgtatgtgtaatgttactaatgaaataggatagaaattttctcaaaccagtttggatgtacgactctttgaatcttctttgaaatccctaaccagtttaaacacctgaagaagagatttttttaattaacactcgaagcaatgcaagattataaactcatat

SEQ ID NO: 83879 - DNA, 657 bp, Cannabis sativa
tcacgggtgctttgtggtgcaggtaagaaagttaggagctgtgttcggccatgagttggaggtttctcagcaatgtacatatcaactgtgttgtcttggttttcgggtagtaggattaccccttttctatgattggatgtataacctattcttgtattaacggtttcgtaattagttgtaaaagaattttattatcaggggatccccatattacgacattatttaaaatgaaagtctttattttgaatttacttagaggttttaattaaccacacttttccaaaattaatatattagtaataataagtttataaaagcacacacgtggcgtccctgagagtcagggcgttacaataaacattccctatttgacttttgcaagaaatggtggaataagcaacgggtgaaaacattcggcaaaaaaatttctcgacggtttcaaatcgcggcgaaagtgctattgctgaagattttaaactgtcaaatacaccaaaaaaaaaattgaaaaaaaagtccaaatatgagataatctcagatcgacaaaacaaaaataatctccgaaataatctcagtaatctcaacctaaaaataaaatattactttaatgtaaattaagatccaataatcaaagccaataagaaaagataacattcatat

SEQ ID NO: 83880 - DNA, 3017 bp, Cannabis sativa
ataaataacatcagatattttacgtggttttgtagttaaaatctacatactccatgattccttattattaaggatattttttgggatacaaaatacaaatcttagtatttgaaaatataggatttctatctcttttttttttttttgtcccttttcctatggattctgcccctatttataagaatataggttggcagttattctttttgggactaattcatgtacaactgctaatgaaatatgaacattctccacgtttcatttattcagacatggaataatatctgataactacccaactgctccttacttttatccattagacggttatactgactaagaaggttgtatctcgttaaacctgagttctccttcttatccatcttaataggaaaaatcactaagtgttggaagcacttcatctcgttgtatctctctatttgtattagtgatacgagatggtcaccatgttgtgaataacgcaaggtggctgagtgtcataagtttcacttttctcatgagttaatgatttacaaggtccttgaatatctcgtcttgtacattttattattctatctatcttgaggcaaacatatgtctcgtcaattcttagtttaatagttattattcttgtctcgcataagactaaatagtcagcaagtttgaacatctctattaaatatatatttaatgaaaatgagttattttcgttgcatttaatgttacaatgtcattattatattcattgagttgattcacattccttttgtaggacatgtgtcagcttctagtacatgaccaaattttgagtataacaattgctctcgaaaaagtgttttttttttattaaaaagaactttttaaatgatcataagggtattatcatattaaactattttgaaaaattgcatgctttgagttctggcggttcagatcttcgaggtacatcattgagcatttaatgctctgattgttcccattttgtaatgttcccatccgttagatcagattactccggtgttcactagttgggtataaaattagaaataaaaactcatttcaccattttcgttcttcaaaccttcaagccttcctgcagattttttttttctattgccctttctcaatcattcatgccctcattgtcccctacatttttcttgcgtattacatctactcaactctctggtcctagaaatcatcgagatccagcttctcaatctttgagatttcactcgcaaagttctctattgcccagaaattctcaacaagacagtaagtgacacactctcttttcttaatgatcttttttttgttctatcttcataattaggttagtgttcccctgtctgcattgttttgttgtttaggtaattttgattttgtttgtctaaataattctagggctaggaatatttttaggttatttgattcgtagattttttgggttgagtttgtgttttgtacttttggagattgggatattatcatttataaatatgtcccagtttgttccaaaaatcacaatcccagaatctttaaaatcagattgtcctcaaaattctaccattagatgcatatccaaaacataaatacgcaaaaccattcttaaaataaacgatgctaaaattagggatcatctggttaaaaatagtcaagatgaaacctttggtcactatagacgattcttacaagaaataattgagggtaaatgctactttttgttggaagtcgtctggcttgaaccctagaatctaattgatattcctttagtgggacctctatttttacctccagtcactgttgctttttcactaggtgacttaggctttgagatcatgtccctaaaagcttgaaaatcaaagacccctcaagaccctacagttacctttaaggcgaaactgatcgagtctagagttagattcataggatcttacgttggagaagtgttaaagtcatgtggcattaagtatggagaaggatgttgagttagatctgttgcccatgagaattcagttgttttcctcctgaacacataagagctagggcagtactccctctcaaagactactacaaggaattctgcaattacctcggcattggccagcttgaaagttttgtaccatattttgaagtgggagtgtccaaccccactagaaattttgtatttctattctatgaaggcctgtcccgcaaggaagcgaggagcaagtatttctactattttcaggacccacactaatgataaaatgatcatttaaaggttgcccaataagaatgaattcaaggatgaattcttttggacatctggtctcgcccctatcaatacaattgtgtttcgcattatacataagtattattttatctcaaaacttgttttcgagttttacttgataaagaatatatttttttatacattaattgaatttatttttaaataaaatttaatttaaatatattttattttatgatattgtacctaaattatcttcatcaccacataattaaaatataatttcaaacataatagattgtgttctttagaaatagatgtgtagatttgaaaaaaagttgaaaaaaaaattaattagaaaaaaacaaaaattatcataaaataatagaaataaaattagtagaataattaataaaagaaataaacataaaaaattttaaaagaaaagataacaattaaagagatacataaagtaattttttcaatatttataatcatctacgtcttctcatcaatgtcatggccgaatttacatgaccccaagtaagtattatgctacaccatttaggtaggacccgtttggcacagcttttagaaaagctaaaagctgcttcttgaagaggctgtgataaaaatgtgtttggtaaacagtcaaaaaatagctttttaaagtatttttggagaagctacagctaaaagctgaaactgctctaacccaacttttagaaaaagttgttttgattaaaagactataataattatttttgtactaaaaccatattta

SEQ ID NO: 83881 - DNA, 951 bp, Cannabis sativa
taattaatagtacatatttttatatttaaagttaaaaaaaataaggtaaaaaaattgtgactaattataaattattatttttttgttgtgactaaaaaatacgagactaataaaagtatattagtcacaaattttacaacttattatgattaaatgtgtttttagtaataatacttgttgtgactaaaattaaattagtgacgacttgtatttaaataatgtgacgacttgtatctaaatactgtattttagtcacaagtaactttttgttgtaattaaaagtcacatttaatcaaaaaaattacgttgttactaaaaaattgtcactaaagatatctattttttgtaatgtaagaaataataaatatttctagtcatttgaactctatatttgtattatatgtgttatacaagtcattccgaaccattatgccaaagataacattatgttaataataattaaaataatttatgatataaatacttaagttcaatttttgattgtaaataaatacataattttaatttttaacagtaataatatttaaattataattctaaaatttctgtaggtactaagctcttaagtattaagtaaattgacatgtgacaatctctgattgattcaagtagttaaattcttatttttttatctaaaaataaatttaaatataccaataaaaaaatgatatgtggataacgaattgacacttaactaacagatatctacgaaagttctaaaaatataacttaagtattattaccgtcaaaaattaaacttaattatttatttacaatcaaaaattaaacttaaatatttacaccttaaattatttcaaaaaaaatatcacttttaataatatattatatctaattaatatataaattcttcattttgatgaggtggcagcctcttgtcccttggtaggtccggccatgagtgttatatat

SEQ ID NO: 83882 - DNA, 901 bp, Cannabis sativa
tgccaataaaatattaacaaaaactgaagtacccaaaagagttgtaccaactctgatcaactcatcttggtttttcctcctctcttctacataaggaatcccatctaaggtgatattgtctttacgaactttgataaacgccctcgagttaagattctcatcgaccttgccattcgagagagggagcctcttcttccaacatgttccgtctctaaagatagcaacagcacacaaacaatctttcaagcaagaatctttacaatcatccccattaaaaggcttcaattcgacataatctgataagggccaatctacattgtgcagctcctcaacatcatagagatcttctatgttgggagtaagctcgtcttcagcgcagccttgtataaaatcgggtttgcagcttccatatttgtcattgggatcaattaatgagtactttttcgggcattgacatgttggtcttgaatcttcattgagagtacaaatgctgttgtgtccacaaacaccaatacctgcctggacaacagagtcatggcatatgttttcgggtatggaccgaagaacaatccatttcccatctccattggatgtcttgggatgataatattgagtgaaaacaccatcaaagtcaagagtagctcttatatagttgtcccttgctgagactatgtcctcactagatagactgaatctttcattatttactctcaaaatatatagattgcctgatcatgaaacatgtttaaacaatatcagtatttgtaattttcagtgagtacttgctttaatcatttgatcatgttacaattcaaaactcaattttataattatacaacaaaaaaacttaacacactaaaaactcaagatcttctgttttaatgtcgtgagatatgagtat

SEQ ID NO: 83883 - DNA, 607 bp, Cannabis sativa
tgtgtcttgttattgctttattatatattcacattacgacatatcgtttatcgcttatcaaaaatactcattgtcgttggctaaagccgaagtcaacagttagttttgatgtatggtgttagaattgagcaaggttgagctttgaaactcaagtttaggtctttaatgacataatttaattcagtgttattttttgtgtttttttggttggaatatattgtgtatgcactgtttaggtactctgaaaagtttggtggcagttggttgagttttgagcaagtttgggattttttggggaaaactggtacaaaccggttaaccaatttgccagtacctgtaaaactggttaaccggtttcggtaggttccccgaatgtcccgttttcttatttcttgtccatttcagtgccttagttgggtgtttccttctttcctaagataatgtagtcctagagattataacaaaacctagagttataggttcgggtttcccgaattagggtttcagacatgtgatttacccagttttaatatgtgattgggcatccatcacaaacaatccaatataatttccaaggtttccaacaagctgatacagtgtcccgttt

SEQ ID NO: 83884 - DNA, 593 bp, Cannabis sativa
atatatatgctcaatcaaatcctatgtaaaccgtaacactaagctaacttaattggtaaggtttttttatcacatttttatttaaaatactaagtaaaaacacaatattaatatacttaacgtagattatggagtgaacaagccgacgcccattcatccttcatgcagctttttatgataattgataatagatgttgttatttatatacaggtcgtcacaaatattttggaggctccgttctaattttaaaaaataagcccctaacaataaaaaaatataaattgtaaataatatttttaaatattatcacattacgaaaatatattttacacaattaagcacccaaaaactcaaacaattttattaatattgctattaattctaatacaacttcaagccaatatcaacattctatttaaaaaaagggtcatccttcgaacgtttttttgaagcaaattcatcaaccaactcttcatattttatcgtctccaaaatctcattttcaattaatatcgatgctaatccattaagcgtttcttgtaacatggtagaccgcaagtaggacttcaacaactttaactttgaaaaactt

SEQ ID NO: 83885 - DNA, 677 bp, Cannabis sativa
aaatttggattagcagctagcataataaaaatggcactaaatactattaaaatttttacgattagtcacaacaaaatttgctactgaaagtaaaatatttgtgactaattataaattatcattctaatattgtgattaaaagatctgtggctaaaggtattagtcacaaaaattataatatgttgtgactaaatgtatttttagtcacaatacttgttgtgattaacactaaattagtaacaacttgtatctacatactatatcacaaataactttttattatgactaaaaatcacatttagttacaaaaatattatgttgtgaataaaaattatcactaaagatagttattttttgtagcgagactcaaccggatcaaataagctaagaaccagagtctcattccaacaaccatcacctgatctaagaactgaaaccttagcatcttcatcaagcatagggataaagcaaaaaatattttaattataaattttcattgaaaaattattcagaaaaaaaaaattgaaaaatatttactatttttatatgttataggataatgcctaagtagagtcagaaaaaatatttgtacatacacacatttttttttcattatatgtcaaactattattttatactaataattaattaatttcttttatattatttttattttt

SEQ ID NO: 83886 - DNA, 1089 bp, Cannabis sativa
gattaacttcaccccttggtactttaatatctcctttaaaaaaatttcttctggtactcaccattgttgggataatggtgtgagttaattgatttttcagagaaaaataacaaaatctttcactgtagcgcttttaatgaaagcaccaaactatttacgcaattttttatcaaataatctaataagattgtaaaaaattagaggactacgctaattagacttttgtaaaataaaaattatttggcaaaggttgattgtcacctctacttaaggaatcggtatttccatgaaccccatggagttagttttcttggtcgttggacaccttttggttatccaggctttcatgaccctttgagggggaaatacctcgctttcttctagggcgagacggctccattaatggaggagattggaccccatgcctttgagcttgctcttgaagctccttgttgttacataaactttcagccaattagtcacaaagggcctcattctcttggtacacctcatgcacgggcatggatctaattagtggacgcatccttgatggggatgagaaactttcacagtcttggatttttcccttatcatctgccataggtggcatgggacacttttcttggcatcgcgaggattcttctccacatggttgtgaaggaacaaattttctttcaccaaggggttgattaacttcaccccttggtacttcaatatctcctttaaaatttgttcttctggtactcaccattgttgggagaatggtgacttaattgatttttcatagaaaaataacaaaatctttcactatagcgcttttaatgaaagcaccaaactatttacgcaaatttttatcaaataatctaataagattgtaaaaaattagaggactacgccaattagacttttgcaaaataaaaattatttggcaaaggttgattgtgacctctacttacggaatcggtatttcaatgaactccatggagttagttttcttggtcgttggtcacctttaggttatccagggtttcatgaccctttgaggggcaactacctctctttcttctagggcgagatggctccattaat

SEQ ID NO: 83887 - DNA, 3833 bp, Cannabis sativa
tatccttgacaggccccctcaaactgagtgtagccttggaaactacacacagtttgtctctaacatcaatgaaacgagagctggaaatgggctttgtgaggcaatcagcgagctgagcagaggcaggaacatgtttaacatgaatttggtgttgcagcaccttgtcaagaacaaagtacaagtctattttgatatgctttgtgcgggcatgcacaatgggattggctgcaagaagcacactgctctggttatcacaccagatggaaggaataataggctgagagatgccaagttttgtaagcaaagattgtagccaggatattttagagacaacattagccagacttcgaaactctacctcagtagaacttctgctgattgtaacttgtttctgtgatttccaagcaaccagattccctccaaaaaagatatagtagcccgatgttgacctcctgtcatcaggatctgatgctcaatcagcatcacaaaaggcttcaagggagtaatctggtgcaggttgcaagtagagaccataatccaaggttccaccaatgtatctgaggattctcttaactgctgtccagtgagcctgcaatggagtttgtataaattggcaaacattattaactgaaaaagatagttctggccgtgtgatagttgcatattgaagggaacctacgatagacctgtatagagtagcatccttaaccggttcactgccatagtgagagagtttaaggccactattcataggtatgttctgagtattgacattgtgcatgtcagccttagttaatatatcttgtaaatactttttctgtgagagaagaatgccatttgagtgtcgagtgacatgtataccaagaaaataatcaactaagccaaggtctttaagagcaatggtgctgcttaattcttttatcaaatcatcaaccaaggtatcattgatgcccataataagaatgtcatctacataaactaaaatgtagatgcaactggttgatgaaatcttgataaacaaagactgatctgctttggagaaatgaaatcccttccaataaaacagatgaaagcttatcaaaccaagctctaggagcttattgagcccgtatatagttgtagtgagtttgcagacatggtggggatagtttggatcaataaaacctggaggttgatgcatgtgtatgtcctcttgaagctctccattaaggaaagcattgtttacatcaagctggcgaattttccaattctttgtgacagctatggtgagaccaactcttatagtgataggtttcaccacaggactaaaagtttctgaatagtcaaagccttcttgttgatggaaccctttttctactaacctggctttgtagcatttgtggctgccatcagcattaaatttctctctgaaaacccatttacatccgattcgtgttctatctggtggaggcttaactagaacccaggtgttatttctcttgagagttgtgacttcagtgtccatagcattaaaccaatgaggttcttgtagagcaatcttaacagttcttggaccacaagctgccagaaatagtttcggcttccttataccagctttcaaccttgtcaccataggatgtttagatgcattggagactgtggaaacatcattatctgcaggcaaactgttagtgacagcaatattatgagcagtaggaacattggtttcaggaggaggaatggcttgagaattgtcagattgagttggaacttctatgagagaagaagatggtacagcagtgggaatgggaggagagttgtcaacaggtgctgtatgatgtgttggtaatacagaaataggtgaagatgtagagagggctggtaaaatagtaggcatattcgaatgagtattgcacacaggaggaagtaagactggtatagatggaattgaagtgtttgagattgtagcagagtgtgaactagtggtctggtgtatagtagaggcagcatatggaaagtgtaattcatcaaaaataacatctcgttagatgtatagccttttatctttggaaagacacttgaaacctttgtgggacatgctatagcctagaaacacacaaggggtggatctatattgaagtttatgcctattgtatggtctcaaattaggatatcataaacatccaaaaacttttaactgactgtagtcaggttttgtgctgaaaagagtttccaagggagtagatccattaagtgttggggtgggcatcctgtttattagataagtggtagttctataggattcatcccaaaactttagaggcatagaagcatgagctaatagagtaagacctgtttcagcaatgtgcctatgttttctctctacagatctattttgttcgtgtgtatggggacaagccaatttgtgaacaataccacaattttctaacagagttgtaaaagatctgaattcacctccccaatcagattgtagggctttgattttgtgacctagttgcaactctatttgggttttgaactttgtgaaggttggtaaagcttcatccttggttctaagtagatacaaccaggtatacctagaataagcatcaacaaagcttatatagtacctgtaaccattggatgagttaacagggacagggccccataggtcagagtgtagaagttcaagtagtgtgtgatagattgtggctgagttagaaaatggcagcttatgagatttaccaagacaacatgcaacacaaacatcagagaaagttttattaggtaatgaaatattacaatgagagagagcctgttttacaactcttacagcagggtggcgaagcctgctgtgccacagagaaaaaataggattgacagacatctgatgtgtattacattgaggaacagaagcaatgttggaagactgagttgaagtgtggctgagatgaagagaatcaaacttgtacagtcctttctcaaaggtcccaaccaacaagatcttctgagaggctagatccttaacacaacaagaaaaaggatgaaattcaaaaaatacattattatcttgagcaaattgagagacactcagaagattctttgtaatagatgggacatgtaaaagattgtttatgcttagagattgagaggagaaaggagagagaagggaagatttaccaatatgctcgatgctcaatccagtgccattaccaacatctatctgctcattacctgtatatgaagtgcttgtgccaaggttggagtgatctggtgtgatatgatgagtggcaccagaatctggataccagccatcatcacagaaagattcagaggtggcatagagggcttgacactcaacaagattagcatttggggggaaattagcaaaacattcaggaccagtaatagatttatcaaaacgataaaaacattgctttacagagtgtccaagtttgtggcataattgacactgaattttttgacctgatgtgttgctgggccctcgattgtttccagggggaccacctcgacccacagaacctcctctgccatgtgggggaccatttcttaatgaggattgagatgggggaccaccatacatattgctagaaccatcaaaacgggagggaccacttctagtggaaataagggttctgggagccattgaaagtaggtctgaaattgttatatccaaatggtttcatgtgagagagattggcttctcctttacttatgtcaagattcttggcattcttgtcgattctcacagattgtgccattaaaagggcctcaatttcagctaccgagtaagtgtcttttcttgtagttacagatgtaacaaaaacgtcata

SEQ ID NO: 83888 - DNA, 954 bp, Cannabis sativa
aaaaaaatagactaaaaaattattctagataccgaaacaagttaagggtgcatcagtacatccattttaaggaggtgcattctagaatcagccaatattatattactatagaaaaaatatcacattcatgatgaaagaagttacattgaattaattcaaacctaaaatacaaatttaaaaagattaattaaattatattaattttgtgagttaccgtcccacaagtgttcaattaatacattttggagttcaatgtgagttttcttatctttaatttttctatgtttggcaaaagattcacacgtgcaatagacaatttgaaccttgtttctacagtgttaattcttttttgaatttctcaaaattttgcaagatgttttaagtaattataatgcatacgaccataaaaaaaattaaactaaaaaaatctctcgaataccaaaatagatagaaattaaccagtacacttaaaaaaaaatacattttagaaatttcttaaattaaatttataatttcataaataaaatattaattttataaatataaataattaaaaaaagagatcaatgtcgttcctacaatggcacggcatataagtcgtgtattgtaaagtatgaagtccaaaatgatatttaccttaaattatgtaagtcacaatttagtaacttttttattaataaatgtaaacaattacaatgatattcacgcatgcaatagacaatttgaaccttatttctagcgtgttaaatttttttgaatttctcaaaattttgcaagatgtcttaaataattataatgtacacgaccataaaaaaaaatattaaactaacaaaatttctccaataccaaaatagatagaaataaaccagtacacttaaaaaaaaatgtattgtagaaatttcttaaattaaatttataatttcataaatgaaatattaattttataaatataaa

SEQ ID NO: 83889 - DNA, 597 bp, Cannabis sativa
  modified_base (134)..(135): a, c, t, g, unknown or other
atcgcttatcatccctacatttcctagtaatgcaaaaacaattgtcaaaagcaaaaacccaagggttaaagaaattcaaagagccctagaagttcattccactcctgtcaggggatatggaaagataatatccnnagaatttggcttctacccagactacccatttgccaagctgttacacatgaaaaacaacatattcatgccaaaaaagatgacagatctctactggtctctgccaagttcatacactattgcggttgaaatcctcacaatagggctctggacatcagttcgtagctatatccaatgcctggacctcagacatgcctaccaacatccaatagctatgttgcaatagttcaaaccattgcccgaatgggacgcactccttacacaagagtgggaaaaggtccgcaacaagagacccgtggaactcaattgcctagccactgaaaacatggcaaacccattgtgctgctttacaattttgctactcaggctacatgttaatcatgatttgtcatttacagcaagtgtcaaaatacacaagtcaagcgaacacccacttgtcgtgataggtagctcagaagcaagaca

SEQ ID NO: 83890 - DNA, 983 bp, Cannabis sativa
tcacatctcttttatatttatgctatttatatattgtgtttatgtacgtagcttattgctttgagttgtaattcttctcttctctccatattctctattttatgtatatatattttgtttagtgttgtaacattatttaatacatgattttgtcctttgtattatttgtcatagagttgtaatcttgttgatttgatatttcttttagagcacaacaatttctaacatacttgacattctgtcatttacatgttcctttctatacaacatgcaatcatttttacatgcatcattttttcataattaagtccaagtgtgttgattaacttttttgtctcataaaaaaaattgggtaaggtttcaccttttggtagtgctcttttaaataattcaagtatcttgccaaatgaattatcattccatccacacatacacttaatataaaatacttcaatgacgaatgagagctttgtagaacttgtacaccttggttaaagttctgtctctacatcttttatcaaatcataaaattattttgccttcttatttggttcatcttcctccccttgaagattatcatcattttcaatttcacattcatcatctctaatattttgtccaaaaacataatgtataactccttgcatatcaataataagagtatcactaacagtactctcaatgttttgtgcagcatgtgaagaagttttgccgtgtaattttcatttagtgtacccctccataaatccattgcatatcagatgttgaaatgcaattgatcgagtgacggtgctaataaggcaacacttaacacaagaatatacaatttttcttttatgcttccatttttaaatgcgaaatcaaaaaaaaaaaaaaaaaattaactccttgttgatataaatcactcaatctagattgcttcatccaattcttatccataactttagcttttgaaattttttatcaatacctatttaaaatcc

SEQ ID NO: 83891 - DNA, 1814 bp, Cannabis sativa
  modified_base (1665)..(1669): a, c, t, g, unknown or other
aattgatttaataaggaatgtgtgtgaagtgatataacggaagaagcttaattttttattatttttggatatttgtaaaaatatctctttaaattaaatatgttagagaagccccatatttagttttgttgagtgtcccaattcgttaggaacatccttgtacatgttaattcactttgataaatcatattagttttacactaaactctattgccatgactgattttattttataaattatttcataaaacatttactacaattacaatatacctgaggtagttggaaagccattatgcctgagtagccgaaaacgaagccccgtgttaaagaggtcatcttggccggaattgaaatctgacaacatttgaaggattactttgatttcttcttcgaaataatggccaactcccaaccgttggatgctatctatgagcctcattttgtaactttgatcatcagtaggttttcgtaatgccatttcaacctttttgatcaacagctcttctgaggtagtactcttgtaattgtcataataatcagcgaccatctaattattcatacaataaaatccattctatgtcataaattagaaaaataatgaaactaaatatttcttacatatattagtatatatttatatagttacgtacccctggatcatgatctattgacaataatggtgatggtggtgatgatgatgatatactctggcattttgttgacatgaataatggattaccaaaacgaggaagcttataattcttcttcttcttcagtgaataaacttctctaataaccgatggcctctttgagaaagtagccgagtataaagatgagtagctaatgaacttcactcctgccatttgcattatttctatattcttcttctgagttttaattactacaagctccataaatttatatatagatgcaattatgcatgcattatgacagcatacattttaatagtggtcaaaaaccaaccaataaactgtacaagttaatatttttatattattcaacttgcaaatgcattatggacaagagaataacgtaaaataagaaatctatattataatataaaattaagaaagcatatatctgactcgttttgtgttatataataatagattgagttatatattatatttctatataatatattttgataaattttaatttgtattaaattattatatattagactaatcaagatttttattcattgaactttgacatgttttaaattatattctctgaacttttttgctaattaaaaattctccttgaactattgaaattgttgaatttaagcaattttgtccaaattcatttaattttactaattcggtgattgttcatgtactaaattatgctttttagactttaagatatgccaaatcatgtccctcaaactttgaaacgtaccaaatcatgtcccgcgaactttaattcatgttagattttatttactatataattggacaaaaagttcttacatctaacaatttcaataattcatgagaaatttttaacggtcttatatgttcaaaaaatataatttggtacataaatatattaaaatttgagggacaaaaatcttaattaatctatatattattatatacatataaaaattaggaaaattaccccatatactannnnnttttaactttttttttttcaaatttacggcttgggtttctaaagtggttgcagggcaagttgcaatatgggtttttgtacgattttttgttacaatttaagttgcagcgctagttgcaataggagtttctatgtaaaattccgta

SEQ ID NO: 83892 - DNA, 1059 bp, Cannabis sativa
ccaaaacatacttccagcctagattcaggatcaaactgaggaaccagtctagaagtagtcttttcctgtaatttttccctttattactttaaaccagttttttgtagaaacaatttatattatgccttaaccgcgaggcttcatgtaatagggtagaagactgctacttttgatttatgtatgtttactttatctgccatatgctttcttttgctatcctcatctactattatttgctaacttaggccactcgatagcttgtcttaggattttttgaagtttttggttccaacagccaaaacttaatacccttaaactttcaaactttagaataattagttgaatctttgaagtatgcaaactgcaaattctttagatgttaatttttgtcaaagtccttgttgatggcacttcgtaaactttggctagttaatcgtgtatagaggggttataagcttgttcccgaatcgctataggagttctgtttccattgaagaagacgaagagtaaaattagcagagttttagctatctaaagttctgatccccctttgtatggaaatagaagggtatttatagattaagtggtgggtatggacatgcccatgacctgcctagggatcatgctcaaagtccactaatgagataaattacatacaaaggagagttgactattaggtcccttggaaactattgtgctcgtgcatgctgcagctggacaattggggaccatttgtacgaagtggacacgtggcgcttaaaggtttagcctttaaaagtagaagccacgtgtcaccaaaatctttcacctttattgtattcgtctggcagaaaagtgatggagttgtgcacactaccatgcttggacacaggggacaagatcaaatcatgtgtcagaaaaagcataactgtcacttggtgacctggcttgtgtcaaaggtagacatccacaatactcttaggcagtcgacatctacattaggcccttcgaatacccgcccgggtactagctacgcatgcttccatctttgggcctctctacgtccgggagagacaacat

SEQ ID NO: 83893 - DNA, 679 bp, Cannabis sativa
taccttcattctctgcacaacttggtccttgtgatgttgaggtacatcacagaagtccaagtagttccccggcaataatgtgctaacttcaaaacccacttgccggatgaaagcttggttctccccgccaactacttttcctgttgcaggatcaagtataagcggcaatggcccctcattcgcacgtctgcgagcctctagtggtatattagtagcacgaccacgaccttttcttttgggcggtggtgctgcctcgcaggctgagggtactctactaggatcaggtggatctaaacctccaccgtctcccccgtgagaagaagctacatcggctgacattatgactcttcaatagcaaagttgtatgactaaattagtataaatatagattaccaaaaatagttatagtttgaaatacaattaacatcatcaaattcatcacttataatattattacaaacaaattaataacatatgtaaactaatagtcactatcacactcatcattttcagaaacaatatcgtcttcacatcgatcaattagcaactcgtcaccttcgtcatctattacgttatcagcgtcaccatccacatcattttcatcagcctgatttagattcaaattttgtgcagtatcaattattgtcgccacttcagaaggttgcaaaattaactctcc

SEQ ID NO: 83894 - DNA, 542 bp, Cannabis sativa
tcatacatgttttaattgcactattttaagaaaaatgaagcaagaagagtgttgaagtggtctattgttaatctttcattattggtgcccaaatcaaaatgaaaaactatgataatatactatgggtgcgtttggttggaaggaatacaaatagaaaggtataaaatttaaaatgtatataaaaaaaaaaagtaaaaatattattaaattttttctatcttctattggaatagtcttttcttctatttaaaaatgaaatagttattctttcaaattagtgaaaaaatcatttaaatactttaaaatgcaacaaaacgaaggaattgaatgaaaattaattcttttacattctattctattttattatctccaactccaatcaaacgcaaccatgaagaataggagaaaagtagagatgaatggaatgcaaggttttgcacagtgaagcccaaccctagtaacatagacacctgtagagcctaactcgatactagaaccactcaatactcgatagattatcgatgtcagaacctccaatagca

SEQ ID NO: 83895 - DNA, 574 bp, Cannabis sativa
agtgtgaggaggcattcaaaaaactgaaagaacacatggccaagcctccaatcatgtacaaacacgttcttggagaggacttgtttctatacttggccgtctccgagcacgtggtcagcgcggccttagtcagggaagaagagaaaactcagcatcccgtgtactacgtcagtaagcgcataataggggtggagacgcgataccctgtcattgaaaaactggttttttgcctcctaatggcctcaagaaagttgaggcctgatttctaagctcacccaatcaaggtgttgaccaatcacccactcgggaaagtcctgcaaaagccagaggcgtccggaatgctcctcaaatggcaaatggatttaagtcaattcaacttacactacgtaccccgtatttccataaaggggcaagcactagcagacttcatcaacgaatgtaatgaagccgaggcaaccacgaacataccggcaccctcggtcccagcatggaaagtatttgtggacggagcctccaacgaaaatggatccggagcgggggttgcaatgatatccccgagtggacttcgactcca

SEQ ID NO: 83896 - DNA, 571 bp, Cannabis sativa
gctagtcctcctccgaaaaggagctccggatggctaactgttcctcctagaaggtagtcctgaatagtcgactccaactagttctttcctatccgggaaggtcctttagcggtgccttggaccgtaattccgggagccctcatactcactcccggatacacacttccttaggctgatgtggagacctcgaaggagagttggttaagtcagttattgtctaactagcttaaccgcttatcttcttgcagccatcgactttaggatcttgatcctaaccctatacatataactccaacacgtagcattttaaggtttggtaaaaatacagagacgaccaatttgggttgagagagaaagagagaaaagattgagaggtagagagagagagaggggtacagagaaaagagattttgtaagaaaaaatttttgtagatgaagaagattcttgggtatgagtgtgagagttgaaacacttttgagggaaacccatcagagaatcgatcttgattgtatttgtaaagtcctttttttggcaagttaggtgacaaaataatttttcctttttatggta

SEQ ID NO: 83897 - DNA, 1350 bp, Cannabis sativa
tatcaaaatatgtaataactcactcgaccgactgaatgaattaattgatcaatgttcgctcactcaaactagtttcttcatcaagaaactgatttcttcattaagaaaccagtttcttgttactttttctggttgactatgccaattttaatgattttttcaaagtttgctgtcggtgctggaaaaagtcgtcgaagtagctgccagtgtcagaaaaatcgtcagaattggcattgtcaccggaaaaatctcaaagaaagtggtttcttcatcaagaaactggtttcttctttaagaaaccagtttcttggtgatgttttcaatgatttttctggcgacaatggcaatttcaatgaattttttcgatgtcggtggcaactccgacaactttttcggcaccgaccgctactccgatgatttttccggcactggcagcaaaccctgacgatttttccagcatcagtgacaaataaaactacctaaataaataaaaacattaaatatgaaatttgaaaacctaatttacatatatatgacatatcaaataccataaaaagaactgaaaacaaaaaaatattatataaattggtcaaacttaaatgtaccatatttatcataagaacttttaaaatcccatagtaaatgtaattttctctataattatataagtcataggttaatactttaaatatctttattacaataccaaccattattaattgataaaattataaaaataacattacaacttatttatattaattatggatagaactcaaagtgtcaaactcaaagagaaatcttcaaccgaaaatatttgttcccccatttgagttattacatataattataactcatagattaataatttatatatctttgttacgttgccaaccattaattatggatcgacctcaatgagagaacattataacttatttatattaattatggataaatctcaatgagagatcttagacccaaaataggagtaatcttataatgagagaacccagcatctttaaagagcttagacaattctttctcatttctctctcgtccactaaccaaaatcattctcatattcatgaagagttgagtttcatatgactcatcatcgatttcacctttctcattttcaataatcatgtcgatgacaaccacttttccaattttcttcccgcttttggttatggcctctttgcatttttttagtattttcacgctattttcgtcgctccaatcatgtaatatccactaattatcaaacgtaacatttaatcattattcagtgaaaataatatcacacaaatatttataattaatattaatttatacaaatttgatctt

SEQ ID NO: 83898 - DNA, 637 bp, Cannabis sativa
gtagtgacaaacagccgcggtgtgaccaatgcgaagacacacttgacacaacagttttgagccatttcctcgaccaaagaagcgcccttgttgattgttgtgaggacgaaaagatgaagcaccaggaccgtgattcccaccatttcttgactggtttacactgaggtttgcttgcattttgagggacatatcagtgatggtgctatgttgttctaatcttgtttcatgagagagtaacaaggcttgaacttcctcaaatgacagattgtcacttcgagaagtgatacccgagaccactggatcaaaatctggtccaagaccattcaagagttgtagaaccaaatcttgagtagaaactggggagccagcaatggcgagagcatcggcagtggcttgggccttctcaacatattcaacaataggtaaatttcccttttgaagtctggaaaaattacctttgagttgcagaaggcgagctttggtttggcttgagaatcttggttcaagggccctccaaaccgcggatgatgttgtgaatgtggccacagacgcgagtatcggttcagacatagaggatcgaatccaagaaagaaggagctggtccttctttttccattgtagatactcgggattggga

SEQ ID NO: 83899 - DNA, 691 bp, Cannabis sativa
ttttaagtaaatattaaatgaaatattaaattttgtattaagatttataattatatattagagcacaaaaattgatgtaaaaatatcacaaaattgctttttgtactaaatatagctaaacttttacattttcaattagaaagggtcttacaaatgaaatatttttctcataaagaaagatatggaaatataagactaaaagagataaatcgtttggttgctatctaggtcctatttttagaacatagcaatcttagacacaactacaaaatgattttctagttgtagaaaacttattaaaaaaaattcttgatttacagcatcagactctagctctacagcagcaggtcaggaccagcaaggaaattttttaaattgaaccaagatcacaaatttagacttcaaatctgccaaataaaatttatttgatttgttataataaaagcaaaatcgaaatcatcaattagaaaaaagaaaaatcaagtttcccaaagttgacaatttttcataagagaagtttttctcttacaagaaatttcctttaaaaaaaaaaccagctgagaatgaatcttttcttagaagaaaagagaagttagaggcacaaaatcaatataataaaaataatttaaatgctcaataaaaatatatatattaattaaaaaaatattttgacaactaaattgctaaaaaa

SEQ ID NO: 83900 - DNA, 804 bp, Cannabis sativa
aaacattgttatggctgaggccttatttaatgcataactttcctttgttcaaaaaataaaaaaaaatatatatatataccacaaaaaaattacaaaaatacagttatacaaaattataaatatttttacaatttttttttttacaaaaaatacagtattttaagctcgttccccgccataggcatgttagtcatgtgcttagggcctacatagtcccgggacaaaaaaatttccttttaaaattagatatctttttttactaattttaaaaaatattacttttttttttctatgacttactatatttcaggctattttgatgtgtttttttattatactcttgttaatttattgtttatttttttattatttgtatgtcaatttttattgttgttttgatattatttttcgattacttttattgtttttaaagaaaattgtaaaaatatatatgtaaaaattaaacttaaaaatataattttttttttgaaaaaattactttttctaagggaaatttgaatttctatacttacaataccttaaaattttatccctaaatgtatagttattaaaattggtcatatatgaccacattaataatttctcaaaaatacccctcacatttgaaattcctaagctcatcagcctatctcttcctctctctcaactcactctcgctcaacccacccgatcccaaccccaaccccacagctgacggtgacggcagacccaattgacccacggtgacagacccagtcgacccacggtgaccgacccaatcgacggcgcagagcttttcgaccc

SEQ ID NO: 83901 - DNA, 705 bp, Cannabis sativa
tatatatatataaatttaaataatgcaggattatataaactttatggcttacatttgcaaggcttataaagagtcttctaaaccagaggcttgcaattcagtttcatatgagagtaatattaatgaactaaatgatcagaaagtagactcaattcctcaagtttgctatgaaggtgaatcaagaagttttacatcattagggctagctcacaaaatccctaaatgatataatataatgtagtgtaatgttattttatatagtatatagtaatattattggtataaaaatcttatcccaaacaaagtgttgggtataataatattattggcaatgatttggatcaaaatttaagatttgggttttgtttataagttataaacatatattagtcatattttgttatattttatcagtagttctatctttttactcctcagatgaatatgaaaaaagttgttaattagatgggtatgcgggattagtcaacagacctgtgaaaacaatattgtaggtttaccgaccaatcccaattccatataacttgagaggctgctcgtggttaggatgaatagcaaaattctattttgaaggagtcattatatatatatatatatatataaaggaatgcacaaaagtgatgacatggcggtttctatgaaatttctttccctttctttattttctctaattttcacttttttttt

SEQ ID NO: 83902 - DNA, 1584 bp, Cannabis sativa
agctctaggctctaaattaccaataatttgttatgcagatgttgcacattcaaaaaattcaaatgagacaagtctggtggtttatcagaccacctttttttggtgctttgaattcaaaaacacttgatggacatctgttgatcaagtatgctactgtaagcagtgcttctccctagaaatcattaactaagctagcttgaaatagcatgcaccttgctttgtaatcctttctgacacaccattctattgtggagttagcctaacaattctgtgtctttgaatatatgctcttttgcaatacgtgtcaaacatatcatttcaaaactctagtgtcttgacctttttgttagtaagatttccattaaaattttccattcctggaacttagcgaatgcatcatttttatattttaacaaaaaaaccaaaaatttcctagagtagtcatcaactatagatagaaaatagctacaactcccatgagtaggtactttttctggacctcataaattagaatgaacatattcaagtatatcgttagatctttgtgtcataaccttaaacttaagcctatgatgcttacccaaaataaaatactcacaaaaattaactttacttaactttatatctgcataaaatatttttctcactcattagttacaaacctcattcactgatgtgccctagtcttctgtgttatagagttgttttatagtcttcaggtgagtttgctactatgttgtggaaattagaaacgggttcccctctgaggaagtacaggcccccttctttgtagccttttattatagtcatggaatccttgcttagtttcattgtacatatttcaaatttattcataacaccaaggtcatctagaacacttatagaaattaagtttctagctagattaggtacaagtcttacccttgttaaagactttatgacatgtttgattgttgcctaggatgaccttccatcctttagattccctgaaatcattaagtaaacatgtatcattttgtcatataaaaagtacaacctgaatcaagaatccattcattcttaaatttcgagctagcaatataagcttctccactttcatagccatcactcagattggcttctgtttgttttttgctctgttttgagaagtaattatctccttggtttgcatcttgtcttgatcatcacgtttgttcttcttatttcttttccagttataacagtccctcctaaagtgccctagctttctacagtgaaagcaaccatttggatatttgtgtcccctggattaagacctacatgtaccttattttccacctctgttgagacccctactatgacttctccctctattttccacagcttcttctaatgaggccatcctcagcttaggttaagttcaccattagaactgccaaacttatcattctttagttccaaatctataaactttaaggtagaaataatttcatccaaagttatggaagtctttccatacatgatggttattttgacttttctataagattctggtagagaattcaagatgatcattgcctagttttcatcacttaaagattcatt

SEQ ID NO: 83903 - DNA, 691 bp, Cannabis sativa
accttctttttgactaaatccctttgctacaagtcttgccttgtatctgaccttgccagttccattgtcactttctttttccctgaaaatccacttgcagcctatgattctctgtcctttaggtcttttcaccactatccatgtcttgttcttgatcaaagagttcatctcttcatttacagccattaaccatttttctctagccttaccctgaattgcttcagtgtaactgagaggttcagagttttcaatctcttctgcagcagcaaaggcaaaagcagtacattctgaagcagagtaatctgcataaccaaatctatctggggcttttgcttcccttctttctctgtcccttgcaagttggtaatcacttagattttcttgatttacattgtcatcctcagattcaactcgagcttccccagtttctgtcagtggtgcttctggtgtatcacagttttgacttggttcatcttgatccacctgaacttgtacccttctattcaaaattgaattctgtccaggtctcatagccatttcattctccttgaacactacatctctactgataatgcacttcttataaccatcttccaaacaccagagcttgtatcctttcacaccatctggatagcctaggaataagcatttcaaggccctaggttcaagtttgtcttgtctaacatgagca

SEQ ID NO: 83904 - DNA, 668 bp, Cannabis sativa
tttgactaatcttgtttccatcaagaatagaacatttggcttgaactctcgaagaagtagcttaacatgtcgtattgcatccttaccattcaaacctttaacattccaactaatgatagtcattcctcgtataaacttactagcactcgcaataaactatatagcttttatgatatcttgatgattatactcactcttatatccctaatattttatatttctctcgtccaccaatcttcttgagatacttcaaatatcctataaaatataatattatatagaataaagtcttttcatattggactttccttctaaatccatcaaacttaattatcttgttatgatactcctttatcttccttaattactaaatatattatgattatctttataatagtaactttccataacttaattaccaatctatatatatgtataactaaattccaaaatagcatacctatcctacaataaaagatcaaattaccattatcctttcatacttgcatcattcctttcaatttaaacttaatatttacattaaatcaataattttataatatcaaatttcttgaattttcataacataaattatttgtattcagcttcacacttgacaaccaaacttttcaactcaaaagaagtcttttgaatattaagaacattaa

SEQ ID NO: 83905 - DNA, 1258 bp, Cannabis sativa
acaatattcataatagtggaccccatagagaatatttttgtaacaatataatcttccagtatcttctttccatgtatataaatatagcctttatggcagtgtaaatattgagctgtgaaaatcaatatagtaatatacagaaaagtttcctttactctgttttccacctttcaagcttggtatcagagccaaccttcgagtgtgacctaaatctatggattcgcccacatcaatcgacagatcctctgccatgaatccttcagataataccacacctcctacagtcgaacccacaccagctccagtcattaacccatctccctttcagagtctatctcctcttacaatcaaactagacagaaccaactatcctttttggaaatctcaagcacttccagccctgcgagcctatgatttagaaggctatatactcggcaccaaagtctgtccgcctcagtatgtcgacaacactatcggaggacccactcctggcgaaccacgtcaactgaatctgggctatgcgatatggagacgcacagatcagtcaatcctgagttggcttctcaactcaatctccgaaaccatgtttggccatgttataaattgcctcacctctttcgatctctggactacccttgaacgcttgtataccacaagttcaaaggccagaattcttcaactcagatttcagttacaatctctcaaaaagggaaatctctcaatccatgactacattttaaagatgaaaaatgttgctgatagtttatctgctgcaggacaactcttatcagatgatgacttgattctctacattctaggaggtcttggccatgagtatgaagctgttgtagtcaacttaacctcaagacatgaccaggtcactctccaggaagttcaatatatgttacaaagtcaggaaattcgccttgaacaattgaactcaacaactggagacccatctatcgctgctgccaacttagccactcaaatgcgaagaaaccttactctcggaggtacaccaaatgcacagaatcaacaatccaatcgattcaacacctcccgtggccgaggacgtggcaggggcagaaccaacaacaatagacccgtatgccaactttgcaacagacctggacatgtagcctccaaatgttaccaccgatttgatttatccttccaagtccctagaccaaatcaatcccaccacactcccaacaacatcaccagccactctcaaaatgaccaacaagcctacttttcc

SEQ ID NO: 83906 - DNA, 548 bp, Cannabis sativa
cccccttacaggtgcatcaaggtagtcttcacccgtgcgcatagagcgtactcagctcactgtacttgctcccaatgtttttcattgattgatttttgttttgatattttgtcatttttttctttctgaaattttaccctgttgaatgtgtgatcaatgaaaaagttacatacagaaatattgtttttgaatcatgagtgcaagtgttctctgcaatgaaattcatctccgagagattatgtttatacgtctctaacaaattacatgacatggcaagaagtattttatgcaatgtagaactttgtgcaaattctttggataaaatgagctcataccttatcaataaacataaagcgaacctttttatgcaatgtatttacattctttttctcatattttctgtttttcttttcttaggtaaaaagtaaaacttgtatgtctctaatgataatattctcttatactgttttgcttctgaagtagtctcattactttaatattcaactgtagctgctgctactcatgttgcgccgagtactaataccaat

SEQ ID NO: 83907 - DNA, 787 bp, Cannabis sativa
cagctctaatctcaagcaaggaaagaggaggcttcgacgtgcgaatatccgacagtccatcacggtctgcgttcacgcgagggaggactatggaagatcgacggggctgggtgtgaaagagagggaaaggtcacaaaggatcgcaagatttgaccgtattaggatttgagtgtgcgagtcggtggggtggtggttcaacaataatagaagcatgaggattaaagagagaggggatttgaaaattaaaataattggtaagaatagcaaaactttgggctgtaatttgaagcatagtaacttaaatctttcaatggaaaacccaccattacaggcttctactgtatatcaatgcaatggctgaataaacattaattttcttcaatatttttatatttaaagttttcagctttttgtgttttgagtgtcagaaatttaaatattaattttataaataattaatttgatacacactagaacatacttgatagtgtgcacactcaaaagtcatttatatcaagagttaaaaaaaatgtcactatactatacaaacaaaactaatgtctctactatagaattattctatatctattctatataaagtgtgtctatatatctattctatataaagtgtgcctatataactgaaattcttggtttatgagaattttatgggtaattttttttatctttatttaataaaataataaaatattatttatatataataaaataacaataaaataaatgccattaatatttgaatatttgaattgatatttcatattat

SEQ ID NO: 83908 - DNA, 961 bp, Cannabis sativa
aaaggttaccacatacattttctcggacgaaatcatcttaaccgagtagttagcaattcgtgcaacacaccaacacttagcaaattcacctttcgcatcatgagtcataaaaggaattgctataaatttgagatcagattacaaagatatggcaagctatccaaatcccacgattagtgcattctgtatatattatgtaatctttctacttatatcaattgtaaccagaagggaaatacttccctccaaagcttatacccctatcaatagtgattcatactcgctgggcaaagggtcaaaaatttttgtctaagaattcatattcagagatataattgtaagagctctaggaaaacgaaccattctccttgttcttaagtcaatacaaataacgaggattaggctattacccaactgctcggggctgaacatctaagaaattcttgtgtctttatttgctttaattacactatactttcattaaactacttgtcgcttacaaaccagactcattgtcgttggctaaaagcgaggtcaacacctaggatctcccgggtagttcgtctccttcatcaaagcacagggtatttgagggtctctaatgcagaaactcagacttctaatggcacaagcatgtcgcaagggttccctaattggtttataatgtctcgagttgcttccctctgatgtaactctagggtttcagctacactaggcgacaaggacaacctagagtgaacttttccaaaagtcacctacttctaccaacagaccataactgagcctcactggtaacccagcagcgaccgatggtaccgatggtctcctctcaccagctgccatcataggatctatttttgggaaacttcacacacccagaaaaggcaggggaagtagtcgtcatgagacagatctagccctctcgcccgtgctgatgctggagtttctagctggatagagt

SEQ ID NO: 83909 - DNA, 780 bp, Cannabis sativa
cttcagcttctcctaccagtcagtctcttcctggtatggttctccctactgctgacagcaattttggttcccctgctgttcccacacacacagatgcccctcagccaagcacttcaggttctcatccacacaatgctcaccctatgaaaaccagatctaagtctggtattcacaagccaaaggccttcctagtcaccagggaaccgtgctctcttcaagaagctcttagccaacttgtttggaataaagccatgagtgatgaagttttggctttagtgagaaacaaaacctacacccttgtgagattaccaccagggagaaaggccattggttgtaagtgggtgtacaaaaagaaagaaaatcctgatggttctgttctcaaacataaggctcggcttgttgctaaggggtttcatcaagagtatgggtttgattttactgagacttttagtccagttgtcaaaccagttactataagggttgtcttaaccttggcattgtccaaaggttggcttattcgacaattggatgtcaataatgccttcctaaatggagatttacaagaagaagtgtatatggtgcaacccccaggttttgaagttcctggccagccagatttggtttgcaagctacacaaggctatctatggtcttaaacaagctccaagagcttggtttgagaaacttcaaaactgcctgtattctcttgggttcatctcttccaaatctgatcactctttgtttatacaacatactgatgcatctgtgacacttatcttgg

SEQ ID NO: 83910 - DNA, 1274 bp, Cannabis sativa
ctctctctctcacacactctctctctctctctctctatgctcacttgtcacaaacattaactttcctatttctcgatctctctctctttgtggtggaaaattagaccacacctcaatccctcaagaatcattcactattataataggtaagtagtgtcttaaccatcttttagacattaggaatagtatatagtttgttttcattatatgtgtacgatgtttgtttaaactgatgttattttgcttctttttttggtctgaaacgctagatctaatgttttcttggagtttaggttttttgcagtttattgagtgtttatcaataagatcagggccgaccctgagcataggcaggctagaccagtacctagtgcccacccactcctatttcaaaagcccaaaaaaatttgtcccccttttaaaattatacatttttttactgattttgaaaaatactatatttttttctaaataagggccaaaaaatatttttttcctatggccaactaaatttcagggccagccttagataggatatcgatataatatcgatgatacccaagaaaaggtcagggatgaccattatcgacaggatgtcaattacttgttgacagtatatcgacattatgtcgataatatttgaaaatatttctgcgaacaaattgacaattatttgtcgatgttttgtcgataatttgatgatatatcgatatacttttagtttctaatcatatttgttgttcgtcgacatattgtcaataggatgtcaaaagaatatcgacaagaatattaaaaatggttgaaacaagtgaaaacttttaaacataagtaaagacgaaacaataagcataacaatcatgaactttaaaactaaccctaaacgttatgcacaaccacctaggagtgatcggttcgcctttaattacatatattttgcaatgatggcgcccttcaaggaatcctggtggataaaagagaacaccatccctttaaatgcgttcaaacctcctctcatttgctttcacgttcagaccgttccatacattctctttgctctctttgctgaaagagacgatattcttgactacgttttgctctcaattggattacttgacattcaacatcaacaagaacacgaaggggaatgttttgtccttcgttagcatataagttgtgcagtcagtcttcgtcgaatagcgtatcgttcctaggcctagccagataacgatccactaatttatgaacctgctcatcatggctttgagaactagaat

SEQ ID NO: 83911 - DNA, 1059 bp, Cannabis sativa
ttcgaaaatgcttgggctagggaaccgatgtgtcatcaaattgtcaaggatcattgggcaaatttcgatggtaattcctttcagcagaaaattcagtgttgcagtacagctctggccgaatgggggaaaacaataacaggaaatttcaaagaaagattgaagaagtgcaacaacgtcttaaagtgtctgaagaatagaagagatgaggagtctgtaaagaagtaccaggaaacacaaactcagctgtatgagattctcactcaaaaagaagtgttttggcgtcaacgttcaaagcaattatggctccaagcgggggatcaaaacacgaagtatttccatgcatgtgctactacccgaaaaaggaataacaatattgtgtgcttgaagaatagtgcaggagtttgggttgggtgggaaaatggtttaaaggaggtcatggctgattactaccgtgatctgttcactgcttctttttcggattgggcaagggttattgcgtgtgttgacactactgtttctgaggatcaaaatgtgggattgacggctcctgtggatgcggctgaagtgaggaaagcagtgttccaaatgcatcctgacaagtcgccaggtccggatggctttaatccggggttctatcaaaaattctgggaggtagtgggggcggatgtggtacggttagttcaacatttctttatgtttggtgagtttcctgatttcctcaaagatacaaacatagttttgattcctaagaagtcttcccctgaaactatgagtgacttaaggccgatagctttgtgtaatgtcatttataaaattatttccaaagttatggctaataggttaaaaggtgtgctccctaatgtcatctcggagacacaaagtgcttttctgctaggtcgattaataacagataatatattaatctcttttgaggttatgcattatttgaagaggaaggggtcgggaaaggatggttttatggcagtaaaaatggatatgagcaaggcatacgaccgcgttgaatggggttttcttcaagccatgttgaggaagctgggg

SEQ ID NO: 83912 - DNA, 1044 bp, Cannabis sativa
  modified_base (581)..(581): a, c, t, g, unknown or other
tctcacacaaattgtataacaaataaaatttaaaatatatgtatatttttaccgggtattacaaggatactttgagtatttcagtctagatattaatgcatagtacatcaatgagaatcgaattggtatcccattcacaacaaaaccacatatctgaatgtctgtaacaatctgcttctcgaatgagtaatagccacatcacttggctaaaatgtctgtagtagttagaaatatcgagaaaatgactgaacggagattctttgaacaattttaagtgagtcgggtcattctttagtacattattaatgtgccttgtgatctcgtctatccgactttttatacttattttgcactcaaaatgttcattttccttcaatataggcaccaatcgagaaatcttttccacctgcaataaattaaacataatctttctactatctgaataacataagaataataataaaaaaataaaatgaacaaaatcaaaaaataccggatgtgttttgtctcgtgacactaatgaaggctctaattgttctattccatcagattataattgttcatctccattagattcagcntgttcttctccatccaattctgtttcttcttgtccacttgattttgatttttcctcttcatttgtttctgattattcttcgaaattttccattgactaatttaaataaaaagaggtaatattatatcaatcgagtacaaacataatagtcaagctttaaccacaagcggttgagctcaactcaaggcactggagctttatactaacattacaagaatttggagactacatctcgactatgaatggtcgagctctactctgtatagtcgagctctacactaatatttcaagacttttgagactacattggtcaagctctactaaaagaaatcgagatttatactaacattttaattataatttcgaccatttattagagctctactaacaccaatcaaactacagtagaatctctatccaagaatacacttgggaccaaaaaaataatattctaattgagaggt

SEQ ID NO: 83913 - DNA, 705 bp, Cannabis sativa
tgtatgcctcaagcttgatgtatttcacatattctaactgaatcttattaaaacttcaagtgctcgaactcccttcaatctccttgaagagtgcttgcttcctccaaaggaaagacttgaaaagttatcttctgaaagtttgtagaacattctcgtgaaggtagcattattgttctacttcttttgtagacttgattacagactcaagacaatacaaaatacataaacacagaggaagagatgaacaccctctcctctacacaacaaagactctctttcttacaaaatatgagtgaaatacaaagatgtgaaagagatactaaattaaactgttataacatgtatttattatcaatatacacgttatagacaacgcattaacggtctgaacaagaccacaactcacaaactttcctgaaaagatcttcaatcaacctagctaggaatttttacttatgtacctacaaaattatgagcagtaagtgcaacttttttttttatagaaaagaaagtcttacttcattttgctcacaagaaatttgatcaaaccaattaagaaactcatataggatcatattaacatggctggaaagatacgaaatcgatttattaataaaacttatcgcttatgaccaactttctaaatttagaaaaactagacatttttcataccaatcgatcaattaaatacaaatttatggaagt

SEQ ID NO: 83914 - DNA, 546 bp, Cannabis sativa
cggtcctactctcgccccctttgcttctgagataactagcaagtttgtctcccatctgacccaattctcggccaaaagatacgcagcctgtgcctccgcgaactctgtttatcaggttcaggatatcagcactgccatggctgcgctgagttcttgcgattcattcctctctttttgcttatattttgtcttaaggcatctgatctcattcttgcttcttttttagatcaccgcagagaccagccgcctctcaaagaccctaattgaccatgggtaagtcatgtccgaatttgggggcatggacgaggccgtgaagagtctacgagacttgtcggctgagaggaaagcattccgggaggaggcccagcagaggtaggctaaggcggaggcggggcatcaggaggagctaaaggcgctgggcgaagctgtggccagggccaagcgcgagttgcgagaagccaaggaagctatggatgagctgactgctaagttaaaatccatggaggagctgcaccaagcggatttgcagtcgacggccaacctgac

SEQ ID NO: 83915 - DNA, 599 bp, Cannabis sativa
tattttttattatgtaaaattttgttatttttagatttctactaattgaattactaaataacttttatcattccaaaaaaaaaaactcccatttagagcaaatatatatttatatatttaatattatttaagcctcaaaacttatattttttttatttatttgaaatttttgttccattttatatatatatatatctaataagtaataagtgatgaatagtattgatatttttgaattattattttgtaattttgattctgtctattattaaaaattaataatttaatgaactaatttatatatttttcctacagcattttgtacatataatttaaacttttacacataaaagttaaattgttgttgaaggaatttgtacaacaccagaattaaattataataataataataataatagaaaatatatgcgaatactaaacccagaatggtgagcactcaaatcaggaacataaaatacttaatagaaactcgaaatacaaagaacacgacagaatatagtggttcagtcagatcacggtctgcttagtccactgttccaaggatttcttttcttattccatttcacgatggattactc

SEQ ID NO: 83916 - DNA, 642 bp, Cannabis sativa
gtcagaccttggtagtgcacgtacgtgcttctatagctcctttttatccaacatgtctagacaccaactttgtaaggtgaaacttttgagcgacacatgtcctgagtctcacgaattgccttgcagcagccgtacgccacacgataggaaggcttcctaccaaccaacggtcaaattgctaaagtcgtagcactagccattgtaatgtgttgagcacgaaatcctaggtaggtgaaggatatgccctcacccacacatgtgcctataaatgctctcattttttatgtgcaaagagtgaacattttgatacttacataacctttgccaaaattcctatgagctttctttttctccaagagaaacgaaaggaatacattaatattgatactgtaaatacttgtaatatttagatactcgccggtaaggctaatacaacgaactcgtggactagggattattaacgtctgaaccacgtaatttttcttttgatagcagaaccacgtaaaaattacttgtctattatttatcattttatatcttttttttaagatctaattaattaatttttaaaaatctcaaaaacatatatttgttataaatattaataattatgtggatgtccaaatcttttatttattacca

SEQ ID NO: 83917 - DNA, 845 bp, Cannabis sativa
tatttttaagaaaaatactaaagggctattaaagtgtcaacgatcggtcctaaggtatataatttagaacccctatatataatttaactattatgaaaatgatatttctagtattttagtgtaatgataaaacttttaaaaactcttaaaaactcttaagaactcttcataactacattaaatattttttaaaaaaataaaaaagtagaagttggaaattgatccattctctttttttaaagtaaaactttttaccactacactaaacaatttttgctatagtttttttttatttaatattttatctatatattaatatattttttttttacaattttagggtcctaagcattcatagacccgaaacgcactcctaacttatctacccttagagctagcccgagtgtcaagcatgacatatatcttattgctgctacattacaatatcggtcgggttttatatgttaatttaataaatactataaagaactaggttcgtttgaaacgtcgtgtgtattgtattgtattatattgaattagattatataatactatgttaaactttaatttatactaaaatattatatatttaggtgtccatataaaaattaataacacatatagttttacataaaaatattatataaaatataatttaatgtaatattatacattacaatacgatctaatacggcttaccaaatgaactatatgcttggacacctaacactgactgccccactggcggactcaatgaaggaccagtgtaggcttaagcccatgctgaaaaaaaaaattcttttacttcttaactaaaaaaattaattattttaattgcccgcaac

SEQ ID NO: 83918 - DNA, 1659 bp, Cannabis sativa
cgaatcacaattctaagtatggctttgataccatgcagaagataatgaatcgaattgtgtatgtatttcatagaatagtacatatttatatacaaagctaggagactaaatggataactacgaatacaaataggaaactactaaaatacaagttaccctaatttcctgacaactaatattctaacaatatttttttaagtgagatatttttgaggattataaataggacttctagggtacgaattttagcaccttttagctacaaaattgagagagaaatttagagagagagcaagaaaaagacagattgtggtttcaagtgttcttcttcatcatagttctttttttttctccttaaactcttactatttataataattttgattatgatgtcttgttccgagtagtttctttttagttaagggttatttcaaaacctgagacatgaagttttaatttcatttctattatatcatttgatcaaaataaatcgatttctttgtccaaaaaattagaatattaatatacttgatatcaagtccacaaataatattcttgacaaaaaaataaataagatccacaaataatataaacaaagaaaaatttacaaaataggaccaaaattttggtaaaaaaataatttacaaaaatactttaacatgatttttttttttattatttttactctttgaacttttttaaatactaaaatgcatcctcagtaaaaaaataataaactattttcttggttgttttatagttgtattatagttgtcatgaggttatttttctggttattttatagttcatttatagttgatttatagttctcgtgatgttgttttgtggttgctttcttactttttgctgaacaaattgtatttttgtaattttaaaactttgaaagtgtattttgtatataaaaactttaggttgtaaaattataaattaaacattaaaggggtattttttgaaaatttcttatataaaaaaatgccaaaaaaaaaaaattatattaaaaagaaaaaaatcacaaataattcaattgatattaatcttactcttgaatgttttaagatatatgtatttcttttattgtaattgatataaataaaactcttcattattcttattttagaaaaaacacaaaatataattatataatcatgtaagattttttttaaaaaaattagatacatacatgagttttggttgtgtaagtttatttgatcatattgtttgttttaatagagaccaaatttaattatatagttgagagattagactcatttacaaaaagtctaggaagcctccatttgggaccactattagactatttggggagcttaaaacattttaagagaatgaacacaaaataaatattagagtttttggcggctaaaccctctcaacaatcatttcacttgtaattaaccctctaagctcaaaaattagcggtaaaaccctccaaactacaaaatcgttaacaactttaaggtgtcatccatttaccacagttaactgctaacatggaccgcttaggtggacattcttatacacgtgacatatttatattggtacacctgatattattatttaaaaattatttctaaaaaaataatttaaaattataaaatgaatctctctctctctctctct

SEQ ID NO: 83919 - DNA, 741 bp, Cannabis sativa
  modified_base (293)..(294): a, c, t, g, unknown or other
  modified_base (361)..(364): a, c, t, g, unknown or other
  modified_base (496)..(500): a, c, t, g, unknown or other
aagtcatcgaagccatggggattaaagaagctctcatttgggtaaagaccaataattggcaacatgttgagatggagacggacaatcttgtttcagtacaagctattcgaagcaaccaagcaatgaagtccacttttggccttgtaataaaagactccgaacttttgttatctaccctcccaaatgttaatttatttttcattagacgatcagcaaaccgagtagcacattatgttgctagacattcttagtatcaatcagatcatagtatttctgatatttctatttctggnnaactcttacatcttttgtattcagaatgctaatttattcaatgaagttgatatttcatctcaaaaannnnaaaaaaaaacaaaacaaaaaaagactaattttcaaaattgaaaaatttcaaaatatctacatataaaatgtatatcgatatttgtggaaaatgactcttaaaataaaataaaatatattctaaaaattattnnnnnttaagttgatctaaaattaaaaatttcaagctgaaatataattttccatttaattaaattcattaaaattgaaataattaagtatctagaataaaatcaacttaattattatttctaatttaatatctaagaaaatattataatttaagttgatccaaaattaattttcaacttaaattttctgatttaattaaatttcaagaaatagaaataaataattaagcatcttgaataaaatcaa

SEQ ID NO: 83920 - DNA, 571 bp, Cannabis sativa
tagatattagtttatacatattttttaaatttcatgtgaaaaatttcatcataatatagttttttcatatctataatcaaattcgaagttattttcttttttcggttgcgaccagattagaaattttcttcttcaattgcaaccactttaattagtgatctttaggtgctctgtatattgttttaggtaataataaggagaaattttaaaaggaatctagtcgtaaagaagaagaaaatgatgattttgaacttgagaagatagtttctaaagttgttcaacttattggtaaaaaagaaatctgttcttaaggatggtagtgtatcaaaatatggttttatactcccaattcttgtgtaaagtttctttctgattttgtaagttcttaattttttattattttatatatatgtcttatttttataggttttttagtttgtataaaactaattttattgttgtctgttatgttattaaacaacaatttttgttttattttaaataataagcttcttatgtttgatttgtgtttttagtataagtttcagttttttatttggttattttaaga

SEQ ID NO: 83921 - DNA, 791 bp, Cannabis sativa
tggcacagggtggtggtaagcagatacggtaaagctgataatttttgggattccaagaatggaagtcgtttgtcccccaaaggcccatggagggacatctcagatctgtatgacgagtacttgggcttggtacagttcaaaattggaagaggtgataggattcgattttgggaagacatttggcttgatgattcccctttgattagtgtattccctgacttagcagtaatatcaaaaggaaggaatgcttctataaaagacatgatagtggatgaaggattaccaggtggatgggtagagagttggaatttcaagtttagaaggaacttaatggatagagagatgccaagccttatctcattaatgcaaaaggtggaacatgtaaaagtgttgagtatttcggatgatagtcgaatatggaaaccggatccatcgggagtattctcttgtaaatcagccttttcttggctgacatcatacccatcgactgaggatctggcttggacgaagacgctatggaaaagttgcgttccatcaaaagtcaaagtatttggttggctcgtcgctttaaacaaagtgagtgtccacgaaaaggttcaaaaaaggaagccttatctctatatatctcctggctggtgtgtttgctgtaaaggtagcggagaagacgttgaacatctgtttctggagtgtaattttactcgatgcttatggagacatgtgctagaggagttcgagttggcttgggttatgccaaggtccgtaccacaaatgatagtttctaagttaactgg

SEQ ID NO: 83922 - DNA, 562 bp, Cannabis sativa
gttgaccgacgtgaatagtgcccaaatagttggactcgtctgtttaaaaatgacactaataatatacaatttgcgtcattttattaactgatggtaaaaatcaaaccgacgaaataggtgaaattttttaaaaaacttgctttcattttgcgtctattgttaacagtcgactataaaacgacgcaaaatagggataaaccgacgctgctcatcagtaaaatccctaaatccctaaatttctcattcacacttcgtccctaatccctctcctcttcgaaactctctggcaaaacagcgacttcttcgagcccctttcgtctgcttcgaatccgcctactcgagcccatttcctcctctttgaaaccggcctctttaccccatctcatccctaacccattctctttctcctctgcataatcgggcggtgacccaaccccagcggcctcctcttctcttctccgtcttctgcttaatcagctggcgacgacccaactggcaacccaaccaccgtgcaatgtgttttagcaggtatgctttttttttttccatgccttttagttta

SEQ ID NO: 83923 - DNA, 1362 bp, Cannabis sativa
  modified_base (1320)..(1329): a, c, t, g, unknown or other
catttaaggcattgtaaatgtatcacgatgatttaggagataattttggcaacaatgcaaatctataaatagttgtaaatctttgtaacctatgttgagaattagaccaatataacttgagtgtaaatcgtgatagtgtaaggttgagagtgacagagagtctagactagagagaaatttcttcttgtaatctttgagaagtgtgtgaaaattcttataacattgtaaatactgatatcaacaaagatatggttgctgctattccaaccgagatgtagagcattgcacatggctcaaactcgttaaacttggtattattcttttttattttactgcttaattcattacttgaatcttgtgatctcttagtatatgatttcttgattgtgtttagtgtttgttggtaccgtaaactgaatcgtaagttgttgattgtttctgtttctcacaacagtaatgctgtaatcttttttatttgattttattttagttttttttttaaaaaaaaataattcaagaatcagatggctgattagttaacttattttttttattattttttttattttaattctgattgtgtttcttattaataaaattgcatcaatcttaaaaaaaaaaaaaaatgattgaaacctatctaaaaaaaattgaaaaaaaagcctcataccaaataaagatatgaaatatcaccgttctcataaaaacattacatctatatctccccttatctctatcctacacattcaatatgtatttttgttttaccacaaaatatatatatgtatttttgtttgggtgttacgtaattaggatagtgtactaaaatgtaatgtggtctagtcataggagtagctagccatcacaatagacgtccacgtttacatatatggataaagacagcacctatcatttttcttatcttcttcaatcacaaataacattttcatttgtgtttcactatatttatatagacaagagatagagagtgtaaccaagtcccaccatcctaatcccaattgcaagtggctttgctttcttctttttttttttttagctaacaatgcaattagaaaagagcttgtattataattgggttgggtttattattatagcaataataattccaactcattcaatagttcaatactaactcaaggaatattaatagcaagtcaatcactccacctactttcactgagtgagtggcagacacataataaatgggctttcttctgttcattgcatattaattgggaaatttacatgttattgttatttttttacaaaaatattatcaggcggtattttttacttttnnnnnnnnnntttttataagtttcatactacagtatactgtgt

SEQ ID NO: 83924 - DNA, 1163 bp, Cannabis sativa
ttgtatttatgttttttaacagatagaacgagttgctgaaactggttcagtcgttggcagtaaaagaaaatcttctcgtaatattggtggtatatcaaaaaagggtaaaacaaaaaaatatatatatggtatgtttatacattttacatgttatgtgtttgtattattgtattaaaatatgttttttttttcttattttgattatgtttcattattatttacattattttttgttaatgtttaggcaaagttgtctgattccataaatgatagttttgagcatattgttgattttataagtaaagaaaaaaagaaaatcttgttgaagtctgtgacaagaagaaagcgcctgacggaaccgagtggttcttctattcatgttgcccctacggtaattattacatgaaactggtttctttttgtcaattgtatattttgttataatttagtattattgttatgaaaccggtttttatcccttatatatttatttgtaggttatatatttcattgttaaactggttttatgtagatcaaagttgttttgattttagtgaaactttgttttttgtttttgtatttcttatttttgttatttgatattttaaattatttttctgtttatttcttgaatttatatctcagatgttttattttaaaactaaacccaaaaagagattcggatgtgttgctcaagatttcaacaatacaagtgtcctccttgaaatgaagttaagattttcacgtgagtaggaaaaaatctttcgaaagacgctatttggatttttgtttgatatgcatacacttatttttcaaaaagaattagtgcatcttatattattaaggcaacttaacacaaagagggatgatgaggagtgttggtataagataggttctaaagccgttagatttggagtagaggagttttcagttataactggttttaattgtagtggtcaatacgacttgaaacctcttagcaaaaagaagatgctaaagtttaaagctaggatgtttcctaactttgccattactgacaaagtcacaagaaaggatgtgagagatgtttttcttgatcaagaatttctcatggatgatgatgatgtagttaagatgggtgttgtgtatttactctcttgctacttgtttggatttacacatga

SEQ ID NO: 83925 - DNA, 1472 bp, Cannabis sativa
gaatttcatcaactctcgtgccgacacttctctcttcttgctcaagacttcaaagtttgtaatcatggtcctcatttacgtggatgatattgttgttacaggtaacaatactcaggaactcaatcaatttataaaaaggctgaatatgacttttgctttaaaggacttgggagctctaaatttctttcttggtattgaggtttttcgagatgctactggtatatatctttctcaaggaaaatatgtcatggaaattctcacacgacttgatatggctagtgttaagccatgctcaacgccaataacaggtggtagacctatgtccttgatggatggagaagagttaaccgatgcaacacaatacaggagtgtccataggggcacttcagtatcttaactcatactcggccagacattgcctttgctgtcaacaagctcagccaattcttgaagtgtcccactaccattcattggactgctgcaaaaagagtccttcgatacctgaagggaactgtccatcatggaattcatctaaaatacagtgagaaattagctattacagggtactgcgatgccgattgggcatgctgccctgacgatagaaaatcaatagcaggtcattgtgtctactttggtgattctcttgttacctggtcatctaagaagcagaccgtagttgctcgatctagcacggagtccgagtaccgatctttagctcaagttgctgcagaaatctgttggatcgagtcactccttgaagaaatacagttcaaactgccgtctattcctgttatttggtgtgacaacatgagtgacaaggccttggcgtctaatcctgtgttccatgcccgtacgaaacacatcgaacttgatgtccattttgttcgagatcgagtgctgcagaagagagttgaagtgcgttacattccctcacaagagcagattgcagattgcttcacaaagggattaactcacactaagttcaagatgttcatcgacaaacttggggtgacaaattcacccttgcgtttgaggggtggtgttaagatagattaattaatgtaatcagattatcccttttgctaatactggtttaggcatagaactttcctagtttgttatgctattttgtcatcatccattctgttatttgcttttcctctgtattcctacttttcgaatattctctgccacctgtcctagggtcattgtaatcattgacagtatatatacaatcattgctctcagcctctgattttgagctgagtttatctttttcatatcttctctgcattctcacttggtatcagagcaccacgctctcaccatgtcgacaggagacagtcagacccctcgtggtggaggtcgtcgaactggtactgaacagcagggccagaactccggtcatctcggctccccacagattacaaatggagcatctctgtcgagctcttcctttggatctggaggct

SEQ ID NO: 83926 - DNA, 662 bp, Cannabis sativa
acatatatatatagggcaagactaaggtaggaccgagcaaaaattccctaccggtagggtactttttttgaccattgatcttagatcatgtggttattataacgtaaggtgcatacttttatgataggactgcttgtatacaattaatatacgaattttgttattaattttttttatataaataattaactataataaaattacttacttatgtacgtttgcatttgtttacatacatagttctactataatcatcttttaaattaatttgctttaatatttttatttaaaatattttattaatttttctaatcaagaaatataatttctattaatcaaaccaagttaattacatccataaggagatttctaagctttgtaattttgctacttattataatattgcttgatgaactttcaccagaaactttactagtatagtcaagatgttagccatcccgacaaatattatttataatgaccatgaggtttaattctaatttattaatgaacacttccttttcaaaaaaaaagtgaattaatagttcatacgcagtgtttcatttgatagtgaaattagttacaaatcaaggatggtgtacgaaatcttcttcaacaatcttttgatattgaaaaagtgaaatcaacttttacataatatc

SEQ ID NO: 83927 - DNA, 758 bp, Cannabis sativa
tagcagataattagagttttaattagaaaattggaagaaaaagcttttctctctcttcactccctctctctcttgaattctttggagaaccagcagcatttggatttcttcagctggtttttggtggattgtagttagttctttgtgaatccattgaaggtaaccctctttagcaccttttccttttagtttcttaagttttaatataaggaattttgcatgaattaactattaggtttctgagttgtggattgtgttttctttagttgaattaaagttatttttgttgaattgagcttaatttgaaggctgttgtgatgtttgagcaagctttgagtttaagaactcaagctttgctctttaatggcaattcttgattctgagaatgtttggttgttttgttgctagggttatgttctttggggtatattaagtaggtctggaagtttttgtgcagtttgggattgatttgagggtgtagtgaaattttgaagttttcctgcactgaactgaaatatcggttcagggggacttgtaggaaccagtcgaccggttggtctccaagataccccatagaactggaattccggttggggaaccagtcttccggttggggcacttttgggaaccctagtttttcttatttttgcgatatttagggtgttattcattgatagggaaacttttagtttcaagtttaagttcctggaaagtgatttagcgtatcactcactagttttacaaataatgtgatttag

SEQ ID NO: 83928 - DNA, 785 bp, Cannabis sativa
cacgaccaacggatcattgtgcgggaaattaatcttgacagcatcttcatcattaaatgttatggtgggttcccctgcccgtggtatttttggcttccattctttgacggccaggacaacttcttcttgctcgtgctgtaatgttcgggtatacctttcccgggctttgcttgaatctctagctatgtgtgggactccaataatgacttgtaaatgtccatctactggtggtggcagtaaatccttgttgttgtgtgcttgggcggtgcattgattttgattggtcttgacatatttttgcacgtgcgggtttttctttcttattaagaattcaatttcccacttcaaattgttgcattcgttggtgtgatggccataatctacatgaaaatgccaaaacttggacatgtccctcttacttatgtcctttttcataggagcaagtttcttgtacggagctactgactgagtagccatgtagatagtctctaaatcctcagttaacacagagaaagcagtgagcttggaaggattttctctaggggcctgttcagctttgccaacgaaactttcccttttcccattgccttgcctgttgttgttgttacaccttttactgcccaagcttgaatttcttggttactgagggagctaaacagatgttccagcagagagagcttgtgattggtttggtttatgctcgacttttgctcgctgaatgacctcttaaagcttgatgaaaccatctgcacgatcgaggaagtcactcatggaatctactggtc

SEQ ID NO: 83929 - DNA, 1678 bp, Cannabis sativa
ctgagcaacaaggcgagctttgtgtctttcaattgagccatcgctgttaagtttgattttgtacacccatcgacaatcaatggctctttttctaggaggaaggggaacaacagaccaggtcttgttatttctgagagcaatgagttcattgttcatagcatcgagccattgtctgaactgtattgcttgtttgtatgtttgtggctccttctgtgaagtaactgcaagaatgaaaagccttgtatgaattagccaatcaagtataagagatgaatttatctatagaatgtggtgtagatgattgatcttgaatgtatgaacaacattcaaaatctttgaggtaactcggtggtctagttggtcttgtggttcttcttggaacatcaggaggggcttcatgaggtgtttgtgaaacatcagtgggatttttgccaggttgtggtgatgcagtagtactgttgtcgggttctgctgcaacagtaggtgttgagttgctgatgggagattcaagccttgttcctgcattgttagtttgtattgtaggataatctccaacaggagtgttagttatattagaggaaggcaatgcaggtgtaagaaaaggatcaatgccactgttgttttcatttaatttgtgaaaaggagaaatgttttcgtgaaaaacaacatttcttgaaatgaaaaattgttttgaattcaagtcatacaatttatatcctttcacaccttggggatatccaagaaaaacacaagctttggccctagcatcaaatttgatgcgatgtgcagtgagggtggatgcaaaaacaaggcaaccgaaagttctcaaatatgcataatcaggttgctttttgaataatagttcatatggagatttatttttcaggtttggagtaggtgttcgattaataaaaaatgcagcagtcattacacactcactccaaaaacgaataggtatattggcttgaaagtagatagccctggccacattgagcaaatgctggtgcttcctttcagcaattacattctgctcaggggtttctacacaagtatagtcatgtagaattccttgctgttgaaacagatctttgaatgccaattcaggggcattatcagacttaaaccttttaacagaacaagaaaattgatttttaacataggaaataaattggagaatcacattaataggatcatatttatacttcgcaaataagtccatgtaaatctaaagtggtcatcaaccaaagtgagaaagaatttatgtccagagtgagcaggtatatggtatggtccccaaatatcacaatgcacaagattaaaaattttagaagcaaatttattgttgctagcaaagggaagttttctttgcttagctaagggacaaatgtagcaaggggtgtctttgtgtaaaccagaaacattacaacttagtttattgctaagaatattcaagtgtttatttgagggatgtcctagcctagaatgccaaacatcagcacttatagagaacacagggaattgatcgggtgtaggatccagtatgtataagccattcctagattcacctttgccaatcatcctcttgtgcactttgtcctgtataacaaaatgatcagtatagaatttcacataaagaaagttttctttagttaggcaattcacagatataatgttgtat

SEQ ID NO: 83930 - DNA, 1062 bp, Cannabis sativa
cactcatttattaattaaagggtttattaaaaaacgtgattaattaaaactcttaaacaaacttgaacttttaataactaaatacaaaaagttacataattttgggatcctatttttattttacaatcatattcaaaatgctacatatatgaaagtgtcacccgacgactaacaaaatatgaactacattgtcccgtagatccgaacactccaggtctaatcatccagatatgtataatcttcatccaattgtagactcactggtactcagcctttacttcactcttacctacacatgtacacatatctgtgagttgacagacttagtaagagaagcaaaaaatataaatataaaattgaattgtaactaggcgcccatacacctaatcatgattctataatctgcgtccaatgtgtataaatctcaaacattcttgacagcagtatgattaaccataataccaggctatactcagtgctctagttgtactaatgtgatagcatcaatccatacttactaaattggcccaaatctccttacaatatttttgtcgtctctatgtgtactttcttcatagtagtgcaatataacctacaccattgtcatcattaatatcttgtttaaataatgtaagaatctttaaataatgtatatgcaccttcttacatacctaaacatcagctacatatgggatcaaaatgccataaacatcaaaaggtataggctcaacaacaaaatcatcatatgtgggattcgctacaagaagaaaacctaaaaatcctaaagcttttttcgtgttggtgatgacggtaacagtagaggtcccattaaagaacccctttgagattgtgcatatcacaatactacctttcactacatttggattaaaagcttcaggatagtgacactcatcaatataggcactgttttgggaagtgacccatctgtcttcacaacatccttttctaataccagcttgtgtaaggaaaactcatcaccaaaagatggtcctaaatgaaacctaaaagcaaacggattgcaaaaactgttgggttttatgc

SEQ ID NO: 83931 - DNA, 1274 bp, Cannabis sativa
gtgtggtgcgaaaccttgataaatcttttagaaattctgagcctagaagcagcaaagtgaagatctcttttgaagatattgaggaggaagtctcgttttggacaccttcaatagtatgttatgtattgggggcaaaccctcttgttcacattattgagggatttgttaaaagactttggtctgataaggtggatatggtgaaattactgtcgtatggggtcttcataatcagatttagctcactggaacatagagaccagattttaaatggtggatatgtgttttttaacaggcgaccggtcatcatgaagccatgggatcctcatgagaatttcaggaaagaaaacattaagagtgtgccaatttggattcacctggaagaattggagttgaaatattggggacaagggacattgttcaaaattgtgagtcaattaggcaagccgattatgttggattctgtaaccaaggacagagaacgattgagctatgctagagttatggtagaggtgcagatggaccagaaatttccagaaattctagaatttgagaatgaatatggatcagttaccacagtaggtgtgaaatatgagtggaaaccaaatgtttgttgtaatgttaaggattttcgtccaattgcttgttgtaatgttatatacaagattgcaacaaagcttttgagttcaagaatccgagacattctccctgagataatctctcactcacaaggaggcttcattaaggggagattcatagggcataatatcatgattttccaggacttggtaagacattatcacaggaaagctaataaaccaagttgcttgattaagttggaccttcaaaaggcatatgatactctagaatgggggttcctggaagagatgttagatggtttaaagtttcccaagaggtttatccagcttataatgagatgtgtttgtactcccagattctctctcatgtttaatgggtccttacatggtttttttgaagctaaaagaggtctcaggcagggggatcctatgtctccattgttgtttgtcctgggtatggaaaacttgtcaaggcttatgaagaagattggggagaaaaatgactttcgctttcatgataggtgttctcaacttcgactaaaccatctggcttttgctgacgatattctgcttttttgccatggagattcacagagtgtcaactatatgcttcaggccctaaagcttttctctctctcttcagggcttcatcctaatgctagcaaaactgcaatttat

SEQ ID NO: 83932 - DNA, 688 bp, Cannabis sativa
aatatcaagactcaagaacctatttagtaggaaggagtactcaaagtctttacattcacaatttatacaagtctatagaattcacttgcatattttggttaaacattcacaaaagtttcttttttctaattatgattgtatgttgacatgttgtaattacttagaacaatttataaattattaaaaaatttcaaataatttataatactaaaaataaaatttaaatattttgtgttattgttttttttttaatatgtagtaagtaatgaattttatttttaatgtcttaaataactaaacatcaaaatggattaaaaaattcttataaatactgaaataaaaactgaaatcgtaactaattattcacattgaattactagtaaagaaatagaaaaacagcaggggatttttccaagcattcgaacacaataatgctgccaaatatataataattgtgtaataatatacaattacaaatgttgtttcttttggagaaaagggccaaataagacaaagaaaagctatagcctaattcatcataaactcaatctgtagggtatccaaaggtgaagacaattaatgcaacttaaaccagcttccacatacttgaatctctctactctatatataattgtattatctcaacttggaataatatattgtatagttgataaggaccgaatctctg

SEQ ID NO: 83933 - DNA, 1430 bp, Cannabis sativa
  modified_base (33)..(39): a, c, t, g, unknown or other
taattgaataggaaagattacattgaaatagannnnnnnttagggcacaaagcccaacagcaagaaacaagactgtgtttctcaaaggcacattacctcaacctttgatcgaagatcctcttcatcatcactggctttgctgcaatcaaatggtgatgtcatggattcttcattcagtcacccctaaaattaagagtagtatcatgtttcttgatatatcggctgagatgtggattgaactcaaatcctgttttgatcaaggtaatggccctagaatatttgaacttagagaaactcttatcacacttcaacaaggcaatgattctgttagttcttattttacaaaaattaagtgtatgtgggatgaaattcaggaattaagacctcagattccttgtacttgtactgcctctgttgataatttggcttttctgaatcaagaacaggttctccaatttctcacaaggttaaatgaatctttctttcctatccgtgcacaaattcttctgattgatttgtttccatctttgtccaaagttttctccatggttgtccatgaagaaagacaaagtaaacttgaaaatcctcaactcccactactggcctctgtccaagaatccactcaaccccctactgctcttgctcaaaatccctctacttctgcagcatctactaatcctcgtcccaataaaaagatgagaccctattgctctaattgtcacaaaccaagccatttaaaagaaaaatattttttcttaatcagttttcctcctggttatggtgacaagaagaaatttgatgaactctctatccattatgcctccacttcagtcgaccaatatggcggtcttgctaatctttcaaagcaagaagatattttggccataatctcactgctcacacagaagctacaaccaacacctgctacagatgcatctaaaccttttgcatctcatgtttctggtaaatcttctcataattgtttatggattgtcgatagtggtgcttcacaccacatatgttgtgatatttctttattttcttctatgcataagaatactattgcccatactgttactcttccaaatggttccactattagagtgcataattcagatgacatcaacatttcacaggatctttcaatctctaatgtactctatgtccttacttttcaattcaatctatttagtgtttctagttttttcactaatacctctaacaatattcattttaccactgattcttgcacagtacatggtcctcagaacaagagcattgggacagctaaacgaattggcaacttatacttcctgcttcaatttgccaattctcccacatctccattcactactacaaaaaccccctttagaggcggtttttaagccctttcagcgtcggtttttgcgaaattcgctaccgacgctgat

SEQ ID NO: 83934 - DNA, 518 bp, Cannabis sativa
ataataatatcaaactaaatattaagcaaaaataaatcttactcaaaatttgacatttattattacatcaaagagaaagtgcaaaagagagtgggatagagaatctccttagtactcctcgagttaaaaatataaaaaaggtacccttatggtaactaggcagtaatcaactgccataaaagagtactaggtacttatgctgttttttctatatttattttaatttttttctaaaattttctcataataattgttttttgaaaaaaaaaattatatttttaaaatttatacttaaaaatatataaataaaaatttgaaaaattactttatatactatttttttttttaattttacgatttgagttgctccggtagtttttatgtgtgttgttatacagattttggttgctatttaggttgctccgttagttactacagggatttttatgtgaaattccataagtgtaaaagtacaaaatcccctaaaaatttcgagttagaaaataatctatataatt

SEQ ID NO: 83935 - DNA, 735 bp, Cannabis sativa
taatttagtagtaattaatccaatttcctgtggttcgacctcacttgcgtgagcttactacttgactgcgtatacttgcgtagtgctcataattttcgtaacatcacccaccagttgtacgactctatcttgatcttctccttaccggaggagttattttataatgaccgagaggtctaacttttattttaattaacgaatgaatacgcttattttcaatatatatataaatatatattcataagatgaacctaagattagtgaatttcaagattaatttattaaaaaccattctatcaattagtattatagaaaagctgtaatattatgttttaaagataaatttattaaagcaatatatatgagttactaattaatagttacattttttttaatgtaattatgatagattaataagtaaatattctttttataaaattaaattaattatgattgactatacttaaaaaaattaattaattaatatatttaatatacttttttagtaatttatatttattaaggattttatttgatatttaagtgcttattataattttgttaattttaaaccatttgattataatatttgtaataatattttttaaagaaaatagatttatactccttatatgataaatttgttaagcagtaaataactatttggtatattgtatttttttcaaaatacaaacatagtaccttatgttcctaataatgatcacttggtaccct

SEQ ID NO: 83936 - DNA, 572 bp, Cannabis sativa
ttttattttaataatcatttcccatataaattttgaattgcattattttaatgtagatatttcgaaatttttaaatttttaaaattggattaatctcaactaaagcaagaaaattggtaaatactaaatatcaaggagagccaagaaaatacaaaaattttgaactcctactaatctaaacaccacatttaactgagtttacaaggtagtagccaagagaagcgaatttatttacctacaaaataagaataaatctcaaagtccatctaataattatccttaaaattataatatacaaagagcacaataaaattgaacaaatattgtactcacaagagatgctattaacttccttcaaaaactcttttgcattacatatttaaaacctcaaatcctcaaaccgaacagtgttgagggatgaagtgttaagtggttcaattaatttactcaataaattacattcattcatactccatttttaatttaatacatatatttagaattaatatgttatttagtataaattcaaaatggaaatttgttttaaattggtaattaattacatgatttat

SEQ ID NO: 83937 - DNA, 1117 bp, Cannabis sativa
  modified_base (550)..(559): a, c, t, g, unknown or other
tataacatgaaactcaatcccttaaaaagttagctcgggtaagtttctaggctttattgtcaacgcccgaggaattgaagccaatctggagaacatccaagccttcctggatatgaagtcgccaacaagaaccaaggaagcttaaagtttgactggatggattgccggactcagcgaattcatttcaaaatcaacaaacaagtgtgttctgctcttcaacatcctgcgaggaaacaaccaatttgagtggatggaggaatgtgaaaatgcttttcaagagctaaaaatgcaactcgcaaaacattctgtactataaaaacctctggactgagaagaacttgggatgtacttggctgtcacggagactgctgtaagtgacttactgatcagagaagaaaacgacatacaacatcaagtctattacattagtaaaagactcattgaggccgaaggccgatacccattgatagagaaactcacttactgcgtgattctagcaacaagaaagctaaggccttattttcaagctcatcctgttcgggtatacacnnnnnnnnnnttacgccaaatattgcaaaaacttgatgcttctggacggttgctcaaatgggcagtggagttgggccaatacgagattatcttccaaccccgaatagcaattaaggggaagaccttagcagactttgtagtagaatgcactagtaaggaagaaagcatataagaaagcaaccccgagccagtacaaatacctcagccaagtaacagtgaagacaagctgacttggaaactacacgtggactggtcagctacatatcaactatccagtgcaggaattgcccttgtcacacctaggggcaacacttgcacattgcagtcaagtttggatttaaagcatccaataatgaggctgaatatgaagctttgatcgctggtctaaaactagctcaagagatgaaggctgaacatattaaaatctacagtgattcacagctgctggtaaatcacatatctggggaatacgaggctcggagagaaaagatgatagcatatttgagaaaaatacacgatctgcttgcacagttcaaaagctacactcttagacaaattccaagggaag

SEQ ID NO: 83938 - DNA, 1064 bp, Cannabis sativa
actaaattcaaattacagtcataacgttccaacttgtaaatttcgaattctaattctaccacgacataaaaaaaaaggtctggcaagggtgtggtagtgatacaagaataagaaacaaacagggtattattaatccattgccgggacgaatctatctctatcgggtcaaccaaaaatatataatagtagagagtatagggaaatggtggggctaggaaattggaatgcgtggaatgggattagggcaaaaataccgatccttttcttgagaaccagacagatatagatccaaacacatttaatgcagctcatctacccttgtcagactctatagcattaaatattatcaaataaattcatttattcattttttatttttttaccttttattttactatttttctttttgaaaactagtgggatagtatttagtgttgctaataattaagaaatgtttgacatatgtaaatgcaagaaatattggtggtcctttctctttaattcatggaggttagtgcttcatagtgttaatttctagctttgtaattggttgaaatgtgtttttttctcttttaatattatttttggtttcatcaagttcaaaatctgacaagaaaatgccaaatgtaaagtttcacaaagcttttaagaaccctagttgcccgtcagtccatgcctatatatgtacaccaaaaagaggcccattacattcttttgccctcttcctacgtgttgtgtcactctcatctcaactcaactctcaatacacatgcaaaatagttaaatttgaaatgaaaaataaagaaagcctgatgagtaaaagtaaatcccagcatttttctagcttgttttcttgaaaagtagtaatttttctgaatattatttaactaaaaactttattagtcactaaccttacctttccatttgggtcacttaatctgctttcttgtaacatactccatccaattattgtctcttttcttatgaaaaatgttgccagctaaaatacaaagactaactcaaaaaaaaaaaaaaacacttgaagttacttaattgataatctt

SEQ ID NO: 83939 - DNA, 789 bp, Cannabis sativa
aattgttaatatgcagttcaaaccgcaccgcaccgcatattataaaaatacaaatttttatatttatttaggtccatatgtgaagtcttaacccaaagcccactaattattgtattgttgaaatttgaagcttttttcaacaagtgttgttgtatttgtgatagtttaattatttggtgatagtccaaatcgcagaaactgcatcgtaccattttttgcgatgccgtttctgaaattttttagtttcgtagtgcgggtacggtttgggaaattaaaaaaattacatgtgcggattagtttaaaaaaaacagttaaaaatcgcactacccacaccgcaaatacccctaaattatatatatatatatatatatctaaatattataatccaatgtatataaaaatatataatatatctaaggatatatatataactatacctatagtgatatatattaattataatataatgaagcttattcatagcatgtctagtgtctccgactagtttttaattatcttcgtgaaagttgcactatatataaaactctagctcataattaagcactagcttgtaggaattattataactgtcgtcttatatgtgcataaatctgctatgtatttattaaactgcttaattgtacttttgaagagaaaaagaggtaaataataataataaaaaaacatttagtaattgacaccgtataccactttttttttttttttgaaggaactttagttcaattaaggtaaaaagcaaaactcggggatcacagggggatcaccctc

SEQ ID NO: 83940 - DNA, 1148 bp, Cannabis sativa
cctggagcactgggtcctggaattagtaatgccatcattacgaattctcgtttcatacatttccatggaggcatgttatatggcattagcaacactggccacatactatgtgcgtttgataaatcaccgaatggattgaatccatctgttgcaaatcccaacctaacatttctagtttcttttgcaaaattaggatattgtcgatcgaaatccttccagacttctgcatcagctgggtgtctaagttcaccatcagtatcaacacgttcttccttatgccacctcatatcagttgatgtatggcgagacataaaaagtcgttgtagacgtggagttatgggaaaatattgcatctttttgtatgggatcttcttgcctttagttccttgaaatttgtatcgttcatgatcacatacaggacatctttcagcattttcattctctttccaaaataaagcacaattgtccttacatacatgaatggtttcatatcttaaaccaagatcacgcaacatcttcttagcctcgtaatatgaccgtggaatcttattgtctttgggaaatgctttccaaagtaagtccaacaacagatcaaatgatttgttactccaatcacacatcactttaatgtgcattagattaacaataaatgttaagctcgagaatactgtgcatccggggtacaactccttttcagcttcagcaaataagttaggtaatgaattccttgcattgttgtcgccatttgaatctccaaggttcacaaaatcactatttctatgagattgattagctaaatcctctaatgctggtatcatatcgtcatcatcttcatcatcactatcatataatgtgttgtcttcctcaacgattgattctgcattctcttcatcctcgtgtatttctgtgatatcttccccgtggaactcccataaaacatattttgtataaaatcctcttacaaatatatggcgctcaatcgtctccaagtcataatagtataagttcatacatgaaacacatggacatcgaatcttattttcatcattcaagtgaaaggatgataatttgagaaaatttttaagtccattgaaaaactcctccgataatctatccttttggaaaatccagttcttatctatcatttt

SEQ ID NO: 83941 - DNA, 635 bp, Cannabis sativa
aaaatgtcattaattaaatccaattttgtgttatttttacaatgcataattattgatatattttagtgatattttttaaaagcattaacaaattgatgacactaatttgatcaaatgtccattatatatatacatatatattattagtaacatttccaaaaaaaatgcgtaattaattaataaaatgtaatttgctctcattaaagtgttctttttgactaaatgtcaataaaatatatactataaatatcatctttggacaaatatcactaatgatcgatcaaaatgtcactattaattagtattttttatgtttgattatatatgataattatacatggtggtacgtagtgaaggattcaacagtggctaattattatattatcagaagtaaaatttataaatattccatatattaatgctagtcagcgtttaacattgttgacaaattaatgaactgaattataattagagatcaatcaatggatatatatatatatttagggagacgattttgtctcgagtgatgtactttcacggaatgtattccgtgaaacattaaatgagtctcagggtacattaaatgagtgtcagagtacgtttttactttttaaccctaattactcttagatcaa

SEQ ID NO: 83942 - DNA, 845 bp, Cannabis sativa
atctttgtagcaatgatccaagtgtatcaagaggttgcattagccatggctcgatattcgacttcagctaaagattgagaaataacttgttgttttttatttttatgagactagagcttgtcctaggaacacgcagtagccagatatggaacgtcgtgtatcctagcatgtcccccagtccgcattagcaaagaatgaaagttggatattggagggggatatgcttgttttagcttaagctgagatatttgggaagtatttgaagggaaaaataaaccttatcctggagtgcgtttaaggtattggagaacacggtgtgtggcttgaagatgtggcactctaggacaagtgacaaactgggtgaggtgatttacagcatatgaaatgtttggcctggttattgtgaggtaataagtttacctattaggcttctgtaggtggctgagtctagtaagagtttgcctttaaccttgctaagtttgagattaggttccattgtagtggaggctggtttagctccaaggtaacctgtgtcaattagtaattacagggtgaaaggttgttgtgatacagaaatgccctatttggttctgcctatttctaggccaagaacgaacctgagtgagccaatgtctttgagtttgaattttttatcgaagaatcgtttaaagtgagtgatggtcaactcattattgttagctacaatgatgtcatctgcatagattaacacaactaggaggattgttggtgttcttttgataagcagggagttgtctgaaagggattgattaaatccttcagttttgagtgtggtactaagcttttcataccattgtctagaggct

SEQ ID NO: 83943 - DNA, 725 bp, Cannabis sativa
aattggttatactctattatagcatcactgtcaaggatagtgtttatcgcacccctaaagtatcattagtatatatttctttatattagttgtatgctactaaagaaaaggcctaaactataaataaatatactaagtaacataacttttttttatttacattactctgaaatacaaatacaaaggaagctaaaatattatgaacttaataatttaactaaaaaaaaaaaggtgttcataaatcaaccattcaagtctcactattatcaaataatgttactttagtagtttctttaaattcttgaaaagattcagaaaattccaacacctgagaagatcttgtaacttcaagtaacttgatcaactttttatcaccgcctattcgagcttcatcgatcggagtatttccccatctacaagaaagggtaagactaataataagttatgtgataggaaacaatatagaaatagtagataaaaataacgctcataaaaaatcctattgaaactaagaaatataggccgttctcgtatgagctttcttcattttatcaaaaataataatatgttcttgttttttctttctaggttgtgacaatgttgcaactcagtattcaatactagcaattcatacaattaatgttcgatgttgtgtgtataaacaaagatataaaattatactaataacagtatgacatgtcataagttattatcacttaacaaaa

SEQ ID NO: 83944 - DNA, 1583 bp, Cannabis sativa
atattgtttaacatcaatattatatagatatatagatagatattacataaattttgtatttagttaaaattgctatatagatggagaaattgaattgaaaaaaacgtataactaatagtattattagggattaaagataaggatgttatattttttattataatcattaagtgaaaaaaattattaaaaaaacactgcaatttaaaaaaaaaaaaaaaagaatattaaaagaagaagatgtcacctcacatattttaacatcacaattatagatgtacaaaaattttatttttattcacgatttcgttattggtattgaattcgatgataaaaatataatgaatagagttgtttttccataagctttgtagttggagccgtggtggactacgacgaagacaaaatttatactgaaaaaaagtgttagaattagacaacttcttcaattaaaaaaatgataaacatagtttgattgattcaaagaaagaaaaaaataatacatactaaaatatataaacaacataacaaaatagtaatgaaaattaagaatttacattttaaaagatattctaatttacaaacccttacatattgcacatcccaatacatgtatatatagtggtattcaatctaatagaagttttgaagtggaataattatattgtaaccgaatattaattatattttttatgaattgaatggagttaataataaaataataaataagaaaggggttataataataaaataatttagaattagagttataaaaatgaaaggtcactaactttttcaactaaataaaactacattaatattgaacataaatgattaaatagaaaaaaactaacaaaagaaaattaaaaaaaaaataatgaaagagcaaatacaatatatataaatataaatatataaatttattcttttatgtatatttttatattggaaaataatatatatttataatgcttaaaattatttaaatagggaatgttattattattattattattttaaaattttaaaaaaattaaattagaaaaagtaaaaaattttaaaaaaatgccagcaaaatatatatttgaataataagaaaaataaaatgatgaaaaacacaaaataatattagattatgagttataaaaaatgaaaagtcacttattttttcaattaaataatgctacttttattattaaataataaatgatttaaagattttaattgatgaaaaaaaaaatttaaacaatgtgaaaattgagaaaacaaaaaaatggaaaaaaattcatataaaatattacctcatttttttatggtttattattattattataattattataattgttattatttgaattgaataatttattatttattaattttttaaacttacatttcgaatgaaattatacatccatatattcattgaatattgattgactaataatgagtatgaaaatcttaccaaataaatatggtagattgaagaaaatatatgataataaaaagattggtaattttcttttttgagtttaaaaaaaataatgtaaaataaatgtgaagagaagaggaaaggttaagaa

SEQ ID NO: 83945 - DNA, 682 bp, Cannabis sativa
  modified_base (149)..(150): a, c, t, g, unknown or other
actttataatagcatatacattatacatatgtgcccacataggattttaatccaacattatcctcattatgaattatattcaggaggttggaaatttacacaaattagttagaagttttacaatcatcaatatctatatatctatatanntataaaggagaagtatgagacagtgatgtggcactctaaatttactttaaagctatttttctcttctctctttaattctcttaacttttaatttttaattctatatataaaggagaagtatgaggcggtgatgtggcactctaaatttactttaaagctatttttctcttctctctttaattctcttatttttttaatttttaattctataaaaaatacaaaaatatctccataaaactcaaattatattaataataatataatattaaccctaaacatatatatctatctatatatatatatagactagaaacaaatatgatctcaaaacactacttagaaagaagccaaaaatacaaacaatagacaatgttgtctcaaccttatgatataataatatctatatatatagacacacattacctacacacacattttttctcctctttatttccgaaaaattatgcatatacataacacataccttctctctttttatttatcatgcaattactctctctctctctctctc

SEQ ID NO: 83946 - DNA, 636 bp, Cannabis sativa
gcaatcccacatcgcttggagaagatctggtgttatgattctgagattgtgtaggtatgggactaaatagttgaagagggcttaaatgaattgattggtactacctatgtaaacaaggtgctagacctgggctaatttcaggatgggtgacctcctgggaaacttcccaggaatcgtgcgtgtgaggacaaaatacgctgaaaacacttgtgtttgtttgtagggccagtcttcagtctaggaagcagccagagtgacgaactcgtgtatatgagccagtgggtgtaatggctcaatggaggcctgaagaggggacattacaagattttgttgaagtaatccatcgactacttcaacaaattggacaagaatctttggttgcattctcttcataaaataagcaacaatcatgctcaaacacatgaattgactcatagcctaaccctaatttttttagtctctttttagccttgtaatacgttgatagaattttatttcctgtcggaaaatcaagatttaacaatttcaataactcataaaatacgctaataggaatttttccacgaactttcaaatgcaataactttgctagaaagttaagtgaagaaatccaatggcgtccaggatacaatttag

SEQ ID NO: 83947 - DNA, 1135 bp, Cannabis sativa
aactttgccagtcgatcaaacttggtggcatactctgtcaccgtcatattaccctggatcaatcgtataaattcttctgcctttgcagctcggatggatttgttgtagtgtttctcgtaaaatagggtacggaaagcatcccaggtcatgttattcaagtcacgaccctgtgatacaatttcccaccagatgtgagtatcctctcgcaacatgtaaatggcatacctaacacgatcattactctcgacccacatgaaatcaaagatggattgtaatcatactcatccattgcttcaccttgagtggatcagcaccaccctcgaacactagcggatttcactttctgaactgctcgtacagtggctccagacgatttcttgcattatgtggcactaccagaggtgccggaggttcaggattaggatttggagcaagctaagctcgctgctccctcagctctcgaatttgatcactttgataccggatggtctcttgcatcgcggcatataactcttcccaattcaatggtggtggaggctcctcaccctcaccgccaaccccaagcccaacaagctcgcgattacccctaccagatcgcctcgagtgcatgaactatacacctgcgaccataactttcatatatctcaaatcatgacaatacaatactaataagtatttccatgtattcacatacacatcagtatttactatacttttctaactaacatatttcaaataagtaggtaatcaggtaataaacaaataatctaacaattaacacttactgaaccatgagtcgaatgagtcttcacagccaatgtacatatcaaaccagtcttcaggatctttaaaccttagtcgctctgataccatgttgtaacgtattgtcccacaaggacgccacatgtgttattacaaacttatttttaaaatatttttattaatttacgaaaattaaaacttttaatcaaaatataaaacataacttttataaaaactaaaccactgttaagtatggagattccctgtataaaaacttacatttattccaaaaagtggtattacaacaacaacatgggattacactttcaaaatacaatcaaaagaattcattctaggctaattagtaattttt

SEQ ID NO: 83948 - DNA, 959 bp, Cannabis sativa
aatgtgtttattaaaatttaaatataaatttataaataaaatatgtatatttattatttattatttttaccattatacataaaaattaaaaatatattttttataattaataaaatatataataaaattataaataatttttgatacatatataatataattaagcatataatgtacataaaattataaatttccctatgccaaatttgttagttagatgttgttgtttacatggaccatgattatcaaagtacattatttagatgttaaaatatattaaatcttcctttcgttgaccaaatattggtgaggtaaatcacataaaaatttgcactcaacaattgaacactttcaggttaaagaataatgagagcattaatgcaagaagggtcattacattaatggacaaagcttctccaccaaatttatattaagtttatcttaccatattataacatattgcatgttttttagatctttatatttacatcaaagtggtagaagaataatcggaaccataaataggcagagacattgtttgatttttttttttttttgctaatagattctttgatgatatttaccttacatttagaaagattatgaactaatgaaaataaataacattttacactatgtttggtaagagggagaagttgagggatagagaggagaggagagaagggatagaggtgggaggacataacaaatttctttatttggcaagagacagtgaaggagagaaaagagaagtgagaggatagcaaatctatttaaatctctaatttgtaatccctcaaataatagaaggattgagactcttcttctttaattattgtaaattacatgcataccctcaacaaatattattaaaaaataattataaggataaaatagtaattttataaattaataattatctattcttcaatcacttcatccttcctacctaccaaaca

SEQ ID NO: 83949 - DNA, 962 bp, Cannabis sativa
catcaatctagccaagaaaggctggttgggaaagagcccaccaatatagatccatctgtgcaaacacaattggatcagatcagagacataatcaaaggcctattcgacccaaagctatcagacctagagctagataggtcaaggggatcagcattcttaacatacattaatgcactacccctacctaagttcaagatgccaattttgaatatgtataccaaaaaagtagatcctttggcacacataaagtacgttgagatgcaaacagatctctaaaaagtaactagagatgaacgatgtcagatcttcccaacaaccttgtctaaaatagcctaacaatggtatttcaagttgccccaggaaggttcaactcttataatgtattctttcaagaattctatacacaattctcatcctcaagacatataccttcacagcttgaagaccttatcaaaataaaatagagaaaaggtgaacctctgaaagactacattcaaaggttcatggctgaggccactaaggttaaaggcctaatagaagaaggtctctatatgacgaccatacttggaggtattttgtcgctgagtgaattctggaaagatatcaagaggatcttgacaaacaacatgaaagagttcctcaagcaagcttattgcttcatatagttggaagaagatgtgtgggaagcccaaggagggagacaagttagtggcgggtagactcaaggtgtcgtgccacctcaagccctgtccaacatgcaggctagcacaagcaatacaaacaaggcctccaatagtaagaataatggaggtatatgcaccaacaacagctctgactaagatggtggcaaaaaagagaagttcaacacttccgttcacaaaaaaactaatgggagaaggaggagaaatacacatgcgtcaacctcctaatcaaaaatcctaaagtaatttacatggccaacc

SEQ ID NO: 83950 - DNA, 988 bp, Cannabis sativa
ctgccctagcccttaatttcacttcggacaagatatggaggtgatgaattttattatataatatatataataacctctctatataaagtgtggctatgtaacagaattcttggtttaacgattattttcttaacatttccttttattttaataaaaattaatgggagattaacgtctccgttaacttttaaatccccaatttattttcatctataattttccttttcccataaatggttctcactcccgcatgcccaacccataaaagtccaatccaaaaagtaacgatcttgaatgtgctcagaagcctgatcaaaaagtgcgatcgatttgggtgcgattgaatgacgtgcaatcgatcctccattgctgattgagctttgacctctggcaaaaaatcagtgaggtgctcaagtgattgacttcgaagatataccgattgcaccagagatttgacgatttctctatcagatatacaagaaaactaaaatataatattgttacctaaaacgtcgtcgctaaaatctgaaagagagattgtgttcggagaagaagaagaagaagaagaatgagcgagacgaggcctgtaccgaggagagataatccatgggggacgccgtagggagagcactgtcagcctaaagcccatcgttgcaatgatagagtgaaagacgtcatccaagtatgaactcccactccctatatattaataaaccatttatcctattcattgccctaatttcattgcattgttgtcattggattaggtatttactaattcaattagcgaataggtttatacatttttaatcggtgaatcatcagagtgaccttgggcttaatgggcgggtttcagatcacaaatttgttaactatttgtaaaaaaaattatacctgtgtttgttctttattagttgatttgattttaattgattttaatgagttctatatttgattttagtttattttgactatgtaaatatgggat

SEQ ID NO: 83951 - DNA, 829 bp, Cannabis sativa
tggagctgaaatgtacttacaaccttttacttaaataagtataactctctcaatctttatccaaatgacttggttcaacttttatttgaaagatattttcaagaaagatctaagtgtgtctggtaatagcccaattttaaagttatcgagctcaaaattgggctacaagataggctggtataatttactcgaaatttaattggttttgctaagtgtggaccgcaaggggttgttgggagagctatgttacaacacttgtgacctctccactttccttagccaaggtgttccattccatggtcacttatctccaattttttattccaaagcacaatgccacataagtaagttcaagagataaggaaaataaccaacttcaataactatcccaataattgtgggatatttgcctatgactatgggatattttcctagatttttatttattcattattttgtaaaaaagatgtagaattttaagtgagattatgggggataactaataaatcctaggccaatatatagataatgattggctaggatttggggatcacattctagaccttgaaacactttctagatttttcacattgctttctagacctctaatttacttggtcacattatcacttcatcccttgaaacctttttctctcttcatctttttcttgatgttcttcatactagtacgacatcaagcctccattattatatcacccttgacacactcatttaccaagaagagagaccattctctgttcttgtcttcatcagtttattgttccaaagaacattacaaccaccaatgttatcaagtttatgggtattg

SEQ ID NO: 83952 - DNA, 562 bp, Cannabis sativa
catatataataaaattatatatattataaaaaatggtgtatttatatatataattatgtcttagtataaatttttaaaaatttctgggggggccacagcccttattggggtgcatgtggctccgcccctgatggtatggtagaagtatctattatcccgaatgatattctttgtaatgaccatgaggtctgactttttattttaattataaaaacgcttttgttcaaaaacaaaaaaaaaattatagaaaatataaataatttagtgttaattattaattggagtttgtatatgaaaataggctgatttatttaagaaaatgaatggaacctattaattaactataaatgttatcattaatctcatattacaatttcttagttagctttcatatctgaaaatacactaaaatatttttttttcaatttttctttttcacgagagtgtttgttatagttacaacatcattccgtaatttttgaaaattttcaataatttacagtaccgaaaataaatttaaaattttctaaacagacggagtaaactaaaatatcaaaaaact

SEQ ID NO: 83953 - DNA, 592 bp, Cannabis sativa
tcttggaactttcccaggtaatggtaataacatcccgagtcaaagccaccatatcctaccaaaccagggcatcttccacgaattggaatgtggcacaggccactctgtcgttgccagtgacacacataaagttcattattcgtgtgatagccactgtttgactttcatcacatcgggacttccctgaaagactggaggtgcgtgcttgcggaacttttcgtacaaggttccatccaatttataatagcaatcggccctgcctgcatagaaggggtaggagccacttgtatttcaggagcaggcattgcaggagcaccctactgcctcaggtgtctgatttcttcgtcttgttcattaattctggcttgcattgatgcaaacctattttcccaatcctaggtagcctgcggtgagttaacatctccccgactgcgtgccctgcctcgtaggcctcttcctcggccacgtaaatttgggggaaactgaactccctaaccgccactagatccgaccgagttaccccgacttctcgtgttccacctggcgtccattctaatagagcagcctgcgaaactaagagctagcctggtca

SEQ ID NO: 83954 - DNA, 734 bp, Cannabis sativa
attctgttaaaccaagaaatatcgttagatagacacttttaatatataaaaatatatatatgtatagggtactccttaggtgaaagcattacttttgttttcaaaagtaagagcacttttgtagcttttgattttcaatctaataatagtaattaatttggttataatagggtatctcctccaagatgaataattttttttatttattatttaaaaaaaaaaaaaaaaaaaaaaaccacccacctctagcaatcttctttaacgggaacaatcatctcacatttctaactatttttaaaataataataataaataaaagttaatacacttatcttttaaagatcgatgaagaagtttaattatttatttacaaacaaaaattcttaatttttgctgttaagtactaactacttctggtcttagaataatctctttcattcttttttcttatatatagtgaattgattctagaataatgtattttgggatcttctttgaaagtattgatacttaaaaatgatcttaaattaagtttaaatctttttttaaattttggtttatgaaataattttatttataaaggagatccatgaaattattaatcttgatgttaaagaagatccatgaaaattatcaactttattttttactttaataagagagttttttttttttttttttttttttttgataaagtcaactttaatttgttaaaagaaatattaaaaaattta

SEQ ID NO: 83955 - DNA, 975 bp, Cannabis sativa
tgtaggattagaaacgagtatagttaaatccatacccttatgccccccaagttattaaggtttgattattatccttggtgacttttttttgggtttgtcaatgtaactatcttttgaataaataaatatttttattcaagctttgaaaataacaatactaagaatttctaagaatatgacaatctaataaagatcttggacatgaaaaataaataaataactaaatatttaactaagagaaaacttagcttaacatcaaactaaggtgaggacacacgaatgaggaggacttccctctactggtagtattgcctcaagtgctcactgttccatgctcgcggcacttgctcccgattaaggcgagcttgtacactccaggccttaagactattttgatctgatacggtccttcccaattgggtacaaggaccccagccgtcgggtcatgcgttactaagaacacccttcttaacaccaagttgcctattgtaaattctctatttcgaacacgagagtcataatacttctttacccgttattggtgagcagcattacataattgtgactcctctcttctttcatcgagtaaatttagtacttcctctaggagtaggtggttacgatgttgttcatagtattgatttcggtgtgaggtgacttgggtctcaactgggagcatggcttcactcccataggtgagtgagaagggagtatgccctgtgtggttctgtgttaggtcctataggaccagagtacttgtgggagctccttcggccatcttcctttggcagcctctaggcgcttctttaacgtagtcttcaatgttatgtttacaacctcaacttgtccattagcttgtgggtgatctactgaagcaaaactcttgactataccattcttcttacaaaactctctaaataaatcactattgaattgttttacattatttgatactattttttgtggaactccata

SEQ ID NO: 83956 - DNA, 907 bp, Cannabis sativa
taaaatttacccattaaagagtaatacccattaaaaatgcatctatatatatttttaagaaattacaaataaatattggtaatattaaattgagtcttgaagactttaaatcaccactcatattttattttgtacataatgactggttctatattttttttaaataacttataaagtattaatacatataaatatgttatttaatttttcaattgacgcatcacttaaaaaaaagtcaccgaaattcacaattgttgtatacaacattaatattggccccccctataattttattctggctccgcccctgcttgagttggtgcttttaatgctctcacctctctagccattgtgttaaaaatatgtgaaagtgtagcaaagtgtagcacatattccatgattgtattgttgacctgatttagacaaacattaattaattaataatatctcctaacactttttttcctcctaataatagaggttttaaagaggctattttctcaaacaatataataataataaaatttattaaatatgataatattaatacatattcgatatatatattacaatattcacataaaaatttattatatatacaggattaattatagataataacaataatgaaattgcatgatgatgatcaaagcattttaataggttgttgttttatcggtttggatttggatatggatctgggtctagatggattatgttctcgacaacgatcttccttcaagcaacctctttggtaaggattataaggattatatattgccattttgttaaaaatatgagaaaattacgtggaatatgatattttataaaaaaatgttataaaaatatagcatttataagtttattgttattttttttgtttgtgttcctagactagcgaagtgta

SEQ ID NO: 83957 - DNA, 872 bp, Cannabis sativa
aaatataaaatatttttaaaacaaaataaaaaattaaaaatttaaatattatttattttaaatattttttccttcaaaaaaatatttttatttttttgtaatacataataaatatttaaataaatttgtagtaaaaaaataatttattataatcttttaatcaaaacagttttttttaaaagttggattgtacggactttaacttttagctgtagctttttcataaattcttcaataaagtatattttaactgcttactaaatacctttgtgtcacggtttttctttaaaagtaatttttagcttttccgaagattatgtcaaactggccctgattttggttctatattttggttctctttatagtttatagaaccaatttatcccaatagtggggaaaatggcacaagaaatctggtggagagtggtctcatgcatccctttcggtgagattgagcagacatgagtgaacatgtggcgagctcagaacactcacatcagctgttgttgaatgaagggaaactcatgcgtgttgagtggtgtattgaacgtgggctaacatgtgaggcagttgttgaatgatgtattcgtgcatatgagaatagcatagctacgagactcattcaatgggctttcatgcaaacttgattggaataagatgggtgtgagcttgatgggcttctcatttttttcttaacttttgccaatgtattccatacattccaaatctgaatattgacacaaatttataataaattaaatatttcctatttatataatttttgcattaaacttgtgataatttgggcttctccaagaattagcctccattcatattggctttcaagctttcaaaaacaccaatattttatt

SEQ ID NO: 83958 - DNA, 574 bp, Cannabis sativa
atttggcgacactacttgcgacactacttatatgtacttatatggtgaacggtgtgagatttatactgaccacaaaagtctcaagtacttcttcactcaaaaagatctaaacaggaggcaaaggcagtggctggagttagttaaagactatgactgtgaaattttgtatcactccggaaaagcaaatattgttgtaggtgccctgagtcaaaaagggcctgatcaaactttcattgcgataatgatttctcctcagttagccttgaatatgtctagggcaaacattgaatttataattggagaattgcataacctgacacttcagtcagacttgttggaaaggatcagaatagcacaactataagaccctaaattggttaaggctcaagaagatgtcttagtaggaaaagctaaggacttctcaattttgaacaatggaatgttgttgtttaagactcgggtatgtgtcccaagtgatcttgagcttaagaaagaaattctggatgaagcacatactaccccttattcattgcatccaggtaccaccaatatgtatcaagatttgaagccctat

SEQ ID NO: 83959 - DNA, 549 bp, Cannabis sativa
  modified_base (522)..(523): a, c, t, g, unknown or other
aaattgaaaaagttatgagagttttaaaaattaattgggtggtgtccatatgggtgggtgtcgaagcttggtgcacgcacgcagcagaggctttggacaacacccatccacacgcatccttcaaacaaaaattttctgaagctcggttaggtgccttcagtcacgcccgtgtgcaccctgcagctcgcccatggacatgctgtacacgccgagatttctcggctggagaccacccttccgcgcgcgtccacggctgtgtgcagccttcctaggcttcacgtgcagccctcctgggcagccaccttatccaacccgatttttgtgggatttttccccaattttaattttttccaattttcaaaccccaaaattaaaataaaatattattttttaatatatttaaatttaaatattattttttaaattaataatatttttttttaataattattattaattttgatttattgaggtttaaatttaaaattgattatttaattttttaaattatggtcagatttnnaaatttgttaatttctttaatattta

SEQ ID NO: 83960 - DNA, 732 bp, Cannabis sativa
actataatataagagttattccaacatatagttgggctgtgcattaaaaaatgaaaggcaaagtgatatatctcttatattaaatatgattatttatagaaaattattaatttaacaatttttttttttgttaaaattaatagttaaagctaaaccggttaaattaattattaattatatattttttttaaaaaataatttcaaatatttaaatttaatttaaaaatattaacaaaattaaataattttttttttgtcaataaatcttaatttaaatttaaattagatgttaatttaattaattaatcgtagtttataacaaatttattagttatattatttaaaatatgtaaacttatttacttatttcattgtttaataaaattgattagatatatttttttataaataaatttaaaaatatattaaattttatatatttaaaaaatataattaaattatattagatttattatctaagttaataattatgtaatagcaactctaatataactctaactaaacatgtatgatactagctatatatatatttaaaaataaaaaaacaaacaaacaagagcaaattgaccacaaaaaaaaaatcatgctaattaattacataaatgtagttcgtcttgcatttcttgatgcaaagatactatagtagaacatctatttaagaatactctattcaagaataacctctaatatgttataaaaaaatcaagtccc

SEQ ID NO: 83961 - DNA, 658 bp, Cannabis sativa
  modified_base (594)..(603): a, c, t, g, unknown or other
tccattcacatatgtgctgacaagttatgctgaagttgaaactgactcatgttctctgtaatattcacaacaccatttctatgttgactataggacaagtctatggttgtttggtcacctgaaatgttcaagttgttatttgtgatgttatttttctttgatttcttcccatcttgtaataatctttcaactttcttaatgcaagtattattttttttttcctcaagaatgagccaggtttataagggggatgtagtaattatcacatcccattaggtacttatatatttgtgtataatttgttttttttttaacataaaagccacttacccaaccgcctgaaccagcttcaaatttgatttctgaatattgattgttccttagtatgtattcttatttatacaaaagctcataacactattaattctgttgtactgtgtatgtgggcatcctcaaaatatactcaatctaaaagaagaaacaagtgcatatttttcttaggaatttattcagagaaaaagaaaaaaaaattattttacctgtatttaattaaattatgtatcaaatttttagaatattattattattattatnnnnnnnnnnattattattattattattttaagtgaaaaaattttaatcaactatacaaattgct

SEQ ID NO: 83962 - DNA, 830 bp, Cannabis sativa
attctgaaggtgactctcaatctaaggacaactttaataattgcaacattgaaggacaattttcttcattaggcacaagggctctcatggatgcaagatgtggattctacccaccaccaccaccaccgccatactgacatggtgcttaggtaagttcccctccctttagttttaaatgtcacattgaggacaatgtctcactttagttttggggtgaacttaaattttaaatttttaaattaaatttttagttctaaaattaattgttttagtgtgagttaatttacttaatgcgagtcaatttaaaagtaggtagatagcatgatttgaaacattttatatattacaaagaattcatgtgcttggtgatgttatacttgtgactaatttcaattttatacttgaaagaacaaggaatcatatttgtaattttttagtaattgaattggtttatgcatgctaatttgacttgtggaaagttgtttggaaaattctagaacttgcttgcttgctatttgagattaaaaaataaattatgcatgactaggaaagtgatttaggcattttttttgggatcgattgtgcatttcaaactatccttgtaatttttatcctagttacctttttttgagcgttcacctattctttgtttctacacattttgatcatagaaaagataaacaaataaatagccaaaatttaaccttaattatttcataagtagatctttagtttggggaaatttggatggaaagttgttgtatgtgtgtgggaataagtgtgaaaattgagataatatgaaaaatatttagattgacagtaacttgaaa

SEQ ID NO: 83963 - DNA, 904 bp, Cannabis sativa
ataaacaaatcatatgaaaaactattagtaaaaagaaataaaaatatgtatttgtatgcattgtatataaaaagtggagtcctctaaattataattttttcttttgattaaatgctgtgaggatttaatagtaattaataaaaaaaaataaagacaattttgtaatttaatgtagtaaacccaaacctacattcatttttatatagttatagatttacatatataaatgttgattaaacttgtgggacactatgcctcctttttacacacacatttaatataaaagtttgaacaattaattacatgttgagtttctacgggcgaaaatgagaaatgctaaagggcaccagtagtgcctagcatcctcctatgtgtcagtatcactattggttcaactaagtatcgggtcccatatagtttaatataatagtttttagggagtatcgctagccaattacaacgcgacatgtcaagaaggtgctaggcatcactattgcctaatagcaatgctcgacaaaaataaaaacgtatagacatgacaaacaatcaaatatgtggaggtataaccaccgttgtctttacttccaaaatagttttctcctagttctagagttctctagatctagtggtatgtgtacaaatcaggggcagaaccaggataaaaaattaagggctcaaactatatattataaatttaagtgataaatattttagaaatactttattaaatgagatattcgcgataaaattttcttagcatttacatttattacacatatgattataataaaaaaaaagcagcaaaaataatttactttacgattttttcactaaaaaaagcttttatttatttaactaaagaaaaatgggataattacataaggtactattttttgtaaaaaaa

SEQ ID NO: 83964 - DNA, 588 bp, Cannabis sativa
  modified_base (532)..(537): a, c, t, g, unknown or other
ataaatacaatatggagcctatttttggaaaactcacattgtgcaatttcttggagataaattttcaaggcatgttactaggttgttgtaacagattgatttgagatatagtaaaatcacattgaggaagatttaattggatgtagatcaagcatttaggttgaaccagtataaaacatttctgttaattattctttcttttctctgtttcgattgttgctctatttgttcttgaagctcattgtttgggtttatttctcctttataacttgatattagaaaacatgtttgttgctctatcgaaattgcatttcatttcaatcgactacaaactaccaagtataatatatgatgtataattctcttcaattggttagatcaactgatttcaatcaaaatcagtggcaaccacagctgtaaatatgtgtatcgtgttagttccgtccatattttttttttttggggaattttaaagggaaatttacactcattattgttttttccattttttttcgtttgtactgtgacacgnnnnnntttacttttgtactgtttttattttttattttttttggcagtatactgcct

SEQ ID NO: 83965 - DNA, 776 bp, Cannabis sativa
  modified_base (720)..(723): a, c, t, g, unknown or other
agtcacaacataggaatgatgataataattagtcataatttttttactttttatcacaagttttgttgtaactaaaagtaaatttttttgtagtagttatattttgaatgaataaaataaaaattatgataatacatttttaaaacattctataactttttacaaattatgaataagttaatattgtatctaaaatatataagatctaaataagttgttttatattctcctacaacagatcatttgaactattctttcaacgtaaaatattatatagataagtaaaaaattaaaataataactattgatccattttttttttgttagagagtcttatattactaatgtgtggaaagataataaaatatataagaggaacatgttactcttccattgtcaattagttttgagataaaatcaaattcaccatatttcaaattctaagcgtattcataataaagaaagtggattaatttgtgtatgacagagaatacatttctttaattatatgaatatgattattattaatgttaattaatattgttgagaaccaaattatatataaccaaacctagaaaactaaagtttatatataatacacaatggcattctattatatattataagcaaaatcattccacacatatataaatggtcaactattatattatatatatgtataatgaagcatgcatgcttaataataataataataataannnnaataataataatgtaattaagggtataggaataataataatgtaattaagggt

SEQ ID NO: 83966 - DNA, 518 bp, Cannabis sativa
  modified_base (212)..(212): a, c, t, g, unknown or other
tccacaacaacgaaagtacttttttactctttcatatactaggggattccacttggaaaagaaaatgttccatactaatggattcgggtccataaccatgggttccggacaagtaatctaatttaatgctttttcataccgatggagtattcaccggaggtactgctgaacatgtacgagctccttttaatggaaaaatcaaattcaatgangatttggctcatcccacacgtacacgtgtaattaccatttgacatccaaatacgcattatatttcaaaatacaatgtatttagttactatacaatataattactactctactaattatactgtataataattatatagttatttctaaatacaaacttaatttctattatagatttacaataacttaaaatcacaacctcgatattaggtagacaattaagtctatattataacaagcaccaaatacaaaataagaaaaataaaatacaaaattaattgaatagcatgtgtcacttagaaaaaaaa

SEQ ID NO: 83967 - DNA, 869 bp, Cannabis sativa
tatacaaatttgatcttttgttttatatcattatttgtttggacaatgtatttaaaagtgaataaatactattttggatcctgtattttgcaaaagttattgattaatggaccttcattttttgttaaaataaaacttaatatatagcccaaatctagaggtgtatgacaaaataagttataattttctatatctatttgtattaaaaattatctttaagttagttatattaaaaaaataataacgaaaattgagctcatgaggatcctatttatactattttaaaaaatataaggtctattttatcatttaacaaaatagatcatccaatagataacgttaacaaaatacactccaaaatagtatttgctctttcaaaatatactttgaatcctatattttgtaataataaaaataaaaattagacctctatactcgaattttgtcaaaatgtcttttagtaagactaaaatatttttattacaatcaaatttaagagttcattataattatatgataaaacacaacatccaaaaattaactttttaacatatatgatccaaaacatctataatcattttttcattagtgaaaaataaattgagagatttctcattatatgtataatattaaatattgtttgtgtttttatagtagctagtttgttaataatcatgtcaaaattgacatgaaaatagtctaaacagtcacatcaatgattttatttgttacatgaaatagaatttaaaagaaaaattactttacaactctataaatagtttctaaattattttggagctaaaaaatatatgaacacaataatgcataattcctacttccgtgagaaaaaattataaatagcctttgta

SEQ ID NO: 83968 - DNA, 1113 bp, Cannabis sativa
gttcaggatccttctccctcagctgttgcacaaactccctctgcatcagctgctgctgcacaccaaggacgcaacaaacgcatgagaccttattgtaccaattgtcacaaaccaggccatcttaaagagaaatgtttcttcttgattggattccctcctggctatggcgataagaaaaagactgatcttactcaaccttcagccaatcaagcctcggcttctacagatcccctatccctattggccaatatcaccaaacaagaagacattcagaccttaatttcccttttgagtcaaaaattacagcccacttcttccactgcagatatttcacagccatttgcttccaacatttctggtaaatcgacatctctttctcaaaatttatggattgtagatagtggtgctacacaccacatttgttgtaatattaatcttttttatcaccttaacaataaacctactgctacatcaaactacctactggaatgtgtatcaccatcaaacaatcaggcagtgttcgtttttctgattctttaactctacacaatgttctttatgtccctgaatttcagttcaatttatttagtgttcccacttttctcaacacattatctcatagtgttttctttactcaaaattgctgtcttattcagggttctcagaacaagaagattgggattgctaaaagagtcggtcatctctttttcttactgcagcaacctgatctgtcttccactatttttcagcaaactgtgtgtaaaaattcatgtaataatgtccattcttggcatgcccgtcttggacatccttctatggttactacaaactttatcaataaaatgcttcatttcaaagattctaagcaagccttaccatgctctatttgtcatttagctaaacaaaagaggctgccatttccctctcataatacttttgcagcctctactttcgatctcatacacatggatatatggggcccttttcatgtacatagcatagaaggttttcgttattttttaaccatagttgatgattacagtcggttttgttgggtttatatgttaaaatctaaagctgaagttcaacagcttatacctcaattttatagct

SEQ ID NO: 83969 - DNA, 653 bp, Cannabis sativa
tcaattcaagctcgttttgaggcgaccaagaatttcatcaatgcacagattaaacctcatcagaacgtgcgtgatcacctactctagaagactagttactttaaagaggctgagaatcatgaagctgttatagatcagacaactcaagtgagtttgatcttgtatagtttgactccagcttttctgccctttacatcgaattatgtcattaacaagttggaacttgactttcacaagttaatcaacaagcttcagacatttgaaaatttgactggaggaccatagaaaggagaaactaaagctcctagttctggcagtgctaatggtacggccaaggctgaggcaagcatttcctctacttcgagacccagcaacaagaagaattggaagaatagcaagaagcctcttaaagatgttaaaacaattaaaaagtaaaggctgctaatctcgatgcaaagcaaaaaggaaagtgcttctattgcaatgaaaagggccactggaaactccagtgccctaagtttctagcaatgaaacaaggtatttctatctatgctataaactcatgttttagagaattattatcgacttggattattaattctagatctactaaccatgtttgtttttttttcttatttcagctccagctactt

SEQ ID NO: 83970 - DNA, 1790 bp, Cannabis sativa
tatatacaactgacatttgcaaaaacacggtttttcagtccataaattacgaattcatattcatatttttcttatgttacaaaatgtgtatttgcgtattatttttgatataaatacatattattcacacattaatatgtaacacataccgcattttatataacatgtcacatatatcacatttattataatctaatattatattacgtggtaaagaacaaataatataacaatatatacattcttgtacatcaatctaatttttaaaaagatccttaatttcagtgcttttctcaataccagctgcttgaaaaaatggcggagtatgctcaccaattatcatccttaatatagatgctatggacccatttcacctatattttagcccatatacatatttccctattacagctttgtttcatgcaatactagtattcctaaacctgagtcccccaaccttctttgatgtacaaacctgctcccaagcatctgcactaggccccaaactatctgccttaccccaaaaaggcacgacaaagacaaatggcattgatttcctttagcactttcctttaacatgacagataacatttctttaaagttcttctattatactataatggacaccattgtttaacaaattacagttatagcttttcatgtacgcactgagaacaaggatacatctacatggacattttcaaattaatttgttaagtgatgtgatctattttttagtcttgataaaagagagaaattgatgagcctgagatttgcttgttgtgatgaggaacagtgtagaactgggaaaaaaatcacctgtcccaaatatgctgtctccaccctgtcctaccaattaattacagccacctcattaatttaatttaattattcaataaaaaattatgttaaccttaacaactaaactaacagaattggtattctctctccacattaattgctaacttttttctttccaagaatataaaaagttttttttttttgaaaacaaagtcttttattaattaacttctcctaaattaacattatgtatagttatagcagtatatataattatttatatttacactattaaatttctttaaggatattaattaattttaaacagacttatatacatatataccaatattacgaatttaatatacttatatgtttatataaatttcatctttagtttttttttcaaaaatcttaaaatatattcatttttacaaattactaagactttttatatgatgtattcatttatgaaaaaaacaaaataattataatttataaaactaattaattaaatccacaccacaatgatataaaaaatataatatgttctaaataaacatttcacataatcataattgtgaattacatttcaaacatattaactaattttagtattcttgaaaaattacttgttttcaaataaacccagtagatgccttctcagcctgtatacatgaacaattaaaattttataagaaataaaataaaatatatcatacataattaattaaaatcaatactttcaaaaaaagaaatcaatatacctgtaaaagtaattcggtcatgcttgctcttacgtttaaaatttcaggtgtatcattaatctgtaaaaaaaagatcattatatatataatatcatctatataaacatcactcttgataaaaataatattttaaaaaatgtataaaatttgttacatgattatgattaaatgatggtgcggagaatgacaagtctgattgagagagtggtatataactattga

SEQ ID NO: 83971 - DNA, 1453 bp, Cannabis sativa
  modified_base (1404)..(1409): a, c, t, g, unknown or other
ttttattaatatatgaaagtctatttatggttgatgctactcacggcaagcttttatgatttgccaactgaaatattagaggaaatcttgttcttggtacctgctgattttgtgtttcagtttaaatttgtgaacaagttttgttattctcagatctcggctttcatcaaacacccgacatttgtttccaagcacatcggaatgaccaaaaaccagtcctatgtgtccttatttttcagtcggcctttcctccatgttgatgataatgtgaactatcaagttataattgtcatgtgatattaatgtgctttctaaatataacaaatggaaaaaagatagttttatggagaagagaatttatttatttattcgatatttcagatagagatgtccaagttatcaaattccagtatcctccccatcatcagcttcataataggtaattgatgtttttatctaaataactttactgcattaattaattattttactgaattagttgattcttttaggtggaataataacactcgacattagatcacggaggaaaaaaaatctggttcttcacagaaaaaagttgtgaatgaagttacacacgaactccctcaggatgtgctggaagttatattttcaaaattgacagttaagtctagaatagttgcagccgctgtttggagagtgtggagaaacactattttgtctttgggcctagaagatggaatgtggtgggtgtgtgaagaatatttaggatgcaaagctatttggaatgacagcttgggagaaagattcaagataaattttgatctgttagagctccaagaagatgaacaatattttcaaagatacatgttcgcaagtggctgtgaaggagtgttttgttttcaaacggatggtacacataaggggcgcaaaattctaatcagcccttttctccagcaggttttaattctacctcctatcctcatgcacatgccatacgaaaggatcagaacaacacttggtgttggtattagtggcaacaacataattaaagttgtttgtgttatgagtaccttaatggaaactactattactagcattgctaaagttttcacggagctcaagaatggaggccagtaccctgcccaaacaacatgcttgtatgtacccacacaatacctatatttgaacatggttttatatactggaatttggctaagagcacccaacttctatgctttgatgtaagcatggaaatctttacatttgtggctgcaccattgagaggtcctctaatagatttttttggaaaagttggaatatcaaatgttgttgacgttttggggtttgtaataacagaaaatgatgtaaaaaaggatgatgatgcagaagaagaagaggatgatgatgatgaagaagaagaannnnnngaagaagaagaagaagaagaccaattagttgatatttacatgtc

SEQ ID NO: 83972 - DNA, 712 bp, Cannabis sativa
catgaaaatatatataagtgaatttttctaattcaaatttgctaaaaattaaaattatgcaaaacatataaaatctgggccctagatatgaacttagccatgatcgagcctgtcatatatatttataggtaaagtacacatatatgcttaagtttttttttagtgctaataatatgttatttactatgtgataaagacatgattagctaaagaaaaacaaaaataaaagatattaacattacgtttgataagaaaacaaaaatggtttttacactacatactgaaatttttaatttttttaataggcaaatttttttttaaaaacactgtgtactgtgttaaattttctctgttattccacggttgatttttaattgttttactgttgtccttaattgttctgttttgttgtttcactgttatttataaaaagacagtatttttgtaaaaaataattgtgtgggtgtaaaattataaacttttacaaaaaaaaaaatctaatatttttataaaaatcccaaacaagaatgaaaaatgaaattttgggaagtaggcccactaatactcaaactcacacttactcaagtcaaatctatactttacatatggcacaatccttaattttttgatctatttttagtcaaagtcaaccctatctctaactcaaaactactgtgaggcgtgagcaaaccataagatatttctttaaaat

SEQ ID NO: 83973 - DNA, 1769 bp, Cannabis sativa
  modified_base (1740)..(1743): a, c, t, g, unknown or other
ataataataataataatcaactatagaatactaaaagtggatagggcctccacttctatatgctttttatggtgcttagtctcatttgagattcagccttctcataaaaaaaaatatatttttagaagtaagaaggcttgttttgtcaattacagttagcttcgaaggttaaaagagattttttacccataacaagaacaactttggagtttttttcttagcttttttgaaaaaaaaaaaataggaaaaggggaagctgaactagaactagttacaactataggttggaaacattgtatgtgaaatgggtatatattaactatataaagtgatttttttaaaaaaaataataaaaaaaaggagaagaagaagttgatatgacctaattgtagaggataattgtgttgagagaaagaatgtacgtagaaaatgaacaagaaaacaatgagtagggagagagagatagacaaaaatattcatgcaagtccaaatcgtaaaatataattaataaaaatttgaaaagtactattgatgaaaataatgaattgtacaaaaaaaaaaaaaaaaataccgtacaaataaaaatgcaaaatacattatattttagtcatgagtggtaaatttcccatttctttttggggatattacacggtaagtgtgggaatgacaatggcgactagtggttggggttagtatttattgaggcttggcttataaagaagatctttagaagcttattaattttttttttggatgttttctttacagatgatatacttttcgtaagattttcgaattattgttgttgtttgtatagtgtgaatatgagattgtttgtattattgttttttgttggtgtgtatatgagataatctcatatttgagatatatcttagatccataaatatatgtacttttttaatgtgatggtttaaaaccatcggctatagtgccagttattgctgattatttcaatagccagctagagcatttcccaatgattttccatttatacctattccacatagttttgagacagtcggataggcgccaatcatagacattgatgacaataccatactcaattatttttaatagtccaaaaatctcattttttttcaatagtgagctcaatcttaatcctccagtaccttcccatctaattcagttacaaagttgtagggctagttattaattgtatattgggtgtgttctattttattaatagactgaaataaaattgacataaagtgagatataagcaatatgatataaatacaatataaatggaataaatgaaaaataaatatcaagtttagaattcaaatatgatgcatgagcgcatttaaaaaacattgaataatttagaaatttcaaattatccaattattaaagttccaccttagtgttgatcaaattaatatcgaattgcaacaccctgatacttagacgcactatagtaattttctattaacgtgccacctttgctcatcaaaggattttcctaaaaaattgtgctaatttagactattaaactttataaacatgtatatatctacttaaattgggatcccgtgtttaaacttttacaatctttatcaaaatacttttacaatccttatcaaaatacttttacaaacatgtcgcacagcaactacaaaatacaacccaagttgtcccgagactgaacacttcaagttgcgccatcttgacatgagtcatctgttgggttttatgccnnnnataaaactctttacaatctgattagt

SEQ ID NO: 83974 - DNA, 705 bp, Cannabis sativa
  modified_base (238)..(239): a, c, t, g, unknown or other
aggtaaaatctagagtgattatctaaagaatttaatgatataactcatatccacccctgaatgtacatccacatattgactctttgcagagaatgatcttgtcaaaaccctaatgaacaagatgttgatgccatagatatatgaattgtggttatgatcctttgatgacttaggtctagttacaataaaaagttattagaatagtccatatggaaagaccgcttagctttaatttggnnattagcagataattagggcttaatgatgaaaattatttattataattgaattatttatttatgatgatttattgaattcagaatacatttttaggtcatatatagaaatttcataattttacatgttttgtgcccgacaactttggaacacggtgtttggctattagaatcacatcctagtatttttagtatagcgggacaatataattagacattgggaatgtcgagaatagtcaaaattttagaatttcccaaaatatcccaaagtgaccttttatgacttttagtgtggaaagggcaaaatgatcattttgcctaaatgacttttgtcttttagtgagttttaaaatagggtttaattttgaatactaagttgatgtgattagataaactcaattatttctcttcattttattaaaaatagaaagtagacgaaggaagttcttttctctcaagctctctctct

SEQ ID NO: 83975 - DNA, 521 bp, Cannabis sativa
  modified_base (470)..(489): a, c, t, g, unknown or other
tttacgtctgacacgtgtcctcttatgggtattcctagagacatttttcccatgccgcattaaatacgaagtgactattcacctccaacttaactggcccggaggagtttattcgtccttcacctcccggagaagaagtggacctatttgctcatgttcgagagcttgcccttgaatcataattattggttgaggagatttagttaaatcttctattcatctccgagtgataggcttctacctgccacatgtcccacattgcagctgccgcgtatattaggagaaacttgaggtaaaatttaccctccaagtcttatttagtcgtagataaatgagacttgtacactgtctctggcttcaataaatgtgatgacacgtgccttaggtgtgtgggcaataggggtgagcaaaaactccaagaaactgaccaaaccgagtaaaccgaccgtctgaacaccgaaaaaaccgannnnnnnnnnnnnnnnnnnnaaaaaaccgccttcagttaaaaccgccttaac

SEQ ID NO: 83976 - DNA, 859 bp, Cannabis sativa
  modified_base (228)..(245): a, c, t, g, unknown or other
taatttattaatatataaatttatacatataatatatttttacacataaaaatataaaattaaattgataatttaaatctgctgtcatcacattattcgcttcaaaattaaaagagaatactattttggactatgtgttttgcaaaagttactaattggaccctctattttattaaatgacaaaatagaccatatattttcgaaaattgtacaaatagaatcatgaannnnnnnnnnnnnnnnnnaataaaacttaataataatatgatttatagatgttatgacaaaacttgttatattttctgtatctatttgtattagaaattatcttaaagctagttatattaaaaaataaaattgttgaaaattgaacttagggtcttatttttatcattttagaaaatatagggtctattttgtcatctaacaaaacatagatgctaattgaattttacaaaatacagggtttaaaatgatatttactcaaattttaataaccttttaatatttatgaaatttttattaatataacttatattttagcaatagatcactaatttgcatctctagttgtagtaaaattgaagtgaagttgaacggaaagtttttaaatctaacaatttcaataatttaaaaaaatttttgaaacgaaacgtagtttagtatatgtgaatgtttggggccaaaattctaattagtaattactacaattaaatgaaagctacaatcattttgctgaaaacccctctaatttacccatatttacgaaaatgtccctttcttctccgtgagaaccagaaaaactcagttcactcacttctctctaaaccctaagataaacccaagaaagattcgaact

SEQ ID NO: 83977 - DNA, 692 bp, Cannabis sativa
tggccctcttgtggggtttctagaattagaatggttaccttttgtagcaatttgtgttttggtttcccttgtattcctcttgaaaaatcatgttaggctccttctagtgtctagctttgctgcaaaatatgagttcacatagccagtgatttcttctttgaactagttctctttactgaacacaaatctagtgttcaaagtaccttgcaggtacctcattgtctattttagtgtttcccaatattcagggccagggtctgaaatgtacttgttgaccacaatcatagcatgagctacgttaggtctagaacacaccatggagtacatgagactcccaacacaacttgcacaaggaactttgctcattttgactctttctgcatctttttctggtgactacctaataagatgcagacatttttattgtatgaaagatactaatccaaccagcccataaaactggagactcaagcaagcaaaacaacactcataaactgaaaaatataaatattttttttttcttttattacactttattgttgttcttcttcttatcttttttttttctagattttatgattcttcattccccaccacccaccctcactacccaccatcaccaccacaataaatttttcacatccaaaccacacctaaaaaaacttgaacaaaaatcaaaccaaaataaacaa

SEQ ID NO: 83978 - DNA, 633 bp, Cannabis sativa
cccacttgcatcagttgggaaacaaatttccccttcaacgattcactgacagtatgcacaaacgggtcctcttcatcaggcagccaaggatcttgcagaatatcaattgtagatccagaccccacccttagagcagcaccctttttaatcaaaggaagagcttccatcatactccgccaaataaaacttggattccctcctatctcagcagccaagaaagagcaattagggaagtacctagccttgtatatttgactcacaagagaattaggatacgataataaccgccaagcttgttttcccaaaagagccacattgaagtcataaaggctacgaaacccaagtcctccatgagatttgggcttacacattctctcccaactcatccaatgaatactcttatcttttttagtgttggactgccaccagaacttgcacatgatacgcttcatttccttgcttgtttcggctggtagcaaaaaaacactcattgcatagttcggtagagcttgtgcaaccgtcttcaatagcacctccttaccagctttggataatagttttccttcccaactttgcacccgtttctgaacacgatctttcaagtatccaaggatagcagttttcttacgccca

SEQ ID NO: 83979 - DNA, 2114 bp, Cannabis sativa
ctgattaagttggtatttttcttttttcaggttttgtaaaccgttgcatatatcttctgttttttatttatattttttggaaaagaggtacacactttcaaatcatagaggtatttttgtttattttttcaatttattatgtttaagaaattaagttaaataatattgattacatttttttttactatcaaattaacaactaaattgtttatgaaaatgttaattaagaagatatttttaaaatagttttgtaaattataaatcaagattcaaattattggttttttcttttatatttttgaaatcattttatttacaaaatatatttgttatgtttattttgttaattttcgtaaaacagtaagcacatttgtgttcatctttatttatttatatgaaggtatttaaaatgaaaaatcagaagttcttagtgttcctttattttgtcttatatttgtaaaaataagaaatctgaaagacatttttttgttgtatagtttgtttctaaagtaactttcttctcttcagtggatttagaattgcttcatttttgcaagaccgtcgattatgtcctttttggttgcattttccacacttgacttttgtttttgtgtccattgctcctttatatctatctttctttggcctcccagctggtcttttatattttggtggatgtactgtgatattcttcacatcctctggtatattccatgatgttgcttcacctaatggaagtatgctatcctcatatgttgacatgaaagcttctttagtgtagtagtaggagcagtatttgtagcaagagaagtttcttttggctagtacagccattgcatgcgagcaaggcatttcgtcatagtcaaacttctgacacgtgcatgttttgttttccagatttactatgtaggagcttgtataatcgtgcactttgtatacaagaaggttagctgtctcaacctgcatgaagaatttatacaggtttttgttattatatttttttcagaaattatttggtttactgttaatgtttttttttatatttttcaaacaaattataaaatttaatttaaattaatgttaagtgtaccttgtattttaagcccatttctctttgtttttgagagccttttctggaatatttgccaaagtagtgtccgttttcaaggctctatttttgttttcccaataccatctttgtaccaaagagtgtagacattctagtaaggttgcaactggtaattctcttactgatttgagagctgcattcactgactctgctatgtttgatgtcattgttttgtatcttttattcatgctgtatagccttgtccatttatcatatccaacttcattggccaagaaatctcttattcttaagtcaatgttgtccaaatcttgcatgcatttctcaaattcttctatagtgtaagctttcgaagctccatcaaatgcatgtttgagctcatctcctccttttttgaatttcatttttagatttttgagcaagtgatagcaacataccccatgcattaggagtgggaagtttgactttgttgctttgtatatactctcatgcctatccgagattatgcattgtccttctctttctccatatgtttcttttattttttgcatgaaccaattccaggagttgtcattttcagaatccactattgcgaatgcaagtggaaatatatgccgatttgcattttgtgcatttgcagtcaatagagtacctccatattggtttgtcaagaatgtaccatctgtgactattattggggtgcaatgttgccaacctttgattgaagctcctatagcgaagtatagatacttgaatttaccatcttcaatcagtaacaaggattctgttgattgttcctgttacataagtaactttttagtttattttattattgaatatttttgtatactactgttttgaatatattttgatgtttttttatttaataaattattattaattttttttttctatattagtatactattaagttttttgatttacgatatgcaagagtataaaaagaatacctggattggatatttgcatcatgtataatatggatggtatttcgccatacgattct

SEQ ID NO: 83980 - DNA, 572 bp, Cannabis sativa
agctcgaaggaaatcatcatttcacttctatgtccagatatatagaagctatagattccgtatctatgattagctttcttactcagttgaattaccatgtccttaatctatatatcacgagaagatctattgatcgattttaatgaatagattgaagaacataaataatacaactaaactagaacctaaccatctcaggttctatgacgggatcccagctttttgtatatttactaaagttaaaagttaaattaaatgcttaaatttgacacaaatttcaagaaactttttgattatcaaaggcgtacatagcaattagaaaattattgtaatagtcataaacaagtagggcattacacgaattattcttactaattatatgtcaatgacatgctgatagccagcaaaaacctcagtgaaattgacaaggtgaagatgttgttaagaaaggaatttgagatgaaggatctaagaccaaccaagaagatattagggataaaaataattaaagacagacagaagaggcaaatcaaattatcttagaaggattacatctcaaaggttctaaccaa

SEQ ID NO: 83981 - DNA, 804 bp, Cannabis sativa
aaaatttaaaaaattttgaaaacataaaaaattactttcaatatttttaatttttttttcaaaattaatatttggactctgatccgaacttgtaccttcactcggggaccccgcttcaaccccaaacccgatttcagactcgacttaattaaaatcaaaaaataaaaataaaaataaaatttacagaaaacactttctattctatttttaaaattgaaaataaaagtgcttatagaatatatttttatttttaaaaaataaatttttaaaaacaaaaattgaattttatttttatgattaaaaaagtataaaaacaaaattactatcaaattcccttaatctaatatttttgatttagttgtatacacatgaaaaaatccaaaattttaaaatattagaccactttctttcctttccattccatttattagttaattttacataatcttaagcaaacatcaaaataataatgaatcatcatcttacaaaacattatttgtagatatactaacacagtagcttacaataaatagtctctttcaacaaaaaaaagactgtcgtttcatcttgaccatgagtcaattcatcttgttctcagattgtcgttctgtttctcttcatccatcttttctctagtttatagatcagttccttagtatctcctcagtccattttgtgcttttcctactgttcttggtaagtttctttcttaaaaagttagcttttgtctcttcgtggttgttatgggggacaatagtaacccacgtaaaaacttaatagaacggtatctctgaaaagtcaaat

SEQ ID NO: 83982 - DNA, 542 bp, Cannabis sativa
gaaaaaatattaaaatatattatatatggagaaagaaagtaataatataaattagaaaactaatatcaatatgtaatctttagctacatttagctattttatttaagatagaatagtggatatgtaagagcattctctcaattctatttttttttttttaataaatacttaaatttttattttctgtatttcacctcaaatttttttacattagagcactctcatcagtttttctactttatcttttaaaatacatcactaaaaaattattttttttattttaccttaaatttttacattacaccatatacattaccaaaattcagcttttttttttttttcatattttaatatattatattcatttcaaacatataacaaccctatttacacatatcctcacataaaaggtcaaactaaaaccccaaataattaataaaatgtatttagagcaatgaatattattttataaatgtagagtataaataataaattttaaaaaagctttaaaataaataaagagtttaaagcaaacttctcta

SEQ ID NO: 83983 - DNA, 514 bp, Cannabis sativa
aaagtgtctcttttcttctcttgttctttatagaggtatttataggccaacttctcttcatgtgttggcttcgattgatcatctttgagtgaaatctgactgttagattggtacgtaggtggcatttttcccatatggcatttaagggtgtcagatcgtacaggctgggcctcatactcgtgtcatcccagggcttttcctttttgaattttccttatccctagccgttggatcatttggtcaggtagataaagacacacatgctctgtacgatagtgtgtcgtgggagacaatctctgacgtcgtacttgaaaaagtttggtcactagatccgtagtctaacacgtacaagcaaagtctccgcgagctaagagtgtagcttggtacggcgcgtctcaaaatgtcttggtccttttggaaacacccatactcttctcgagagttgatggctttggttcttgggagtgaggaagacttcggctcacggataccctccgcgttgccagcagtcagg

SEQ ID NO: 83984 - DNA, 749 bp, Cannabis sativa
gattccccactacaccctcctccccgctcggcctaatatcacaccgctccccacctgcctgatgctccaagaaactaaaagaaccttctttagaccttaatcctgccatgtcaatccgatgtctcttacccgaatcaccacttcccgaatctccattgctcttattattcgaatgaactccactggcttccccgaaagcatcattaacccctgttttatcaacccctagaagacagcaaggcccctgactttcggccacaaattcattactacgaggcccaaacctcgtggtcttctttctcttggaaccactaagatttcccatctccgaccgccgcccaaagaccggaggtttagggactccctttggcccgatcaactttggtttcttaagcttttggacttggaccgacttcccaccgttggaacccgaatcatcaccagtggccccaaacttgataggactgagtttctccttaaatatattggccacctacaatacatgtttggaagggaactttgatagatccacatagtcgttatacgcaacagagaatgagttatccgatttctgtgagaccaccccctccatgccttcacgctcaaccaaggtgttacccacagtgggcttctcaccacccagaccagactccccagccccattcaccttctcagagacggccccgatgctaataccagctgggtcttccttttccaggcgacggatatcgttaatatcttcaacctcc

SEQ ID NO: 83985 - DNA, 907 bp, Cannabis sativa
  modified_base (859)..(859): a, c, t, g, unknown or other
gtctttttcgtgtgttttgatccaccatgatcggtttcccgattgtgctaaccaaagcacttaggcttttggttccccagtattgaagccccaaatcgtgaagtctaatccacaatggaacagtgcacaccaggttcattgcattcaaatccgttgaccagggtcgaactatcactggttttcgatcgaattgcacaacccctgcctccacaacctgatcacgagttgcttcatcattaaactttaccataatcagtcccatggatagtttgcttacctgaagaacacccaaatgcccccagatcctcttcacgaacccttcaaaaatcgtcacaggtgggtttgctcccagcactttgcaaataactgctgtattccagtttttttcctcttcttgcacttcgtccaagtcgacttgtgcgattttgatgccatcccgaattaatggttcagtgaacaaaagtcgctggtctcgaatctgagttttctccttcgtgaatgtctcccagattcgtttagcagagcctggagattgctggttatccaatctcaaattccgatcatcttcaacctcctccgcccaactcttggttcgactactcccagatctgttgatctccgtttcttgtgtttcttgagaacgagccatctctgcagttacattcagcccatctacttcatgtgaatcaacagcagtgacctcttcgatttcatccatgccttcgtttcctgcagcaatctcatcgtcaagtgatcgagtgactggtttccttccaacttttttcttcctcgccatggagggagaaagctgagagaacgaaacgtcaaaattacttaaaatatatttttttttatttanttatttatttaattatttattttcgaaatttaattttttaaaattaaa

SEQ ID NO: 83986 - DNA, 701 bp, Cannabis sativa
gcatatcatggcatcggtgaggtgtacataaagttgcaccaagatggcaacagatatatgctaggctatcagatagtatgagttatctgctaccacatcagtacgactaaagtaatcagtatagactggatttgtagttagtcatactttgtcaagaacgttcctgactcagttagggttatggttgggtgtatgagagcctaattataatccgggttattgcaaggcttattttgtatagtcgctaggcgacaaacttttgtaacttgcactatgaaacatttgtaaatattttataaaacgggatcccagtttaatacaagcatatttttggtatttataattagttaaataaagttttaattattcacaattttcaataaactcgttgattagcaatgagctgcacaatttagttaaaaatcacgttaacatgcctggactagtagggtgttacacatatagttattcatgattatagtgttgtcaacacaatgcactataatcgtgattatatgttcaaaagtttaagtctcatgatttgtcaatacactagatttaaactaacatgatagtcagcgataaagttgttgggttttgtgccttaaataaaactcattttaatataatcaaatttactaattaatataagttcagaaattattttatgttgcattgttcacatgattaatttcatgatt

SEQ ID NO: 83987 - DNA, 2341 bp, Cannabis sativa
tatttatggtatatatgtgccctgtgaagtttggagtgatttggataagttttggtagtgttagtgcgaaaattgagattttcgagtttcatcgtttttagaaattcttaagagagcaaaaatcgtatttttgccataacttttgactcgggtgtccattttggacattctatataccgttttgaagcttgaaacgagctctacaatatgttttatgttttagagccaaaatataagttttattgtaggtcactgtagttctaccaagaggaggctagcttttggatgtggaggccaccctttggcaagtggaggacaactttgtacaccgtttccttgtagaggtcaggttcccttggtcgaatggaagctcccttagtctgaaagtcacttttttgctagccaacttgttcccaaatcttggccgccctataggctcatcctagtcggcctataggcttctcttggccggccaaggatcttggtacaactccttgagggctggcttcactccttttgattgctgcttaacagttttgtcataccttgtatggagaccctatcttgctacttgcaaggttatattcaacctgtactttgtctttggcttacatggacatgtcacgtcagatggacaaaatttgggataaaatttgcccccaagtccctgttcgaacatttagtcggatagggactttctagctctgttttatttgtagtagtctccatcgagcagcctcatctagccaagttggccttttgcatggcatgcttttagatatttaatcttctctctctctctctctctctctctctctctatgtatcttgtcttctcttctttcatacctcttctttgtacttgccattaataagtttcaagctttataagcttttggaaactttttaattctcatgttagtttgcaatctctttggtatattgatcctcatgacagttttggaatgtacaatgtgtgaccttttgatggaaaagattcaattttggcctttgttaggattcttgactctctgagtcatatagaatatgagacacatattcgagttttgaaagaaaaacacattgggatataaaaattaccttcgttgacctgggaggtcttgcttgagacatggccgaccctaaggcttaatcatgggagttgaccagctttagggttttaccctataacgctagcatgttcatgcctaggtttggtgaccttggccagtttttggccgagtcatgggaccctagccgaacctttcaaggcttgagaaccttggcgagcatgggcctttgttctaactgggtagctaattttctgtcctcttttgacttcggtaagaatctgactctataggcatatacaaccttagtctcatacatggtttccttggaaactctgtatgaagcttaatggtgagtctattatagtcgaatgttcaacttaagactcaacatggcttggaacctgtaagaaactttgccttagcaatagcccagtacatggcccctatacgagctatgtccagttcttttttgactacctggttcttgcagggccttggcctcatgcacgtgaactgatttcatatccggccttaaggctttcatgttcttgctttggcctataggccctctattttcaaatactactattatttagccttaaagccttttatgacagacatatggtcgtcctgactatcttcttatggccttgacatgtaagggttcaaatttactttttcaagttgaagtatgcctacatgacttagaggcatgttgtttagcttattttaagcgttaaaatttctctacataagttctttatgctagtttgatgcattgtacagtgtgggtgccccccaagtaaccatacaaaacttaggtctcatggtcactttctattcactaagcttcttagaccttgccaaggacatttcttggggtgctgcccatgttacgcatgtggaactgaaagaataactttaagaagttaatcttgttagcaagtggtttagatacagttggtcttacgtgtaacaaaagcttacaaattagtgtccgcttttgaaatcacgtagtggctacccctacacaacttacttctcaacggccatcactgaagagtgatgggaggccatgctgaacaacaatgggtactagctcttttatgggttcctgcacagtaaaacgttagaggaactaattgataagttcgctagtgagagtacttatcgagatattccctattttagtgtttgggtagaagttcctgttgggttttgtgccctaaataaaaccagatcggaagagcgtcgtgtagggaaagagtg

SEQ ID NO: 83988 - DNA, 536 bp, Cannabis sativa
cttcgatcgtgtatttgatgattagagaaacgctatggtgacgatcgacttaattttttgtgaaaattgtggtgatcgatctgaagcttttttggatattggcatgcacgatcgctgtgtttttttttgcagatgtaggtgttaaatcaaggatgttttcacaatcggttgcctttttttttggtttgatttctggaatcgagagtttctgatgatttttcacaagatcggaccttccattgttgagttgcagagctctaatggaggttctgtacattgcttcaattatttttctggtgaggttaaagtatatataggagttactaatagtgtattgctcatcttttttttccattttttcagggaaatttgggctgttgatgtcggttgtttcttcacccggagaagatggtggtttcctaaaatcacgtatattagtttccgttttcggtagggacataaacggtatttgctacaattaatgaccgaaggttatattgctaattttgttacattttaggtatattactaaaaat

SEQ ID NO: 83989 - DNA, 880 bp, Cannabis sativa
tgacaaatattaactttagagttatcatttagaatttgtttggaacatcttataattaggtcgtattgtattgtattatattgaattggattatattatatttttatgaaaaattatatgtagtattaacttttatatatgaacacctaaatatataattaatattttaatataaattaacatattatataaaaatatgatatataattcaaatcaatataataaaatacgatattataccacgttccaaacaaaaccttaataatactgactatactatatattcaattacactatatatttaaaatctctaatgtatatttggtgatttaatctaacgattagaacgcatagtatatatcaaatggaacctaaaatacattccacattacaaagcttatagtacaagaaaagaatgtatatattccgttttttttttttttctaaataaaattaaaaatacattcctaaatcataaatgggatataaaaacttattactacacactagaatccaaaatttggggttactatcaaatttctatggaccaatactgatgacatattaaaggttaaattttagtagtgtgtttttcaaatcaaataataattaaaaatcactcaataaaaaagaaagaaaatgaaataaaacctttttcccattatctctatagattattagtttatttgaaaaaacatatgtttaaattgaagaaggaaaagaaaaaaaaagggaaaaagttaatttcttaggccaaattgcactgttaccttcttgatatctattctatataaagtgtgtctatataaccgaattcttggtttatgagaaattcgtgggtgacttttatttatattaaaaataaaataatttattatta

SEQ ID NO: 83990 - DNA, 711 bp, Cannabis sativa
acttttatacaaaatacaaaaaatgcataaccagatcgcacaacaactataaaataataaccccagatgtcccgagaccgaacactctaggccgcgctgccacgacatgtacaacctcatctcagcaaggctcacacttgttcagctatcgcctttcctttacctacacatggaagtagaactgagtcgacaaattcagtaagaaaagcacataacatatcatataatactgagttttatctaggttcccatacacctatttagaaggattaatagatgagtaagaatgttttaactaggatacgaccatgtaccatgtaccacatgcacttattataccatcatactagtgtaggtaaggtatggaccgcactttgagtaatgttaagtgttgtaccacagacaccttgtaccttcccatactagtggtggtaacaccacgatgtacttacaaacatcatacactttaccaatgcactttgtaccgttaccgtacaagtgttggtagtgtatgaatcacaacaatcaggcatatatatattaacacatacataaattcgaatatccatatcacacattatacatagttcttaccttctttcctgactcaaatgaaatagtcgacctgaaaggaaagtcctgtgctgaatggatgccctaattgttggattttttgccctcaataaaacccattacaatctaattagatat

SEQ ID NO: 83991 - DNA, 733 bp, Cannabis sativa
gccattctaatagaatagttttttcataaggtagaatgacttttatttttatatagaaagaaatatcaatctaatataagatgtgaaaaaatttaataatttttttaatatattttaaattcaattccattctatttttatttctattctaattcctatttttgtattttcattcctcccacataagccaccttaaggttatatcttagtttcttacctgttttcggaaaatgctatttaagatttttagaactttttgttaagttttattccacgcgcttaacaaagtgtgcttttttttctttgccgaatgtgtaacagtgttgagaatttgagatgttatgtctaatttaaataaaaattaatttaatatttaagaaatctattttcttatcaacaattaattagaaaatttataattatttattgacaaataataagaaaataaaattttaaattttaaaagccacaccaacattttgttagtgaataaaacttaacaaaactcttgtattttagcagtgactagtttggaaaaaaattttaacaaataaatttaggaagtatgatttagtagttgtaatagtatgaggggtaaaaaatcctaatatcttttaaatttttttgaataatttactatatcaaaaataaaatttaaaataattaattacaagcgaataaaagaaaataatatgtggtcaacttatgtatattatatactgtttgttttttc

SEQ ID NO: 83992 - DNA, 1103 bp, Cannabis sativa
caagtgcagatatccgcattttacggattggattggattggatcgtgcggattggattggatcagatactttgtgaacacctctagtttttagggagtattgctagccaatcgcaaggtgacacatcttaaaggtgctaggcaccactggtgcccaataacaatgctcgtcaactaactataaaacctacaaatctccaccttgacttcaattgtatctaagaacttaacacaccatcattctatgatctccaagagattgagacaatattgaaacttgtctcttagtaaagctttagtgagcatgtctcatggattatctgtatatttttcttttttcatatttagagttatgcgtttattttatttgtaccaattattaatatttttgtcatttctctttttttataacctcaaatttgtgtttttttttcccaaaattttttactctatttttacttttaaaatattttttaagttttttttacatttttttcttctgttttttttattatttttttttacttctttttttcatttttcttattttttatttattaataaatatataatagtgtagaagattatacgagcatacatatgacattaatctttttttgtgttgttattcttctttttttttttcataaatttttgttaattattattttattttttcttctaaaccttgctcattaatagataatagtagaacaaattacatagacttacatttagacaggacgactaatgattttagtttcaataagtgaacctatatcacactatgtcattgtttaaacataactttttttgacaattatttacatataattaataaaagtaaaatataaaattataacctataaattttaacgataattacggtgctttctccatacctagtaaaaaaagaaagaaagaaaaaaagattgcaggaatagtcacgctgcgtgactgcatctgcatcttatatatcttctgtggtatattagatgggcctcaggatacattagatgagtgtcagagtacattactatttttaaccctaattatccctagattaatctcaaccttcaaatcaaataactcattcatctaacg

SEQ ID NO: 83993 - DNA, 1231 bp, Cannabis sativa
gaatatctcagccatcagaattatttataactaatttttaaattcaaatttaaataaatatttatcttttgaattaattatttaattagcccaaaaataaatccagtgagacaaccctatcttataggcacctatcgctgtattaggacagagcgatagtggcgccaccaatgtcttaacgagacattagagtgtcttttgtccagaaagtttttgtctttttccgcaatttatttaactaataaatttgaaaataagtaaattatttattacaaaataaataattactattttgacaaatcaaaatagatttttttgaacttccatatacaacttttatccctacccttgacagtgttttaaggtggtaattcgggtaccatggacctataattctaagctccaataaactagattatttattaaatctcatcaatcaaataatcctatttattgattctctgattactccactataaatatgaatcaaactcttagtaattatataattatatttactaaaattttactgcagtgtccatcgatataatcaattctagtgattacccttccttgtcttggttcgtaattagttttggtcaaattactattttaccgttataattacttctttatcctttagtactgttaattcactgtaatttaattagatccaatctaaatttgtgcacaactttttatttccaaaattaacacttaaagggaacaaacattcgatacattatgaaagtcaggattccataattgtagatcctatccccatccatccatattattagattctcaaaacagaagttgtaagaatcatcttctttgagagaaactttaatgaatgaatcaaagaaactaataacatgaacatgagtttatgattactcatgattcatgctaatttaccattgatcatctttattataagaatcaagtctttatagtaattgacatgtttggtaaacatagcttaattacatatagttccttgtcatatatcatctctatcatataccgcaccttcacttagatgacatactacatcagcaattcgaattaagattgtttgcactgaataacgaccattagtgaactgtactagaaaccgttgatcaaaaatttcaaaactttaatatacaaaataaataattactattttgacaaattaaaatagatttttttgaacttccacatacaacttttatctctacccttgata

SEQ ID NO: 83994 - DNA, 942 bp, Cannabis sativa
ggattaacaggatactacagaatacttgttgggggttgtcaaagaaaaagtgactctaaactttagatgtacaaggaaaggcttggaactagaatgacaaaggactaatttattttgtttgaacgacttttacgatataaaggcaaggttggtgtatcagtcagataaggatactgaatagtaggttctaaatgagcttcatatttcatcatacttttttatactcggaagtagccatagacttcttggttggattatcaagaatagtagagttctatgactctatctaggtaattgtagacattacaaatgaatatacaaagtcaacacacttttacctgggaggattacgtatacggtgaatcaatatgttgatctatacatcaaggaaatagtttgacttcatggtactcccaaggtcgattgtctcagatcgagatctataacttacatctcagggttgggagagtctacaatgagcaatgaacatcgagttagaattcagtatagctttttaccctcagactaaaggtcaatctaagagaactattcagatatctaaggatatgttatgggtgtgtgtattagattttgaaagttcttggaataattatttttcccttgatggagttttatagaataataagttagcaaggtactattggtgtggtaccatacgaaatgctttgcagaaatttggtggatggaggtaccttggccctaatgcaatccaaggaatgagtaaggtcataggaaagattcaagatcgtatgattgcttaacaaaatagacagaaaagctatgctaattcaaagcatagcgatattggattctaggttgagaattttgcctttcttcagctaattttagtgaagggaacacgaaaactgaaaaggaagaaaggttaagtcctaacattaccggtccgtttgagtttctcga

SEQ ID NO: 83995 - DNA, 2653 bp, Cannabis sativa
tcaatgattaataataattaataggagcataccctacctctaatgaatacaaagttgagaaacattaatatatttagtttttaaaaaataaaaagaaattaaagatagtaattaagcaaattaaaaattaaaataataatttgtataaaattttaatttaatttaacaaattaaaaatattttattttaacaccaacataaatacaatattcattactaactataataatatttcaaaattaaactacataatacataaataaaatatacgtacataagttggtatatcactattaattacataaaaaattttgcaacatttttgccctcttaacctttaacactattaatgtgcctcttatgatatatgacttgtaaatagtattttgcaaaatataacttttataataacgtaatttttcaataatattctattgaattttattttaaaataggagaagtaataaatgttaataatttataagtggaatgaaatactcttcaccctttttacattaatgaataaataaaataaaaacttttgccagtacgtttttatgttggcaaaagttagtattgcgctacatttttgtgctagcaaaagttactattgcgctggtaaaatagaatttacttgtcttctgttcgcaaaagggggttggcaaatcaatgttggcattagaacttttgccaacacaaaatgaaaagtgctcgcaaaaatgatttttcccagcgcatttaagttagattttagctagtgcaaatgtacactggtaaaactttaacctctttgccagcgcagtttgcgaaatgtactggtaaaagttacttttagcagcccagtagcgaactgtgcttgtaaaagtgacatttcttgtagtgataaaaccaaactgttagggttgagaaaattatacacgggtcgaaaacgaatcgatatgtttgacacgaaatataaaattgagtcaattaaattatgacatgaacacgatacgatgtcacattttgctacccctaataaaaccagattgttgggcggagaaataggaagtaactctatttcatttagattacaaaactcagtggtaataacacaatcttgaaaatttgactagtcgctatcaatgattaataataattaatagcagcataccctacctctaatgtttaggaagttgagaaacattaatatatttaatttttaaaaaaataaaaagaaattaaagatagtaattaaataaattaaaaattaaaataataaattgtataaaattttaatttaatttaacatattaaaaatattttattttaacaccaacataaatacaatattcattactaagtactataataatatttcaaaattaaactacataatacataaataaaatatacgtacataagttggtacaacactattaattacataaaaaaaatttgcaacatttttgccctcttaaccttttacactattaatgtgccccttataatatatgacttgtaaataatatttttcaaaatataacttttataataacgtaatttttcaattatattctgttgaattttattataaaataggtgaagtaggaaatgttaataatatataagtggaatgaaatactcttctccctttttacattaatgaataataaaataaaagcatttgccagcacatttttatgctggcaaaagttagtattacgctacatttttgtgctggcaaaagttagtattacgctggtaaaatagaatttacttgtgatgtgttcgcaaaagggccgggttggctaatcaatgttggtattagaacttttgccagcataaaatgaaaagtgctggcaaaaatgatttttcccagcgagtaaatacgctggtaaaagttagattttagctagtgcaaatgtacgctggtaaaattttaacctctttgccagtgcagtttgcgaaatgcgctggtaaaagttacttttaccagcgcagtaacaaactgtgctggtaaaagttacttttaccagcgcagtaacaaactgtgctggtaaaagtgacacatggtgcctagtaccttctaggcgtgttatcttgtgattgactagtaatactttctaaaaattattatattaaattatataagattccatacttaattttactactgataccttttattatttctcaatttaaaagggtattaatataatattgtatattattcccatttcttgtagtgagagcgattaattagaaccaaccacctctacttcttatatttgtactatatatagatatcatatattgccattttcttcatcaaccaaaaccaagcctaaacacacacacacacaaaaaaatactaataatgtcaaatattcaagtcttagcttcatctcaattatgtgacaaaattattgctcgtccaacaataaaatttcacccttctatttggggggatcgattcctccattacaatatttcagaacaagacttggtacgtaagatcaaatactatacatatatatatatattataatcataataaatatgtgcatattcttgttttaattaataataacaatatttaattgattaactattttatgtaaattattaactcaggtttgcaaacaagaaagagttgaagaattaatacaag

SEQ ID NO: 83996 - DNA, 630 bp, Cannabis sativa
taccagggttgcttaaatatctacctaacatccaaataatgtatgcaatgtctagacgcgtacctgaagatacattagactcccaacaggtgatgcacaggaaatcttttgcatttcctaaatttcaaggatacttttagggcattgactaagactctaaattcgaatctcctttagcaacatcacctggtctacaatcttacatgccaaaccttttgaatactttatcaatatagctcttttgtgataatccaagaatacctcaagaacgatctcaatgtattttaattcctaaaacaaaagacacgtcactaagatctttcatctcaaaatacttagatagaaatctcttagtttctgcaataaacttatatcattaatggcaagaaatatgtcatcgacatatagaactagaaatatgtacttagtcccgctgaacttgtgatatacacaatcatcaatggtattcatcttaaaaccaaatgagacaattacttgatgaaagttgtgataccattgatgagaagcttgcttgagcccatcgatggatttttttttaatttgcaaaccatattatttgggtcactagacacaatattttttggttattccatataaattgtctcatca

SEQ ID NO: 83997 - DNA, 529 bp, Cannabis sativa
ttatagagaaaaattgagcacaaaattggtatttttcgtgtagaatataatggtgttcgtggcctaaaaagttgagataacatgagattatggagccacttgaatcagcttatactaagagagtgggaacttgtagcacaggtggcacacccacatttgttatgctcttctttcttgttgacaaaggctgcaagtgaagggaatgaaataccatgtgttgcttggagtaacaccgtcagatgtgtgtgtgacggagtagtcccgctttagcattgatgagagaatagcttcgtgggacatgcgcatatgtaggatatagcaaaaaatttgctattgtgacttgggccactaaatttggatcttttcattttctttttctttgcaagaataccacttttcaagaatgtcattattttatttatatcattttggtcaaatctgaaaaataacacaacaattaaaataaattaaatctttccaactaaaataaatttattattaaaaccatggaatacttaattcatattaa

SEQ ID NO: 83998 - DNA, 979 bp, Cannabis sativa
tttaaagaataaagaaaagaataaagattacatataaagattacattgattacattgaaacagagttttatctagggcataaaacccaacaaaactatagtgaagataacttttttacatggaagcctagaagagaacatttatatgaaaatccccaaaagctttaaaaacaatgatctagatcaagtatgtttgttacaaaagtccttgtatggattgaagcaagttcctagagaatggaacgtgaggtttgatgaaaccatgcagaagttgggatatgctaagagcaactgtgactctcgtttttacacaaataatcatttatatttgcagttgtatgtagatgatataatgattgatggcaagaatagattagatattgacaatttgaagttgaaacatagtatataatttgatatgaaagagcttggggtagttaagaaaattataggcattgaaatgcaaagtcaaaggcatggaatcatcaccttatccaagaaagtgtaccttgagaaggtaccttaagagtatggaatgagtaactctaaaccagttcaaacacctctagcaccccacttcaaatcaacaaaggaactgtcgcccacaaaagatgaagagagagaattcatggacactataccctatgtcaatggggttggaagcttaatgtatgccatgggatgtacaaggcttgatttagcctatgctttaagtgcatttagcagattgattgttgatcctaaactggaacattagtcaggtttgaaatggataataaggtatgtcaaagggtcacttgacataggacttacttttggaaatgagtcatctacacatgaggaagtacatggttttatggatttagattatgtaggcatcactgacaccaggaaatctctaataggttatgcctttactattgtacgagggtgtgttagctggaagtccaatttctaaaaggttgtagctctgttctccc

SEQ ID NO: 83999 - DNA, 595 bp, Cannabis sativa
  modified_base (221)..(225): a, c, t, g, unknown or other
gctgaaaattatcaatcttgttgccttcaatattacatgtctaatcattcccttggatcacctttcctcctttagattctaagaagaaggagctgatccgtatcatcttgaattgtgtaatcaaacagaaatgatttattgttagtccactacaaaaaattgctatttttagtgacaactttttagtcacaatatagatttttttgtaactaaatgtgacnnnnngtcacaacaaaatattacttgtgagtaaaacatagtatttagatataatttgtcattaatttatttttagtcacaacaggtgttgtgactaaaagtacatttagtcacaacaaattgtaattgttgtaactaatacctttagccacggattttttagtcacaacataggaataatgatttataattagtcacaactttttcacttttagtcacaaaattttgttgtgactaaaagtaaaattttttgtagtgatcatatgaaaggtactgttaggttatttgtagtatttgtagtaagatttttcataatcatgttattgaagctacttgaaaattactcatgttttggagattgacttgtttaatgttt

SEQ ID NO: 84000 - DNA, 653 bp, Cannabis sativa
aaaaataacatccaattcgatccgatcacaattagatatccaatgtttggcggtcggttgtaattggatcggtcgattctcattggattggatcgatttatgcacacccctaaaatataccatgaccaaaataggtatcatatgtatttattcaaataaattcatacatattaacatatttataattttttatcgtattgaaaataataataatttttatcattagtaatttttgtacatatataataaaataatttgttagacatttcaaaataataaaaaaaaaattaacataaatatcatctattaaataatattagattattataaattttgctcataacagtcaatttgatatgaaaaaatacaatataacttaaattaaataaaaaaaaaatacatatgaatatattttaattatgtcccattaaacttgcagcaatcatatctttgatattgtctattttatttaaatttgaagttgtaattgtctcatcttcatcttcaatattaatttgattatttgcacaataatctagattgtctctaattttctcataatatcgttcacgttttgcatgtcttcgaatgtaattatgcaaggtcattgatgcaatcactatttttacttgcttctggtatggataactagg

SEQ ID NO: 84001 - DNA, 801 bp, Cannabis sativa
atttttgtaaaaaaatttctgtgataataaaattgtaaatttttgccaaaaatttagtatttttttttgtaaaaactcctttattaaatctcgcttttataataaaagcctagcacaactcgtataactatgtcaggcttgacccctattttaagggtcaaacataacaaaactaatatataaatttttcgtgccgagtctagacctctgtcgggctttagcagccaggatagttgttagtaattaacgcttagttaaatactattttaccatttaaaattcaaatcaattatatttaagttaaatagatatttgttagtttcttaagcataaaatttaaattgaaatagcataatttttttaaaatatatataataacataatgcggataaattataccgaataaccaaaatgtcttattcatcatatcactgttgattagaagtaaaacaaatatataatacattttcacatttaatatctatttgcacaatttaaaaaatatatatctatttacaaattcacatttttattaatatttagaacacacaataaaaatatcaaacaaaactcataaaaattaaagtaattaattcagtataatataattattataggaaaattacgactaacaatgtgaaattaaattaactaaactttaaataagtaaacaattagtaataacaagattaatatctcatgaacaataatcgaacaaaaatagggatgaacaaagtaagagaaaactagaaataataaatgcagaaaataaagaaatcaacaccaagatatatactagtt

SEQ ID NO: 84002 - DNA, 574 bp, Cannabis sativa
attgaattggatccatggatccaaaatatatccaaaatataaatccaaaatataaaatccgcacataaaatccgcacttactgcggatcggatgcggatcggatgcactatgagcaaaatagtgcggattggattgaaagaacacccctagctagaaatatgggccggattttttgacacggcacaagcacgacctagcacgaaaaaatatgtgtttaggcatgagacagtacgacacgaaaaaatatggaattcaacacgacaagcccaaaaatacggcacgtaagcacgaacagattcatgacatattaaaagtacaataatttgataataataacaatgataaatatttatttattaattaaaatattagtattattcaaattacaacaattataattatttttatatgattgtgtgtagctattattgaaaatagacataaaagtaattaaaactatatgttaacttagattttcgctaacaataaatgaagccttgattaatattgataattaataatatatgtagaacacaaagagtttttacgtagttttgtagttaaatctacata

SEQ ID NO: 84003 - DNA, 869 bp, Cannabis sativa
gcaagtcaagtactcaatcatattatgtaagactgtgaagaatccaacacctgaaggagaatcaggctaagatcttgataatactctacgaccaaaaggaataagggttaaggatctgagtggaaggagtcatttaattctattgcaatcaatgtaacgtttttttgaactttatatgtgtttaaattctattgttttaaaaattcatgtttaggatgttaaacaacatacatggtggtaaatctagatcctggtaaaataatctccaacaactggcctcacaaccatggtaatgatttactttcatgaaatatgaatttaaaacaatgattttgttgatttggatgtgttcatgttggtttatgtgcattttgatgattgtatgaaaattacaattttacgatgataaatagttttagtttcgttctggaattatttttctggaaattagatgaaatattaataaatttaggcttttacagaacttaatttgaattttttatgaattacttatgattttttttaatttgcgtgaaaatatcccaaaattgtgcatcatgtgcgcgcgcggacctcggcatgcacgcgtttcagacaggtgtttgaccgaggtgttacccgcacaaggctttatttgaagcagccgcacgccgagctagcttggtcaagtaggttgcaatgctgccctttccatgcccagcttccctcatgcgcgcgcaggagtatgcaatgcatacccttgtgcccaatttttgtttttgtgatatcttttgattcaaaaattaatttttagtgaaacaaaattcaaattttagtagaattttgtgtagaatccaaattttcaaataaaaatttaattatcagaataa

SEQ ID NO: 84004 - DNA, 564 bp, Cannabis sativa
  modified_base (305)..(331): a, c, t, g, unknown or other
atcgagtatggataaatttaccgtcctaccctttaatgtattttatccttaaaatactttagctacctgtaaatgatatttcaataaactaatataattactgaaatgaatgctcaatcatttatcacattaagtaaagctagcaggaaatcatcgtttcacttctaaatagttatagaagctatagatttcatatctatggttagcgctctcactcaattatactaccatgtttccaagatatatttaagccaaaacctaactatctcaggattaagatccattgatctaagatcaactaagtnnnnnnnnnnnnnnnnnnnnnnnnnnnaagtttatgatatcttatctaatgacaatatccgtccagtctgatgtatactccatacatttgatcctaacatacttttttaatgccctagaaaggacataccatatatcaatgtaagtaaaatttatcgatgattatcccatcaataaaaatccagtgtactgacaaatcatgagacttagaactttaaaacatataatcatgattattttccactgtgtagaaaatactat

SEQ ID NO: 84005 - DNA, 1069 bp, Cannabis sativa
tgttttagaattcatattaggctgttaatgaaacatacatggtggtaaatctagatcctggtaaaatattcccaacagtctggtcactaaaaatcaaaattttagcctttataatttttccagagccaaacggggtaaaggggaaacccttttatctcggttttttgctaaaaccgggataaaaaggtttccttaatctttttaacgccattagggttttattttaggtcagatatatttttctcacatatgttctctctcttccgccgctccttctccttcctccccacttctatatcttcatccagcagccaagcaactttttcctcgtgacggacgaccaacggatttcagatctgagctccacatcctccgaaatatccaagtatcattccattcttaatttttttttttggaaaaataaatttgttcttcgtatattctggatctctgtcattctctttttttttaggtggacggaattggaagtttgtggcagttcgttaaccacggtgcttctgagtttgtggcgtcgatggcggttcgtggtgattgtcgacggtggttcgtggttgttgagtgtttgtggtttttattgtagtcatatttattttgagttttatttactaatttgtatatgttatatacgaaaaaaaattgtaaagtaatagatttttttatctaaaaatacatgtataaatattgtgaaacattggaatattaataataagattttaggtctgattattttttgttatctattttttttattttttgacatttaatccaaatttttacttaaaaacccggataaaaaacctccttttatcccagtttttacataaaaaccgggataaaaagaggccttttatcccagtttttataagactttttatcccactggcatatgtcccggtttttattttaccgaaaactgggataaaatgcccctaaaaactgggataaaaagccctttttgagtataaaataaggaaaaggaacaacctttgcaccatttcagaaaggttaagaaatacccttaacttcttcgttaaggatcaccattaaa

SEQ ID NO: 84006 - DNA, 767 bp, Cannabis sativa
tctcttgactgttaaaaaaaagaaaaaatattaatcattatattaaaagtatatgtaattaaaatacaaaactaaataaagaagatttgaactactaactctttgtgtatagtttcaaagaacttctgacatgatcaaatatatatatgatctctcatttatggaagatatattgaaagtactgatcagtttgccaatatacactaattttaattttgagaaaatgactaaattaggcagcatgctctgtcattgttgtttctatcttctgaaagttttaggtcagccacacacattaattacaatattgggaatgtacacacttaattttcaaggtatcattctgcttacaattatattaagagaaaggaaaacaattaagggtgtcatgaatgtgtttatctcataaacatacatatattcctatatcacccatatgatcataattcagcaaaaaaaatatgcatgatttcataatttttcatgttactactaatttttatattaggattcaatatatacatctgtgaatgttatatcttctccattttatgaataatgatgtggtttacaacataaagaataatactaaacaaggacaagcattggcagaaactagtgagacagttaaattcttgatcatagctacaataagttaaaaaaagacccataaactggtttagaattttacttacactagctgaaggttgggcaagttaccaagttctggggggagtgttccagagaaattgtttgatcccaaggca

SEQ ID NO: 84007 - DNA, 790 bp, Cannabis sativa
  modified_base (499)..(499): a, c, t, g, unknown or other
taacaagtttccactttatgtgagtcctttatctcattttccaagaacacttcttcccactatatatatacttcttaccctttttggaaactcgatcgaagaaatcaacactataaatatataaagttctcttgattaattaattataatattaatattgatatatataacctttattaatcgaagcatgcaaaaaatcttggtctactaaaccacctatacattttgagtaaatctataaacatgatataatatatataattgccagctaccttgccaccttgccattgctattaattagttttatatataattggttcttgtttagaaggtagaattatggtttaatgagtaaagagaatagaatgtatagtttaacactttttttttttaagtttcgtattattatttgtgtaattaaatattgggtctcagataatttaagaaaatagcttttctgtccgttaaaaattccctttgaactattaagattgttagntttaaggacttttgtctattttcattcaattttactatttcaatgattgtttatgtactaaactatgttctccatactttgatatctactaaatcatactcctcgaattttgatatgtactaaatcatgtctcctgaactttcatctatgtaagtcttttttttttactaaaattggacaaaaaatctttattaaatttaacgatttcaatagtttaagagtatttttaatgtctctaaaagttcaaaaagtataatttaataatatgtattttgatgaaaaataaaataa

SEQ ID NO: 84008 - DNA, 518 bp, Cannabis sativa
attttaatctatgataaagttttactaattgaatagatgtaatatttggtgattaaacttatattaagaaaataataaaaaaagacaaccaaacaaattggtatagtttgaaatacaaagaaattatctaaaattatatacataaaagagcctattactctattgtagaataatgagataagttgaaaactaatttttattacacattaattaaatataattttaaaataattttaattggtaaatattcctttttataattaaagtgtcaaatataatctcacataacttatcaaaattagagttcctaatgcacataataaggatatgacctataaaactaggtataaattaaataatagtaaaattaaagtaaaattaaaataaaaaataaaaattagatgtagagtgcaattttttctagaataatattgtgatatacactactacaaaaacaccctttagaggcggtttttaagccctttaggcgtcggttttcgcgaaattcgctaccgacg

SEQ ID NO: 84009 - DNA, 1133 bp, Cannabis sativa
ttagctcaggcctctatgcctttaacctattaagatgaggctgttcgaacttcatgttatatcataaacaggcttcccactcatgttcttgccaatgatactcctctacacaaactttttcacaaagaacctgactattccactttgaaaatatttggttgcatgttttcctaatacccgaccttacaatcgacacaagttagagtttagatctaaaaagtgcacctttcttggttatagtttaaaacacaagggctataagtgtctatcctctactggtagaatttttatctcaagggatgtgttatttgatgaatatacttttccttttgctaaaatgtctactaacacttctctgtcttctggttttcactctactggaccatcatctattattcctcgatctgaccaagcttcaccaattcaagatcagcaacctgctgatccaaatatcagtgcttctgcaactgatcttgctcctactgctcacttgtctgctcccaacagtgcttctgcaactggtattgttcctgcaactgctactgacagatcaagtggttcatcaagcaatccctcctcatatcactcattgcagcctcaatctacttcagtttcagatcctccaaccaccatagctactcccactgtccctgtcaataaccatccaatggttactagagccaaagtgggaacctacaaaccaaaagtcttcttattatcaaaggaacctctcaccttagctgctgctttgcaatcaaaggaatggaataatgctatggaaactgaaataatagccttaaaaagaaacaaaacttggattgttgttcctcttcctcctggaagaaaggctataggttgcaaatgggtctatagggaaaaagaagggaaagatggctctgttgtgcaattcaaagctcaacttgttgcaaaaggttttttgcagcagtatggttataatttgacagagacatttagccctgtggtaaagccaaccacgattagagtcatcttaacaattgccttatcttatggttggaacataaggcaattgaatgttaacaatactttcttaaatggtgatctaactgaagaggtttacatgactcaacctcctggttttgaggacaaagatc

SEQ ID NO: 84010 - DNA, 1060 bp, Cannabis sativa
  modified_base (496)..(504): a, c, t, g, unknown or other
  modified_base (862)..(868): a, c, t, g, unknown or other
  modified_base (926)..(951): a, c, t, g, unknown or other
aaaataatttccaacactttctatgtcaccccttctgatgaaatcaaaaggggtagaaatatcagaattgattattttggcattaatcatattatactttcaagtattaacaaatttattaagtatatgattaaggtggaactttgtcatgtcaagaaaaggtaacaataaatatgaaaagataaacgatataaatcaatatatgcatatattaagggatagctaaactcaacatgtttcaatttacttttcttttcttttaaaataatcaaatagtttgatataattaaaaagggggagaatgttgaccaaaagtccatcactcacttattttgatgataaaaaaattatttgattattacttgttactaatattttcttgatcattttgcaaggaagttcacaaagtatcggtatttgctcggtaaagtcaaacataatcaaagaagtagatcaataagtacatcaactacttcatactttataagagcaaaannnnnnnnnagagatcaagaattcaagaccctatctaaaagcggacttcaaaagctcaatgtcaaaagtcaactaaaaagtcaaagtctaagtcaactattagagaaaagtcaactggatcaaaacatgcaaatcaagcttggaagctcacctacatcaaggttacacacaatcaagtggtattagtttactttagtcttgttaaagtgatttttatagtacactaggatttataagtttaaaagtttggctcactaacttgtgggacaagtttggctcactaacttgtggaataagttataattgagagtgcaatttcaaatctataatggtgcaaggaggaaataagttagggaatttacttggnnnnnnntagatctgcttattggaagtttggttataaaattccatagtccccatactagttgagnnnnnnnnnnnnnnnnnnnnnnnnnnttgattttaattaattaattataactctaaaattagactatgtctagtttatgaatttttcactaagttatggcttggttgtgaagaaaagggattttagggtttattt

SEQ ID NO: 84011 - DNA, 1296 bp, Cannabis sativa
tcttattttgacataatccttggaatggattttctgtctatatggggcaacaatcgactagaagcggaagatggtggtgttggagcctaaaagtgctaacccggcagtgtttgtgggtaaagttcaagggacgcgcataccaaggataacacttttaaaagctaaagatttgatgaccagaggttgtcaccacggtggataccagccaacctgtgacatcaggacctgagaacacaagattggtgtgcgagtttcttgatgtttttcttaaagatctactggaatcaaaatcttctcgagaaattgaatttgtgattgagttagttcagggagcggaaccagtatcgaaggcaccacatcgaatggctctagcggaattgaaagaattaaacatccaacttcaggagttattgaacttggggttcattagatgtgtattgactaccaagagttgaataagcttaccatcaagaacaagtatcatctacctcgaattgatgacctatttgatcaactaaaggggaagatggtcttttctaaaatcgatcttcgctcaggttaccatcaactgagaaaatgcgagtggaagatatcctgaaaattgtgttgtgtactcggtatgggcattataaatttctggtgatgtattttggactcattaatgccttggcagcatttatggacctcatgaatcgggtatttaaggattacctgtacagatgtgtgaacgtgtttattgatgacattttggtttattctgaatcagaagaggaacatgcactacatctcagatcggtattgcagcgattatgatatcacaagttgtacaccaagttaaaaaagtgtgagttctagttatctcttgtctctttcttagggcacatagtggataaagatgggatcatggttgatccagccaagatggaagctgttcgagattggcttacaccaaaatcagctatagaagttagaagctttttgggtttagctgggtattatcttcgattcattgagggtttctcaaagattgttgtacccttagcagagctgaactgaaagaatttgaagttttttaggactgatcggtgtgcgaaaagttttctggagttaaagcagcgcttgattaccactctagtgttaactcttccttctaataaggaaaggtttgttgtttattgtgatgcctcgagacaaggtatgggctatgttcttatgcaagatggaaaggtaatagcctatgcttttcgacggttaaaggaataagagcaaatgttccctactcacaacttagaattc

SEQ ID NO: 84012 - DNA, 919 bp, Cannabis sativa
ttacactttatacaaaaaaaaaaattacttttaatcacaataaaatttatgtctaaaagtgaaaaaattacggctaattataaattatcatttgtatgttatcactaaagagaaatgataaaaggcaccagttatgtctaatatcgttattagtccaactaagtatcatgtttcatatagtttaatgtaataacttttagggagtatctctagttaatcgcaaagcgacatgtctagaggtgctaggcaccagtggtgcccaatagcaattctcatcacttaaaggtctgtgcctaaaggtattagtcacaaaaatcataacttgatgtgactaattatatttttagtcaaaatacttgttgtgattaaaaataaattaatgacaatttctatctaaatgtttagttacaaatttaaatattatatttaatcacaaataactttgttgtaaatagaagtcatatttaattacaaaaaaaattttatgttatgactataatattaaaagtagtagttttttttttttttttttgtgttactttaattataataatacttttgcgaaagaaactctttgcattaataagttataaccaacacaccttttctataaactaggttattgttacgtgcattgcacgtgtaggaatattttattccttctttacccctacacacagcaaaaacctaatcaaaagcaaggtcaatttagacctttacccagtcaaaccacctttttgactccctgccattaaatcaaacgacagctatacctatatctataatatagtcgttttttctatcaagttaaaaccctaaaccaattacacacacatatatataatctttatctctagattacacatacacggcctccaataaatcaaccctagcagagaacaaaaactttcttcttctt

SEQ ID NO: 84013 - DNA, 640 bp, Cannabis sativa
tcttcttcacgcatccaacccctgccatgaccttcttcttcttctccatttcaaaagaccctctccaccattagcagcaagctagcgacgcaccaaacaaccaccagcagcagcccaacgaccctctcaactccccttcgcccaaaccaccaccaccagcccgacgagtcggtgatccaaccacgatagtgcctcctcgacttcattggtgctgttgttgatgttagatttggtgaaggattgcctccgatcttgactgctcttgaggttcagggcttctcgatccgtttggtgcttgagttgctcaacacttgggtgagaatatggttcgaactgattgaattttaaactctcttttttctttattcgtttttgaactgattgaattttattaggtttttattgggttgacatttctaaaaagaaaatttaggtttttgttttgtgaaatttgagattgaaattgtgtatacatttttttttattggaaatgttgtattttaccgatcactattttcccattcatagagaagccccagcttttgttgagcaagttggttagatgattggcagaagctttgataaaagagtggcatgagttgtttagtcattttattgccaacaaatttgaattgaaatt

SEQ ID NO: 84014 - DNA, 999 bp, Cannabis sativa
  modified_base (349)..(365): a, c, t, g, unknown or other
gaaatcatcatttcacatctatgtgcaaatagaagctatagattttgtatctatgattagtgctcccactcaattgtactatcatgttcccaagatgtatgtcatggcccgaaccaaatggtaagctttaatgaacaactctaagagcataaataacactattgagatacaacctaaccatattaggattaagatcttttgatctaagatcaacttggtgatattgacttagaaagatacaatggtaagtttataatatctttacaaaatcaatatcggtccagtccaatatatactccatacatcctatactagcatactttattaatgtcctggaaaggacataacnnnnnnnnnnnnnnnnngtaaactttatcgctgattatcacatcgatgtaaatccagtgcactgatgaattatgggacataagttttgaaacatataatcacaattaccttccactttcttgacattactgtaactatatgttctcgatttaatagaaattgtatattaaaccataatcatgaaaatgatatgttaacctaaatgacttgtaatcttctattgataacaaataagattagattgaaatgagttttatttaggatataaaatcctaatgtttataaccacccatagtaggtggaccaaaaggtccccaaaaatcaatatgaataagctctaacacatctgcacatctgtctaacttactctttctaaccttgggagtaaattttcttttatacaaccagcacaggcagtgaaatcagagaagtcaagatcctgaagcacaccatctttcaccaatctctccattctatctctagaaatatggcccaaacgtttgagccaaagcatggaagatttcaaatctaatcttgtacgtttcgaaccaacaacatcattaaaagaagaagaaggataagagggagaagtaataggaacaacatcaagtaaatcaagcttatattagtttccacacaaggttccatttc

SEQ ID NO: 84015 - DNA, 889 bp, Cannabis sativa
gtcagggattggccgagactatagacagtcactgaagtcaaaagttttctaggcttagttggttactactgtcagtttgttgaagggttttttaaaatttcaatgcctttaacaaaattaactaaaaagaatcggtggtttttatggacggacaagtgtgaagtaagtttccaagagctaaagcaccaattaatcacacctctgatattagcattaccatcattataggaaaagtttatggtttactgtgatgcatccagacaaggtttgggtgcattttgatgcaagatgataggattatcgcttatgcctctcatcagttgaaggaatatgagcaacgatacccaactcatgacttagagcttgctacagtggtttttgcattaaagatttggcggcactatctctatagagaaaatgtgataattataatgatcacaagagcctcaaatatttctttactcaaaaatatttgaatatgagacaaaggtggtggttggagttggttaaagattatgatctcgggaaggccaatgtagtggcatatgccctaagtaggaaaggtctcgggcatgtattcagcacgattatgattttacctcaattggcagatgacatggtcaaatcaggtattgagtttgtgataggcaaacttaataatttgacattgtaattaaatttgttagacataactagaaatgctcagttggtggatccagaattagtgaagatccaataagaagtcttacctggtcaaactaaagatttctcgatatcaactagcgggattttactttacaaaacccgaggtttgttgtcccaaaatagttgtgggaacttagaaaagaaattcttgatgaaactcataccactccctatttgttgcatc

SEQ ID NO: 84016 - DNA, 506 bp, Cannabis sativa
atatatatagtgatagagagaggactatacttttcttctattggaacgaagagctgtctttctaaaattttgcattgaacaatctctttccacataaaaattactaacctcaaataaaaacacaattaaaattctaaaaaatattatttagctcctttttatttttcagttggtctcaaaattgatttactaagaggacgtttggcaacatttttttttttaattttttgattacaaaaataaaagtaaattcatgaaaactacaaaattgatcaaaaaccaaatctaaccaatttaaaatattttatagttcatagtaagtcatacaaaattaatctagaatgtgcaaattcaaccaatacatatcatgatctgaattataagagacattcttagttatgttatgttcgaccctcctcttaaaatcttgataaatagtttccttgaccgagttccactcccatgaattccaaagctttaccttcattgaacctctccaaccacca

SEQ ID NO: 84017 - DNA, 748 bp, Cannabis sativa
caagtggctgtgaagcatttcgttcaagccatggtggagcatccgtacgtgcaagccatggtaacatcagtgcgagggtctcgcatgcgaggctacaagacggtgagataggggcccgcatgcgagcccgtgagggactcacatgcgagtgcgtaagtgtggtgatgcgaggctgcaagacggtgagacgacgactctcatgcgatcccatgaggggcttgcatgcgaaagtgcatgtgtgcgcgagtgcgatgatgcaaggttgtaagatggcaaaacaggggcttgcatgcaaccatgagcggctctcatgcgagcgtgtgcacgtgtgcaagtgtaacactgctgcgagaggatgcatgcgagacaagggctcgcatgctcgcatgcatgcgtgcttgtgtgtgcgtttgtgagaatacttgtaagcatgcgtgcatgcgtgtgcatgcaagcccgttagcgtaaaagcgttataaagcgtcaagtatgttgcttgtgtgaagaggagagaaggtaaaatttgaatgcatatcgagaagaatgacgttggagaaggaatcaaagggtaatgcatggaacgaagagatatacaaccacaccttctacaaactctaaaaccaaaaaggtacgagtagcggagataatgcacctggaaggtctgaggacctgaccaagggtactctgcaacctcactcctacaactagggaccacactcctgcaaccggggacacactcctgcaacca

SEQ ID NO: 84018 - DNA, 2134 bp, Cannabis sativa
  modified_base (186)..(187): a, c, t, g, unknown or other
gttgtgagccaaagtgttgctggtccaaaaaagatacttttgctgtctccccgttaatctccatttgggacctttcggccaatgtgtatcagtttctagtgttagggtctttagcctgtttcaaaatctataaatttcccgacgtatacaatcacaaatttctcaatatttggccttgtgggattnnttcaaatgtcacgttcggtcttatggtttcttaaaggtcgtttgttatacccacaaccaggcccaaacgtgaggaatgtatattatagttagtctcacattgctaatctgtatatataaattgtcgtatataagatgaatgagttactctttctattaccaattaattttgcgatagaacatcattcatgttatcctaaattctaacaatataaaaataaactcttctacattttattatattaatgaaaaataaccccaaataaataacatatgcaaaacttatttattctttcttcttccgaattggcttaatagtagcgttcgaaatacaatttgaatggtttgattgtgtatttagtattatttggacatgttgagaaatcaaaaattgttcacccatgtataattttttttaaaaaaacaacacccatgtataaattatgagtgtgtttatgttattacttatctaaaatgtaatattgaaaaggaaaaaaagtattttgtcaaacgctaggatcttgatctgaaagtttttttttttttttgttttttttgaaaggattctgaaaaggttaattatatttataatattttttgaagagatgaaaaatacattaaaatctaaaatatagtaaagctcaaataatagattcatggtactacatttgttttcgtgaataggataggaggtttcaattcaaactcttttttttctctctcttaattttaatagaaaaaattaatggattaagacacatattaaaagtgacacacaagaaaataaatggtacgaaaagaatataaaaagaagtcaaatgttattattatgagagaaaaatctaaaaatcagcttaaaaaacaaaagtaatttaatatgattttgagagggcgagaaagaatgaggtgaacgtaagcgcttacgccacaagaatgaagctaaggtggctcaagctcaactcaagggaaaaccagcagcaaattaaagtgcagctgaatttggtattttcttgtggccaagccaaacccattttggctacttaccaaattcattcttttgggccctcaattaatgcctaccccggttgttcgtgggacaaaataatatcctaccatgtctcaaataaattcacacttattgaaagttcccatttctcccaattggtaatattttttaatcaattttttatatttaaaattaaaaaagttaaaatattttcaaaaattatattctataaaattgtttttacttttcaattttttaattaagaataaaaattttaaaaactttgaaaacaaaaacaaaaaaattattttcaaaaaaattttaaacaagtttttttatcaatattttggactccgaacccaagctagaccttggaactcggaccctaaccaagaccctaacccaaatccataccccggacctcgaccttgacctagacccaaaccctggacctgactcggacttggaccttggacactagaaccgtgactcgactcgcacccgaacctcagattcgatctggacaacagacccgacctaaaccccagaccccagaccaaacccggactcggaccttggaccccgcccttggccctagacttggactcgaactcagaccccgaccccatactcaggcctaaccccgaacccagacctagagccggactcggccccgcccccgacctctaacccagactcggacctggacttggacttggacccggacctcggccccgtacccgacttaaataaaatcaacaaatgaaactgagatttacaaaacaaacttttattttttgtttttaaaattaaaaaacaaaagtagttataaaaatacatttatttaaaaaaaattaaaataaaaaatgtttcttttatttttgtgattaaaaaattataataaataaaacttttaccgcaaccttaattaataattaattt

SEQ ID NO: 84019 - DNA, 1569 bp, Cannabis sativa
gccataccgagatatgtactatctcagtctgaacgacctgagatatgtaacatcttagtttgactgccctaatatttcacatatagtatctttagctatttattatgaattttcggataaattattactttttattttacttattgtttaaattctggacgcgactttatgtatttttgtatatatatatatatatatttttgattcactttgtgtgtgactgacgtgcctttaaggaggacttgatatagccttttaatatgctattatggatgcgattcatatgttcttaaggtcttttgatgtgttagcttaatttttattgatgcgattcttttgcattttagatcttcagtatttcgactaaatttgttttggaggtgacttactttatgctgcctttaagaaggtcttttgatatgtcggcttactctgttatggagacgactcgtttcgctatgcctttaaaaaggtcttttgatatgtcggctgaattcgctatggaggcgactcttttcgttatgcccttaagaaggtcttttgatatgtcgtcttaatctactatggaggtgacttgtttcgttatgcctttaagaaggtcttttgatatgtcgtcttaatctcctatggaggcgactcgttttgttatgcctttaagaaggtctttcggtacgtcttatatttacgaatgtggctcatgtattctttcgtagattgcctttcgtaaaaggtcttagctatgtatgatcttgcctttcgtgaaaggtcttaggtattcaagatcttgcctttcgtgaaaggtcttaaataattgtggtttcgcctttcgtgaaaggtcttaggaattcaagatcttgcctctcgtgaaaggtcttaaataattgttgttttgcctttcgtgaaaggtcttaggaatttaagatcttgcctttcgtgaaaggtcttaaataattgtggttttgcctttcgtgaaaggtctttggaatgcttggtcttgccttttgtggaaggtcttagatatgcttggtcttgcctttcgtggaaggtcttagatatgcttggtcttgacttagaacagtgaaatcacctgacaatagcataaatatatgaatggataaatatttgagataaaataaaaagttttatgagccataggtattatgaaacattgattctttggctatttattatctagtaactaaaagagtgctcttagctagtagaaatcaacaacaattaataataatttttttttatataaatgaagtaaagaaaagataatatacgagcatgtgttatggactttgaaggttcatggagtaagtacttgcgtttaattgaattctctaataacaatagctaccagagtacaatagggatggctccctatgagatgctatatggtaggaaatgtcgctcccctattcattgggacgagacgggagaaaggaagtacttaggtccagaggtatttcagaggaccaatgaagctattgataagatcaaggctcggatgcttgcttctcaaagcaggcagaaaagttatgctgatccgaagcatagagatgt

SEQ ID NO: 84020 - DNA, 1535 bp, Cannabis sativa
  modified_base (578)..(580): a, c, t, g, unknown or other
atattaaaaaataaattgttgaaaattaagttcagtgtcctatatttactattttgaaaaatatagaatcaattttttcatttaataaacgagagggttcaattggtaacttttacaaaatacaaggtacaaaatagtatttaataagtcatatattttagaaggtaaaaccaatagtattgaaaattcaaaaaaaaaaaaaattactaattattaaaaaaaaaaaaaaaaagtaacaacgaaaaggcaaataattgtttcgtttattattgacgaaattggaggtaatacttttattacacaccaaatgttctaaactagttgtttattttttatccaacagaagatcagagcttgagatcaagaaataattataatttatatggttgctttttttttgaaagaaaatttatatggttgcttgccacctacttattctctgtctgtttctatcttgtataagcgtgtttgagtaaccaaaataagagaaagtaagggaaatacattattcgatccctacttaactcagtttaggagtatggattgcatatttcatttcctaataataataataatannnataataataataataataatgagggtactattttaatctcctataacatcttagccaattttttgtctcaaaatatatgccctaatatttttttttttcaaattctttttaatggctatgtctatcataattacaatatcatacttctaatattttttaaaaaaattgaataatttacaatatcgacaatttttgatattccaatttatcatatatttaaaaaaaaaaattaaacatattttctcaaatataaaaattaggataaaatgttcgtttacaagaatgatattataaatgtaatattgctataaaaagaattaaaaaaaatactccaacatgcgtttttagatgcaaagattaactaaaatattatcttataataaaatgttgtaattaacaaggttcatactaaattgagtagagtagaagtagtatgtatctctacttatctgtaatttaagtataggcatcgatgcacattttatctatttcgatatctgagagaatattttagtctaatttttttattgccttaagatgttctgtaaaattttgagagatttaaaaaaatttattaacacaccaaaaacagaattaattcaaacaattttttatacgcgagactcttttattttatatatatgtaaaatagactgtttgaactctattttcaatatgttaatttttttaaaattttttataatttcacaaaatattttaaataactacaacgtaacttagaagtccataaaattaaataaaataaaatttttttcttacatactaaagtgcgcccatgaatttcgccattaaattctttcgtgcgtagctagctgatgaccaacaagctaagcagtcgaggtccccacatgttcaacatgaggcaatgttccttatcaacagtggttgccgtctcataataataatctcctctacaaagggaatagcatcgaaa

SEQ ID NO: 84021 - DNA, 2400 bp, Cannabis sativa
tccacctctttttctaaggcttcacccttcactgagtcgagggggcatcgtttctgttgaaccggtggcatgtccgggttgacattaaggacgtgggttatgacgtgggagcttatgccggtcatatcttcttaacaccacgcaaaaacatccgtggcgcccctcagtgtctttattattttttctttttcctccggctccaggctcttccctagtcggagcactttggtggagtcgaggtcacacactgacacctccacgacatcctccatgggttctacaattttttcggatcccacacggggattcaactcatcttcttccgccatttctggctcaataattttgcagaccattaggatgggtaggtgggcagcaacgttgtaacactgcctggcctccccttggtttcctttcactgttcctattccagcctcttgagtagggaatttcaggcacaagtgcctaatcgacgtgacagcgccaaaatctaccagggccagtcagcccaggatagcattataagccgttgggcagtccaccgcaataaatgtgcagtatttgaaagttctttggggtgtgtccgggcacaaggtgacggggagcctcacttttcccattggcataagtgttgttccattaaaccctgtgagctgggaaccgcttggtgaaagatctcggtccgtcaagcctattgctgtaaaggcttctttgaataataaattcacagaactcccattggtgattaggactctggccacaatcttattggcaatgggattctctatgaccagggggtcatgatgaggaaaatgcactatcttggcgtcctcttctgtgaatgtaatgggctgatccattagctggggcctttgagctgggagttgagtaacttcccaaaccacactgtgctttacggcccctgcgttacgcttcagctccttccaggtagttcttccgatgtgaggtcctcttgagatcatggctactcttccgttgggtctttgtggcaggccaggaatttactgggcatctccggggggagcaattggtgccaagtctccggctacaccccctggtgctccttgaggcaaggcccctgcggcctgagctgggttgaggtgaggcaactggttcttgatccatttgtagaggtgtcccaatcgaatcaagttttcgatctcgtccttgaggtttttgtactcattggtgctgtgcccaatgtcgttgtggtactcgcatcttttactggggtagtctccggtagtgcatattttgcctggtagcaaaatacacacgctcttgggagtctgttagctccgtgtactgggtatattggggagtgtaccctcttttctgtcgcttatcctctgaccggttgctacctttagaggacctcttgctccgagagccttgagaagggcctgctaagcttgcggtcggagtggagtgcgatggggcttgcccaattatccccaagggatttccaaagtgagaagatgcaggggccaaggcctgaccttgaatgtatccgggagtagcagaaaattgtatgccactcattggtggagcggctgtcggcaatgttcctgggagctgagctccgggtgcatatcctgctatcctggtaggatagtatcctccacaggccactatctgggcctcttctaagttgatgtatttttggacccttttctggaagtcttgaaggttggaggctccttcttgttgtaactcgttccagaatgcagtccctgtacggatgcccgctagaagaagagtgagttgttgtccgtcatcgactttcttggtttttgaggcttcttccttgaacctctttatgaaattcttcaatgtctccgtaggcagctacttgatgttagtcaaggcgctaacctccaggttaactttccttacagcgacaaattgtctccggaagcacgtttgcaacttattccaacaatttacggatcctagttccagcttcttgaaccattctttcgcagacccacttagggtaagcgggatgcatagacatttggcgtcgttgctgactctcatgaccgtcatgacttggttgaaccgtgacaggaaatcgctaggatctgagttcccggtataagctgccatttcgggcatcttaaaaattttggggggctccgcttccaggatgtgcttggcacatggcaccccgtcttaagagtcagagtcggagtcatcgcccttttgtcttcgtgagactcggggaatgtctttttggagtacggcaagttcagccataattccttcgtttaatgttcccgtagaaactgcgagtccgtatttcttttggtccagatgatcccggagatcaccgtgtttctcgttgatctgatctctcagatcgatgggaggacattt

SEQ ID NO: 84022 - DNA, 659 bp, Cannabis sativa
taacaaactccttttctaagcttcgcaatactggttcagctcgcagaatcggaggagttgtgcgaatgcccttcgagatagaattttggcattccctgtttgcagccaggaaataaccaaaatcagcagctatctcatcctgttgtttgatcaatctcagtgatgaatctggagataacggttgcaccagatccacctctgttcggttatcttcctcatccgagaactccactggttcgacaccaagaatttcttccattgatttggtcttcataacatcaggagatgaattcggacctttctttttaggtttcctattagagattttcgactttcccaccatcttggacctcgttttcgccattgcaccagctccgagagaactgcaacgaacgaagagagagagagaaaatcgtttcatttatttatttatttctcataactaattaaattttaaaataacaaaaatgtgtacaaaataatttatagataaaatggcagcttgttatattacatgacaactcattagttttgaaaatattttttaatttacgtaaatgtattttaaattataatattaatgtaatttaaaaagaactaattaatagagcactcccaataatttttttactctttttaaaatatctcaccaaaattct

SEQ ID NO: 84023 - DNA, 591 bp, Cannabis sativa
cttggccacaggtgcaaaagtgtcattgtagtctatgccttcttgttgactatagccctttgctactaaccttgctttacatctttcaacacttccatcagcattatattttattttgtacacccatttacacccgattgcatgatgatgaggaggtaaggtaacaataatccaagttccatttgtttccagagcaagaatttcagatgccattgcattatcccaaactggaattcctttagcttggtggtaaaattcaggttcaaaaaggctagaaatggcaagtatgcttgcacgaaatctaggagacaacctgctgtagttgatgactttagacaaaggatgttcagtaatgagagggctgccctgagatgaaacattgttagtagacaaaaagacatgataatcatttaaatatgatggtcttttggagtttctgctgggtctgttggaattaatagcagcagaattttgatattctgtgctgtcatgggattctggtgcagtatttgtgtgttctggtgctatttcaggttgtatagatggttgtgacaggtgagaattgttggtggtagtagcagaactaggaaa

SEQ ID NO: 84024 - DNA, 1581 bp, Cannabis sativa
atataggtgtctctaaatttatatcatatgatatgtgtactcttgtttatttttttcttcttttttcttttttcaagttgtaatgtaatgtgaatttgtgtgcgtcagtattgctctttcaattattattccaagatatatgttccctgttttatataactaccaatcgaataatgttcaaataattaacgtattgtatttgtttaaaatattacatgtatatcaaatgtagagagagagaagactatataaatggaaaatacaaatttgagctatatatatataaatatttttcgtcaacatcagtttgagctatatgttaattaaacaaggaggagagatattcgattcgatttgactcgactcgactctactctttagtctttccctccaatattattacattaagcctttgtaatatatagtgatatatatatattcatcattaacttgttatcaatgatacacattgattatatatttcagtctttcagaataagtatatatatataattaattttttcgaaaaatgatcgggtacatttgctttgtttaggcttattataatgtaggttgtaatgattccacacatcttaacgagaaaatttagtttagagcacatagtacctaatattaatatagagttagatgttttggtggattctttatcattttggcatctaaaaaaccttttaatcatttttttttttcataagtgtatgctatatttattttattaggaccacctataatttttttaaaaaaattcggaataatttgtcatgccaaaaataaagtttaaatattttattacacgtgtgatttttttttatgcgcatggtaagtaactgtttgaaacgtatttttagcattataaattattcaaaattttctaaaaaatatccaactagtcctaaataaatacaatgtgtgttatgaaaaaaaagactaaaatagtacttctcaaatctcaacagataagaagtttactaaaatatggtgtacaaatatttccaatataggagctgtttgatatttggtattaggagaagtgaaaatgagaatttgaaatattttcaggagctgacacaaacttttgcattttaaaattattattttttatatatgaatactaatgtatataaaaatatttaaaatatgaaataattcccccaaattaaaaaatgatatatgaagtaattctcctatttttttatatattttattttataaaaatatattatcaatatgtatataaattgactctttataattatttattattgttaattttttcataaaattatataaaaaataataaataaaaattattttgaacacttagaaagaaaaaaaaatattgaattattagtattttacaaaaaaaaaaaaatcattattgtaaagaaaaaaaaagttgtcacattccattcatacgtaaaccaaacaaagtaatttttatattattcccaagcatcattataatattactgtgcacaaccaaacacggtaatgttacttttctaggtttatcattctcttcatcactttccaaacaatattaaacttattcccatgaaa

SEQ ID NO: 84025 - DNA, 604 bp, Cannabis sativa
aaagaaacgaagcaaaataatttagtcagtttggtatgactaccaaacccacaaagagaaatatatttcacttcaaaattacatttactctctatctcaatctctccaccccaaatcccaatatgccatttgcttcttcctcactctcattgcacaacaaactcgcagatactcttttcataagtcactatttttctccacacacacctctttcacacacaaaatacatatttataaagttacaaaacttgggcaccaagacaacttgggaccaagacattctaaagctttcttaagaagactcttcaaaacttggccaccaagagtttttttttttcagacaattaataattacctaaaaagaacttacaactttacaaatataaatatatatataatttgagtcaaactccaatattttcaaacactctaaaattgtagtttatagtctttttgagttaacaagtttgttgaattaagttattacaaaataactttacaattacaagtaatttttttttatgaaacaattataagtaattgaagtatcctatttgggccagtttggcacagctgtgctgtgggaaaaagcaactgtagctgt

SEQ ID NO: 84026 - DNA, 735 bp, Cannabis sativa
  modified_base (26)..(30): a, c, t, g, unknown or other
  modified_base (57)..(61): a, c, t, g, unknown or other
  modified_base (87)..(91): a, c, t, g, unknown or other
  modified_base (118)..(122): a, c, t, g, unknown or other
  modified_base (155)..(159): a, c, t, g, unknown or other
  modified_base (187)..(191): a, c, t, g, unknown or other
ttctgatctttattaataagtgaatnnnnntgatctttattaataagtgaatctgannnnnatctttattaataagtgaatctgatnnnnnctttattaataagtgaatctgattatnnnnnattaataagtgaatctgattatatgaaatgagnnnnngtgaatctgattatatgaaatgagtttnnnnnagggcataaaacccaacatatctacacatcgcaaagaggaaaccctacatcggtttcattctatgccataacctggcaagtttcatatcactgacgcctttatctacacgtcgccagaaggaaacctgacaaaagtttcattctatgccataacttggcaatttttatatcactgacgcctgtatctacacgttgccaggaggaaatcctttaacagtttctatctatgccataagctggaaatattcgtatcactgacgaccatatctacatttcgccaagagtatcacatcacctaattaggtgagcttgtacctacgctcaatactcatatgtcactggcccccgtacctacacccggtacgtcgccaggagtatcgcatcacctagttaggtgagcctgtacctacgctcggtaatcatatgtcattgatacccatacctatgcatggtacatttctaggagtatcccatcacctaatcaatcttttcattatataacaatattaactgtatctcattctcaatattaatcaattcataa

SEQ ID NO: 84027 - DNA, 562 bp, Cannabis sativa
ttttgacattttagtacttcatctaaaaaaaaacattttagtacttaaatcattttagtgtctaacttggtgtctaggatcaattaaaataggacacatccgctaactattatacatttactatcctaattttaacctaattaagagtaataaaagtgttatctatatatatatagggtaagattatggtaggacttagtataagttttctatcggtagggacgcttttttgaccattaattttaaatcatgtggtcattatgatataaggggtatactcttacaataaaactgcttgtatacaattaaaattttattcgtattataataatatttaaaaatatatttattttaaaaaataaataatattaataaattaaaatttttatttatttttaatttaaattatcattatttttttaaaagttaatttgatcgttattcaatctctcctaaaaataatttttcttttcatattttctaagtctcaatacctttgatcctccataaatctccattgatgctctgtttctgtacttgaaatatttttgcttcaccagta

SEQ ID NO: 84028 - DNA, 921 bp, Cannabis sativa
  modified_base (31)..(39): a, c, t, g, unknown or other
cgagctgcacaatacgtttaaaaatcacgtnnnnnnnnnatgctagttagggtgttacaccagctgttgtggaatcatttcgatcacgtacactaactttctcccactggatattagcagcagtggattcagtttgaccatgagcaacatcttgctccccctggacatccgtaacaatattctcccattggatatcagcagagactgtcttttcttggacaatagcaccacttgaaggatcatgatcatcacccacaaatgatggctgaagggtagatttaagcacgaaggaatcattgccaacagtaccagatggatatgtacccatatttgatggagaaatcactagagaatgcacagaaaaggcaccaacatcatctaaggaactggagaagtcatcatgggtaggaacatcaagacaggcttcagaagattttaacacttcagtcatagcagacaatacatcaataactactttatcaaatcaatgctacctgagttggtcacgagcataagtgtcagcaagctcattaacctttgagaacaattgatttttccaagatgcaggactaaaaacttctagaggaactgaaggagcagtcaaggaagagggggcatcagataccagggcatcacccgtagtagaacatccataactgataatggaagagacttaccatgcacatgactgaacgatttcccaagagtaggaacatgcaagatcttatcttgctcatagataataagggaacctctttttaccgcacggttaatcaagcttggataaggcagtgtgtgtttgacccctttcgtagtgggggaattcactatctaatcatacatgagtgatggaagatcaatactaacaccattacccaatgcaaagagaaatctggctgtattatagttgattgtggagat

SEQ ID NO: 84029 - DNA, 1127 bp, Cannabis sativa
gaaagttaaatccaaggtattattaacttaatttgtatcattttatttagtttatttttacagcaattatttgttttttttggtcaatgatttattcgtttatcatgacggttttatgttttgtgtcattctttttgtatttcttttatgtatttttgttgatgttatttttgtgttgttattgagttgtttttatattacacagttcaacgcgtatttggttgtacagggatttgcagcatttttatcaacggttatttatttttttagtttttttttttgtttatcataattgctggattgacaaatagtttttaaatttcatttttttaagttgttacagtgttgttactatatttcttcgaagttgtttatcttttaggcttaacatattggacttgttctttaaatgttgtttttaggttatgttttggttttttcctggttgcttatttttagatgtgccttgtacttgttgcgtgcattttatttttttagttgttcaaatttgttgcttatgttttattttgtttttccatttttcaggtccatgctaagagctcagagaagtttgaagactttgacttaccaaaaaaaaatcctcctaaggtgtctttttttctctgtgttgtttttattagtacttttctctttctggttttagtcttttgtttttttcctcatgttttttgttttaactgctactacatgaagaatgggattattacatatatgatcagaagaatctgtttattgcgaaagccgtctccactgctaaattccaggttatacataatatttatctcattatcacaataactaaaatataacaattgaatgtgaaaaaaataaacattagtgctcgatttgaacgggttaacccgactaaaccgaccaattcattgggcggattgaaactttttttcttaattgggcgggttgtacttaaatttttgcaacctgatatttatattgggttaaataaaatgtaacgtaaaccgaccgaaccgaccgatgtacatccctagtattatgtgttatgaggttttttattatagaactagttttatttttaatttatgtttcaatgttctaggaactggtttcccttttattttttaattgta

SEQ ID NO: 84030 - DNA, 601 bp, Cannabis sativa
aaagcaaaaagttaaagcatggaaaaatagagcactgaagaaagctaaagctcgaaaaagaaattgagcaaagcaaaaagctaatgcccaagaaaaaattgggcaaagaaaaaaaaaagaaagcccaacgaggcaaaagctcaaagaaaatgagagcagcaaaaagctcaaagctcaaagtttaaagcagaaagcgagaacttaaggaaaaaaatccatgacgcaaagtaagaagctaaaatgtgtttggaaaaaacatctcaaaagcttaagcatggagtaaagaagcacaaacgcacaatgtgcttatctgaactacgaaaggcttgatcccgtcgaaggtacatacgtaggcaatctaaataaataatagatgcaaccaccaaattaaaacttcaaattgctctccctaagcttaaagacaaatatgcaaagtatttttcctttcaaattaagagtggtggaataagaaatctacaaagagatgtacaaaagtttaaagttactcgagcatcacttgtgtccataaattaccaagcgcatgcttgagagggcatttgttgaaccattttttttttattattaattattatataaaaaa

SEQ ID NO: 84031 - DNA, 3478 bp, Cannabis sativa
tcggccacctcgcatctctctcccactacctcccacttccagtactgctgccgccacccaattcaactggtcatcttcctccgcgcctatctcagccgccgatctcgacaagattcaagttctcggaagcggcaatggcggaacagtctacaaagtccgccacaaggaaacctcagaaatctacgctttgaaaatcatcaacgacaagtccaattcaaatttccgctcccagctcgacaccgagatggagatcctccgccgtacggactcacctcacgtggtcaaatgccacagcatcttccaaaatccatcgggagagtttggtatagtcatggagtatatggattcaggaaccttagagaatgttctcaaatcggaaggagctttctctgaatccaaagttgctgacatagcaaagaaagtcctcaacggtcttcactaccttcactcccacaaaattgttcatcttgatatcaaaccagccaatctcttagtgaattcaaaaatggaagttaagattgccgatttcggggtaagcaaaatcctcggccgtactttggatacttgcaattctttcgttggaacgtgtgcttacatgagtccggagaggttggattcgctgacttatggcgaaaattacgacggttacgctggagatatttggagtttgggtgtcactctaatggagctttatatgggtcaatttccactacttccgccaggtcagacacctaattggcctactttgatgtgcgttatatgtttcagtgagctgccaagtttgccgaaaggcgtttcggatgagtttaggaacttcattgactgttgtttgcaaaaggaatcaagtaaaaggtggtctgcgtcgaagttgttgtctcacccgtttctctgtaaagattctccaatcaaagaaccataaatctgacctgaactgactggagagaatcataccagaaaattcatgctatttttttttttaatattgtagttgtaaaaatagttggtggaattcagattaatgagtacattttaattgggatctaacattaacgaaagggattaactgattcatattgtatagaattttttttgttatgatttttcatatatataatttcatttttgtataccctcaaaaaaaatttcatttttgtaagtagtaactttcatataatgcatgtactaaagcattattattttgttttaggaatttaggaatggagcaaaatatgtttgtactagcttccattgttgttgataaaattgtaattaataagggtttgagaataatttgatataaatagatagttaacattttattgattagttttattagctcattaatttcgctagttaaattttaggatttgaaaataatttagtgttatactactttcactagcttcttattttatctatatatagaaaaatttttaaagcttctgtaatatttttcattcaggttgatagggaaaataaaatctttataatgtatttaaaataaaatagaaatttgatgtgaatgatcttaaaatacaataatcttaataaaagaataataatatactttagatatgaaagtaaaaggtaaaagcgtgaagacatataataaatcattgcaataatacaaataaataaattaaaattattttaacattaataacaagccaatttggaaaacttacaaaaatactgaaatttttataaaacaacagtagaacacaaaacagaataactaaaaacaacagtggaataactaaaaaacaacaatgaaaatttaacacagtacacagtataaaacttacacagtgtttttgaaaaaagcacaatatttttgaaaaaaatttcatcccacagtataaaagtaaaaaagttagaaatttcagtatgtggtgtaattatcccatttaatcttgcttagacagccactaaatttaagttaaaacaattaatcaaaacacttttttttttttgaagaaatggtattaacgcaaatcaggtaaaataatagcttgcaaatccgtagggacaagccccctaccataactacaacctaaatataaacaagcatgcctaactaaataattggcggccttgttcgcagatcgtttaacaaagacgagagaaatattccttaaatcattgatgagagaaatacaatcagcaacaagtaaaccaaacgaggaatacatagttactttgttcaaaatagcattgacaagcacttgataatcggactcaatcacaacttgaggaaaatcgttggttttcaaccaacttaggacttctttgagcccaattgctttggccatagcaggatccacatgaaactactgctccatagcagtagcaaaaagaacacaaccctcatagtctctagccaaccaaccgaacccaaacctcttctcagcataaaccgaagcatccacattgattttaattgtattcaaacttggaggttcccaatgtggataaatgacagcaccagcatgcatatcactctcaacatgttgagttttcgcacttttccattgatcaaagtaagctaatgcaaactgcactacaactgctggaaccagccttttactcctccaaacaacctcgtttctcgccttccaaactgcgcagcaaatcacagccacacctcccaaagaaaaagatgtcagagtgttggatatattagaaaaccagtcaacaaatttcacaccagcagcaatagaaaggctggtgttaaattgctgccaacacagtcgagcaaaagagcattcaacgaataaatgctcaacagtttcatcacttagctgacagaatgggcatatcacaagggcagtaacatgtttcaccttcaaattaacatgagttggcagattattacgacaagcacgccagagaaacacagagactttttctggtattttcaagttccacaacttcctccacaacctagaattatttccactagtccaccttccattaactacttgaagcctcttacaagcactcttaacagtgtaatgacctgaggcttcaaaagaccagtatcgagtatcaaattccatggatgaactaatcacaaccgcccgaatcaattttctgtcatgctcagaaaacaggtcatgaagaacatcttcatcccactgccttgcattcggaatcattagttgagaaactttagcatcaatcaaagcatgatgcgaagaggaaacataaggattttctttatccatcaaccacaattgattcaaaacatccaccaagtccacacttgctacactccacctaacacccgtctgaatcaaagattgactcttagaaatattccgccaaacataactaggattatttccaatactagcatataagaaagaaccttgacggtaatatctagctttgaaaacacgcccaaccaacgaagactcattagttaacagacaccatccttgcttccccagcatcgctagattatgatcatgaagac

SEQ ID NO: 84032 - DNA, 1300 bp, Cannabis sativa
  modified_base (1088)..(1091): a, c, t, g, unknown or other
aatacaatacgacctaatacagcgttccaaacgagcccttattttattattatataatatgtgtgttacttctcctacacttcctcacttttttttttctgaataaacacttcctcacttaattagagatatttgtcattattacattttatgaatttgataaattatgttgtcttattcgcttattcattcattattgctttttttagttatattatattttaaagtattattttattgaatcattagatttaaataattcgtttttatgatttttaatacaaaaattacttaataataatatttcatttaatccaattttgtgtattttaaatttgcagcaaagttgttcctttttttttaatgaaaatctgtcaattcaagtgttgggctttgttccaataaagtccaaatttgaaaggcctaaactcatcttgaagtggcccaaaattggcccagttccgcctcacttcattcaaatttaggaggtaaattgaaaaatatctctattatttatcaattaactaaatctacctttaatttacatttaattgaaacatagctcttttaatatgtactgcactcaaaataccctgacattagagaatcacagggaaaatatcttgaagtgatagggataaaattggtacagtgtttaataaaagtggtaaaaataatagactttaaaaaagaggataaaaataaaataagacaatataaaaaaatataaaaaaagtataaagtctaatttcctccagatttagagtcaacacatgagctcacggaagagattatatttgggagaatttacatctaacacatttaattagatctaatttacaattttaccttttttttttttttttacttttttcatgtttgcctaagttttagcaaactttcattgcctattttttttctctttcctctttctttctctttttgttaactttaaaaataatttctgaccacattattacttggtttaccttaaaaaaatatcattatgatctattattcaatatgaacatttcaagatgtgggagacaatttttttaggatacttacaccacatactgaaatttttnnnntttttacttttatactgtggggcggaattttttttttaaaaatactgtgtaagttttatattgtgtactatgttgagttttcactgttgttctgcggttgttctttacttgttccactattatttttagttgttctgttttgtgttccattattgtttttataaaaatacagtattttttaaaagatttccgtgggacagtatttttgt

SEQ ID NO: 84033 - DNA, 597 bp, Cannabis sativa
aaaattgttttgggcatcctttctattttaaaaataacatagatttaagtgatcacggagagaagatgagatttctaaggagccagaatagggtacccaacaactaggttaacatgggcgttgggccctgcgcccaggctgacatttaacttggagcgcgtggttctgctcctcaaatacaaattctgctccatgaattcttcttattttggtcaaaaacagggtaggagaccttgttcaaacacttgaattccatagaagtatcaaaacgagcattagaaaactacctgagaagcacccaacagctagcttgacgtatagcctggtgcgttgggttctgcttattgtagtaaattagagctacaacttgtgacaggtcaaattcacactttgatatttcaccttttgaactaggtggaatatcaggacaatcatgaagtttcaagtctacatgatttcaccaaaaagcgatatctccgagaattggtgaacaacttcaccagaactaagaattaactaagtgatgtcaacatatcacttaggcatcaaaaaatacaagtttgtgacatttttttcacttacttaagcatctaggtt

SEQ ID NO: 84034 - DNA, 1325 bp, Cannabis sativa
tcactacattaccacaacaaaccattaaccacatatccacctattccaaatcaaaactaatacaaatttattatcaaaccatcaataagttaatagttaggtttctaagtaatcagttgctcttcatgatctacatctagtcttgaaataagttactattacgtgaacattaggcacagaaaagtaatatatactagcatacaagcatgtgaagagaattatttttattctgtaataatatttaagatggaatatcttggtttttgaaaagtcactaacaaagagggtatttttgtttgttagttattaatgttatattatataaatataggtttatacatagggagagacaattttttttttttggtgagaaagattaatagaggtatacatatatatttttatatatataagattaattatgtgtatatatgggtgaggttaagggggagtataggaactgaccaaaaaatgcatggattagaatgagcacatttttccattgagtatacctcactgacattccaaattagaaataaacaagaatttcctactaaaccaacccacaaaacactcaaagacatgatgagtctctcaaaaccatatagagtcagatacatcccaacatcgattcccttttctcttgtattattatcatcacaccaatcagtagatctacttacactgtctatataattatgctccttcgaatacgtccatatacttgtgttagctctctcacttttattctatctctctctaaatccttccaaaaaaaactcaccaactatatggaatcaatctaattaacaatttcccaaatattgctcatttgtacatatatacattataaattatttataaattcacgagcagaatattattgcatcacgatttttaggtgctatcaacccatcttgtgtttcttgttcaagtgtgtataattaagttctggcttttcgtcaggactgttgtccctatattaatatatatattttctagttatgtagctgatgtaaattaatctgtggtagatttagttatatgtatatttatgtatagaggcagaaaagtataacttgtatatatatttccccctagaaaccttaacttttcctagggcataggtagtactacacaggagacaaggagattattctaggttgtttctcttcttccattttaaggtattttatagaactagttgttgactttattagggtttgcaggggaaactgtggaagagaaggaagggaaaaaaaaaaaacaataatggactaattttccgaaggaatttaagtcatccccaacaagtgtattccatt

SEQ ID NO: 84035 - DNA, 622 bp, Cannabis sativa
tgggattgggtttgggacaaaggtgaggggttcgaggtctaagtttgatgagtttgagttttagggttcaaagtttaagctcagctaaggagcagagtacgaatcgagagctaggagtcgggagccaagtcaggggtacacatttcgtacgtgtctaaaaaatatgtacatttactaattactattaatacactcattaaaatcattattatacgtcttaatttaattgtgagacaacaatctgtacacacagttcgaagttgaactattaataaatagagctcattaataaatcccaagggagatgagtcatttttatccaccagcttttgtttttagtttttcacttaagcattgctattaggtatcagtggtgtctgacactttctatagctattacttaacgattggttagcgatattttctaaaacttattttcttaagttatatgacactccaaatcttctatcggtagggtcaaaacagtgggatgctgaagtggtgaacaatctttttaatgatagagataaagaactcatcttctctatccaactgagtgatagtgtggtcagcgattcttggttctggaataaatcttcaactggtttttattcagttaaga

SEQ ID NO: 84036 - DNA, 3898 bp, Cannabis sativa
atgaagatgctataaacaaaaaccttaattctgattcctccatcagaatatgtcgttatgattcttttatagaagccttttctgcttcctgtctacatggagagacgggacgatgctgcactggacaacaagtgagagaactttgttgtgttaataattttctatgcatgtgggattcagatgacaataatgatgaagaagtaatccttaattctgttttctcattgtttgatgagggtgactgctctggtgtaaataaatcacccaaagaggacaatgtaaaagatttgggtgagaaaggtaaggagccaaatggagatgatatagaagggggagacaaaggaggaatggatccttctcccaaaaacagtaaatgatgtactgtgttagtttccatgttatatctttctttaagattttatgtattagcagtgtttgtggtaaaatttgaagtttggtttattttgaagtagtaatgtgacttttctccttcttaagtaattgtagaattaaaattaaagtaaataatttttataatacaaataagttcaaaatgaaaatagattttagataatagacacctttacattgatataatagtacaacgatagagcaaacttcttatagggtatctcaataaatggcataacaaaaagttctataacgaccatatgagatgagatttaaaataagtactatatataaattaccactatatgaaactcaatggatgttcaatcaaattgtataacatgagggaactttcgttgagatggagggctactgtctctgaacggggacttgtgtcacgaaggacttccttttggagtagggtttcttggttcttctttgggatggattgggtattgagatatggcgacctcggtgtagtccagaatgtcatcaatgatattctcgaatttttctctagaaatgtttgcatcttgcatggcatgggcacaatggtacaggtgctccgcaagtcgcaatgattcatgtcttgcctcggttgctttcacatgtgcatccctgataagtttggcatgttcatgtagaacaccctccagcctagcacaatttaaacatctataaattgatgctgaacggagtctaggactccttgaaggtgtacttaaggctctagttaaagaatggggatgaggaggggacttttcaggacttgcttcgaaagggttgaattttgagtaagtgtctattttagttagtagatggtaatagctaatacggagtttcaataaatttcttgtttcataatccaaacctttacttatatagtggttggtaggttgatgtacacgtaatgatgttcatgtacacgtaatgattcttttttgtgaatttaaccatttaatagttaaataatgtgtacaatgcaaataaatcccattagtaatatctgatacaaggagaagggttttactcaatcaaattatgacatacatttcccgtcacattgatgtacgctactgtttaattaagcaatgggttgatttaaaataaaatcgagtaatatcaaaaaagttaaatatgatgtggcatatatattaaaataaactcgaagtacgttattataataaaataattatttctacatttaaaatttaaataaaatcctttaaaatagaaataaacaaggaagagatcatgaataaaattaattaatatgacataactgtgcaaaaatcttcgagtaccttattgaaataataagtacatggataaaattagaaaagtataaattatgatagatcatcagcttatttgataagtgaattagttaataaaatttgggataatattctttgttggtaccttattcaaaatagtgagactcaatgccaattcaacccatcaagtaattacaatgacaagtataggggtaaaatggaaaaagtagaaattatgataggacatcaaaatacttaattagtcaactatttaataaaaattgacaaaatattagttgtgatgaaaagatgaacatttttgtggtacatcaaaaattaatttgttggcatttataacttcttaaaaaaacattcacgtaagttgttaaataaatgttccacatagtatggttaatctttttttataatacaatcattttaattttaacctatttaataatttcaaattttataaaaatcaagtcatattagtacaccagaacccaaaaaatactattttaattattataacacaagaaatatatcctaaagtagtatcagtaggtttcagattttcataaaataacttattaaataaaataatgtgtaaattaaaaataaaatcccataatatctacaggtcattatttactgaaattgatttgacataacacttttaaaatcctgacgtacgttattgaaaatataggaacttcccgccatatcacctcagtaattatacaatgggaagtacaaagaaaattatacagtgataggacatcaacttgtttagtaagtcaataatttaataaaattagaataaatattcgctgttggtgagaagattaccttatttaataatttttatttaataattctaatatttttaagaaccaggtcaattaagaatggatatgtgtaaaaaattagtacacttctcagaaataaattttaaattttattaagttttcttggagtactatttttccatcaattcatatcaataagatgtactatctagtttcataacctgaaaaatactatttttaatataatagaaaactgtgaagagaaaaatgtccgaaaataatgtgcccatttaaaagcaaatctcataatatccaaatatgcagcaaacagatgatgcattactgaaattttaatgtggcgtactacgtacaaaccttgaagtatgctatttaaaaactttaacttattgaaagatggaaggtccagattattacttaccttgaaactcatctaattatgtgtgatatttttattctgtttttttttttcttattattattaaaatggaatcaatgttgctactgaagaagactaatttttttttagaaccattttggacacatattattaaaatccctaggtatataataattttattaaataatgtgtaaactaaaaatcaaattccataatatctgtaggtcataatttactgatatgttttgacataaccctgtaaaaaccttgatgtaaaatattgaaaatattgcaactttcggccatttcaattactgtaaaaaccctgacgtaagaaaataatcttacctttaattactgcggaaggcataataattccggtaaatatctccttgaggaacataatctcaatcttgaaggagtgaataagtttcgctaataatttattgaaattgcttctgttattaatgctctgcctctaggagatcgaacattgaaagttgtataccaaatcaaatttaaatttacacaaacaaggaaggcatacccaatacaacacaatcttgacataagcttttgtcaactttgccatcctttgttatatccttgaaaatgaaaagcacttaaaaatgaccttgtatttccaataaagtaattaaataatgaagctgatttgacttatatattttttaaaaaccttgcaagcacgatttttaataaatgtaaccaccagtttaatttttcacgtactctgtatagaccttgaagtacacaatttcaaaactttcaacttattgaaatatgttttagaaaaaataaatgataaacttttttttttgtctaatgaagggtagaaatttaggtaatgtttgctttgacactgtaatatacattgtaatgaaataaagtaagttgtatattgacaaaaacactatcgagtttatttcttttaatatttcaaatttaaataaaagtaacaaaaa

SEQ ID NO: 84037 - DNA, 612 bp, Cannabis sativa
  modified_base (566)..(587): a, c, t, g, unknown or other
gctctaactttgccttgcccttacctgcaccacaaagaacccgtgagtcacaaagactcagtaagaaaagtaacaaagaagaatacataaaataactaattgtccatttcactattataaaaggattaaacaataacattcaagagtgggtaatatgaccagccatatgcatagaaataaaaatgatcatatattgcattgcctaatcaaacaagcccatgtcataatttggcatcatatataatgtcattgcatcacctaatcaggtgagcccgtgccacaacctgacactagtgtatcacattgcctaatcagacgagctcgtgtcatagcttggcactcacatgtcactgacgcccgtacctaatcaaacatcactgataggaagaaacctaacaatgatttcaatttagaatcacaactctatcgtggttgattcacaggaacaacccgaatatctatatccatacatcacattgcctaaacaggcaagcccatataatagcatgcatccatatatcacatcacctaatctggtgagcttgttgttggaattattttaccannnnnnnnnnnnnnnnnnnnnnatgttgtttaacatcctaatatgaa

SEQ ID NO: 84038 - DNA, 591 bp, Cannabis sativa
gaaaggttttgtaagcaagcacctccattctttctgagaggtccggatgttatgaaagtcgagcaatggctaactattattaccgggattctgaattttataggagtcactggcaacaatagggttgcttgtgcaacgttctaattccatgaagacgctctggtctagtgggacatggtatccctcacctgagatgtcactagaataacgtgagaggaatttcaagagttattcaatgcgaagtactataatgagacagttcgtagtgccaagagaaaagagttcacgtagttgacttagaaaggaaatatgacagtcacggagcataccacattgtttaatagattagctaggttggctttgggaattgtgccaactcactttagtaagaaagagaagtatcaggatgggttgaatctcaagattaaacacgacctgataattacaacagagaataccactacttatgtagagatggtaggaattcactatgagctgagggtgcaattaagtgtatctaagagtcccgagggacttagattgttggtggagacactgctcctattgcctctagttatggtaggggtggta

SEQ ID NO: 84039 - DNA, 881 bp, Cannabis sativa
ttgatactcgggatcccgatccatatgattattaatatattaattattaaaattagatttcggatttattattataaaatacgggcgttacaaagtttgtctacaagaacacactgccagcactcaaatactagcgaaagaaaaaaaaattatagtgagttattttaaattaatagaatcgcggttagtttgcacggaaagaaaaaagaattatagtcatttatttttttttccactacaaaagagacaatttttgccagtttaaaaattgatttttttaaaaaaactgatggtactgaaaatgtgtgaatatttaaactgatgttattagaccctcaatagtgtcagctataaaacaatctttaagaaatatcaattattaatgaacatacagttgaattttaaaaataaaaataacttattgttgtctgtgggtcccaatcggctatactataaccgatgattttaaatagtcgggtatacaatagttgtctatttaaatcgacaactatagtgtagatatataaaaaccccctgatataataattttcattttgtcttcaatcaaactctctctcgctccttgctctctcttgtcctccacaaacctgacgagccacccacccctcacagcctcgacgagcaacccctcctccccctcgtctctcggctctctcaccggccacccacccttccttctccttaatctctcattccctatcatttattcgtctctctctttcaccctcctcctcttgagcccatgaaaccctaaacccagcactgagctcattgagccactaattaagatcgatgggtttgctcgtctcatctctgtccctttcgtctctctttacgagattcgaggggtcatccaccat

SEQ ID NO: 84040 - DNA, 530 bp, Cannabis sativa
atatttgtctctattttaattttttttggcattgtatttttaaataaataaataaattacgcccctcacattgccacaaactagtatatacttcaatttcttaatatacagttttagaagagaaaattaatgatatatattttgttttttttttttaacaaaagagacaatgatagaattattaagagtaaatcatgtgcataaataaatttcatgtgtattcgtttcgtttctttatttattttgctgtttggtgttcttggattaataagtgtaaaatgatcaatctcttattaaagcatctatcaacccagagagagttaagtcatgacatgagatcagaaattttctaagatacatatatagttatatacctttattaattaatttgagtaatgatatatatgtggtgtcacttcaattattatatatatgtgacttattcaataacactcaaacatacatatataattcttccttaatattcttagacactaccctttatggatgaactataaccattatcaaat

SEQ ID NO: 84041 - DNA, 530 bp, Cannabis sativa
tagatcagattattattaagttttattttgacaaaaaatcagtgaaggtcctgtttgtacaattttagaaaatactgggttcatattgtcatttaacaaaacagagagtccaattagtaatttttgcaaaacacaaagtccacaatcatatttaccctaatttatatgagtcacgacataattgataacacaacttaaaaatgatatggcataaataggttcagagtgaaatattcaataatcttgtcatatttatgtttacactaataatagtgttgtgttataagaatggcatggagtgacaattttctctcccgatgacgaagaagaaatacaaccggaagccagttcgattacagtattattctgattagatatataacttgctaggaatggaaggcataaagattcaacatgtgtatttgacgatgcaatgaatgatagtattcctttgcaacatgaggaggagagcatggaatttgagaatgatctttcagatttgtcttacttttctaacctaattttaggaa

SEQ ID NO: 84042 - DNA, 1033 bp, Cannabis sativa
gttgttttaaaccctatagcgtcacctggaacagcgtcggtagcgaatttcaccaaaaccccttaaaaactgcctctaaagcccaattttgtagtagtacaatcaagtctacttaatttagaaatttcttcttgatcaattatcagaacaagatcactaaacatacatcaagaatgagaatcagaaagtgtgtgagagagagagtacgtaccaaagtgagaatgaaaattatgtgagagaggagagagcaagtgtacgtacgtaggagagtcagaatgagaatgagactctagcaagagagagaatattttattcagtgtgttattccaggatataattaatattaattaatattgtgaccagagagagaggaagttacccatttttctctgtggcagttattccttacgattacgattgttaactatgtttgtgtctggcttcgtccggtagaatatcggtgggcgtccaccccatttcctgtgcccggtggtggttctttcttcttctccaacctcatcgttcttttctatgcatttttgactggtgtgggaaatgaccttctctggctatgcaattttcacgctcaggggcatcaaaattattcaatcctaaatggcctaaacgcaattgaattcatgaaaatggtgttggtacaagaaccatggcattattataatcaatacattgttttgtgttcactaggtgctcgaccaaatgccccaatgaaatatatgactcaatttactctctggattcaaccacatttaccattaataaaatggtgcactccactctcaggtcgactaaaagttacaactagttaatggaaattttctcttccaatagttggtgtttgggcgataagaagaactttgcatggaatgtactttcaggtattttccggcatactattggctttctcaagactaaggaattggaaattattatagcctcatttggaacaatctggagattattttgacattgattcatgaagttcaaggccatactcatcccaatgatttagtct

SEQ ID NO: 84043 - DNA, 619 bp, Cannabis sativa
gtgttgtgtcgggtgtggtgttgtttatgtgagggctcgcgtgcgatctcatggtgcatgggggcttgcatgcaagcccatatgttgtttcgtgtcgagtgttgttgtgtgtgtgagggctcgcgtgcaagcccatgtgttatgtgtgtaagatgaagcagggatggaatttgaatacatggtgaagagaatgtcgtcagaggaagaatatcaaaagacaaggtgtgcaagaaaaaagcttacgactacgccttttggaaactctgaaagtaaggaggtatgagtagtggaggcactacacctgcaaggtctaaggacccataagggtatgttgcagccaccacctctgcgacctaggaccacctaacaccaaataagggtacgagacgcaacgaccacctcctgcacttgtagtttgtagctcgaaagtgacaacttatctctttgggaccactatataattcaagttattagagcttataaatatcttattttcaagtgtgagagggggttaaaaaattaagggtgtaactcacaaactgaatgcaatagaagaaaattactctcctactcaaaaattctgttaaccatttaaatttaaatttgcattttatttcac

SEQ ID NO: 84044 - DNA, 801 bp, Cannabis sativa
tatgatatatttatgtcattttctctgaaacattacaatactataaagtttttattattacatatgatatgtgccctgttgaaaattagaacacgttaggagttttatttactttaaaaacttattattattataatactaagactgcaaaagctcaacagtcaggcctatgacttggtcgatcactaagaaatattgcacatttgggaatggtttattttctttaaaatcgaaacctaacaccaatgagtttcacactgaatattaaattatagttacattttttatatgagcttatattaatttttatcattttattaaaatttgaaatgattaaatagttatgtgttaacctatattattattgatcaatagttaattagtttactaagttaaagcataaatgtgaatttttctaattaactgaagtgtatttgatgagcagatccaatgcaactagagttatgtaactaaatctttttcctaattttttaaatacttattgtctcatcacaattgtatacattttgataatcagataaataaaactgcttctaatttaaagatctagggagaaaaacgtagttgatagtattgcactatcaaattacagtaattgatatagatcaatcaagtacggatacctaataattaattattattattattattgtgttttaaattatatacatatttgtatcttagattttattgaaattctagtatgtggtatcaaagcaattattgtatatgatttaagacttataaattaatatctttaattacatgttaattttgtaa

SEQ ID NO: 84045 - DNA, 1070 bp, Cannabis sativa
caccgactgagaccattccaaataattatgttcaatctatctatagtgattttcatagacgaacaaacagtatccatggcaggggtgtgtgaactaggtgtggtagtagcattcatttgaagttgagttgaggtggagtcatccattagaagaagaagacgattaaaaaaaaattgtaatttgcaataagttgaagttaaaattcctagctctaataccatgtaattttttagaattggttttcttaattttatttgataacagctgcatataggcatatatatatatatataacaaaaaatttaacaattcagaaaaataaaaaccttaaaaatagaagctgactaacaattaattcctagatttttagtaacaacctaaggataactttacacgatttaattcacatgtaaaaatctcttgtcaaagtataaatataaaagttgggagaaaaattaacatttcatataaatatatttgttctttgacattggggaggaggatttgaacttggaactttctttttgtgagtagaggtgtggaattacttagattatgaaataataataaaaaaaagtggtctactagtttctaaatctatattaagattattacctggtaagtttcacaacaaatttctatatttaaagaattttggcacaccaatcgtgatttattttaagggtgtttatgaatttgtttggttcgaatttttaattttttaaaataaactagtattatgattttttaaaaattcaaaactaattaaatgattaaaccaatttactcaaaaatgaattggtttggttcaaaaccataatttgcatttcgtaattgtcttaaaaaaaatttccaataattattcattattttagtaattttatttacttttaataaatctacaatatataattaacaataaaaaaaaattatcataacaataatcagtcaatatcaatattctacttaaagttatttgcaaatatcaatatttcgttcaaaaaaattatatattaattatatataaatgaggggcaaaaaggtcattttgtgtaacaccctaactaaca

SEQ ID NO: 84046 - DNA, 1082 bp, Cannabis sativa
tttgttgttataggtgggacactttattaccgatcatcggatggggtgttagcaagatgtttagaccaagaggaaatctctactcagatggaagaaattcataatgctgcctgtggagtcgaaggtcccaaattatcaagaagattacaaagggccggttatttttggctagaaatggaggaagatgctgcaagattgcaaaaagattgtccgcaatgtcaactcttatttaataaccatgaggcaattttgataaccgaagattacgattggaggagaccatataaagaatatttacgggacaaaataacaccatgtgataagaaagaaaaagaaaaactactcagacacattagtaagtatttcttgaaaacagatgatgacctctaccgcaaaggattcaatgggaaattattgcgttgcatttgcaaggaagaagccaatgaagtaatggaggaagtccatcgcggggattgtggtgaacatcaaggaggaagaaaattatatgaagaaattgttcgcataggatattattggccgaccatggaagcagacgccatgaaattcgcaaaagaatgtcaaaaatgccaaatttttggagacaaaatccatgcgccagctatccctctccaatccatcaccaccccttggccttttcacacttgggctatggacctcataggtccaatctcgccaccctctcagggaagaatttggattttagccgcaacagagtgtttcacaaaatggtcagaagcaatcccattgaaaaaggcctctacagaagctgtggccaccttcatcttagaacacatcatttgtcgtttcggcattccaaaaagaatcttgtcagataatggcacgccattcaccggcaaagcgacaaaaaagttactagaagattatcaaattttccatgggaaatcaaccaggtactacccgcaaggaaatggcatagcagaagcgtttaataagctattgctgcgggtattaagtcgtatggtacatgacagtcccacaatttggcatgaattcattcctctggctttatgggcatatcgtacctcaaaacgtgggtctac

SEQ ID NO: 84047 - DNA, 844 bp, Cannabis sativa
ctttaaatctttcccaatattcattaaaattcttcgcgatctttctgataaaatttggaaatttctctcctaatattatccgttttagacatgggaaaaaatttggaccaaaatttattaacttattcattccaagtagaaatggatcgaacagggagtaaattaaaccgggatttagacttatcttttaatgagaatggaaaaagtctaagcctaacagattcatcagaaaaattttgaaatctaaaatcagaacaaatttcttaaaaatctttcacatgcatgtatggatcctctctttgtaacctataaaaagatggaaaaagttgaattatagaaggttttagctcaaatggataaagatttttatgacaaacaatgtaaacaattattgacccataaataggcgaaccaaaaatattttgaaatttaaatgacaagttaacttttaggatttcattacaatacctagagccaaaataaagaaataaactacaattttttttttatttggtgaccaatatttatgaaaaataaactatagcaaagtttcttttgattgatgatgatatatatttttttctatatatgtatattatatatgcatatatatttttactgatatctatatattttactttactaaatgattaaaactaagatattgctctttatatgatatatatgtatttattttaagggcaatatccacagtaatagcaaaattttctttggtatatttttaattttttagaccaagttacgctgatagagaaatgttgctcttgtttgatttttttttatatatatatagtatgtgcacaatatatatttttatactctt

SEQ ID NO: 84048 - DNA, 1343 bp, Cannabis sativa
ataactattaataataatatttttctttggtagttatgagacgagtttcgatgtttacttgttgaatttgaggtgattgtgagttaaaaatcaagtttggaactttttaaagattaagtccgagcttcagtggcattttttgtttaaaggctcgatctttaatttatgttatgtcaggattgttgtatatatggtgtatatgtgtcatgtgaagtttagaatgatttagataggtttcggtactatttcaaagagagaaatttgagattttcgtgcccaaaaatggtctgccatttttgaaaattcctcggtgatcagaattggtatttttgtcataactttttatttggatgtccattttagacgttctatatatcgcttcaaagcatatgacgagctctacaatatggtgtatgctttagagccaaaatataagttttattttagtgtatttataatgtggggttttgtagaaaaccctagattgtcttataagaatattaagtagtgttttgggatagacacttattggtttaccattgttatgacataaggcccgagatcatcaatcattctccaagaaggtcggccaacatacctaaaccatacctaaaccaaaactaaaccaaaactaaccaaaacttgaggtaaacttgaggtaaaaaaaaggtaaaaaaaagtataatgtaccacatggcatgacaggtttcgaaattattgattgcctgactaggcaacgacaatgtgaatttgatacaagctcacctaattaggtgatgcaataaatatatagtttccatgttatggcaaaggcttgcctgattaggcaatgtgatatacaagctcacttaattaggtgatgtgatatattgatgccaggatatggcatgggcttgcttgtttatgcaatcttatgtatcgataccattattcaggttgttcctgtgggccaaccacgataaagttatgactctaaattgaaattgttgctaggtttcttcttgtcgacgatgtatgattaggcacgggcggcagtgacatgtgagtgccatgctatggcataggctcctctaattaggcaatgcgatacattcttgccaggttgtggtacgggctcacctgattaggtgacgtagtgaaatcaggtatgatgcaaaattatgacacgggcttgcctaattaggcaatacaatatatgattatttttatatccattcatatggttggttatattacccactcttgaatgttattgtttaattattttataatagtgaaatggataattagttatttaatgtattcttctttgttacttctcttaccgagtccttgtgactcac

SEQ ID NO: 84049 - DNA, 1025 bp, Cannabis sativa
gaacaaatcattacatgaaacttttacgcataccgacaaacatacattacataaattaacttaaagatattagaaaaaaaaaaaaacaattaataaggaaaatgggaattgttgtcagtttgtcaccaaacaccgacaacaaatctacaatatcccttcaaccaaaatataatatattaagcaaaaaaaaaaaaaaagaaaaaacacacacacattcacacaaacaaacatataatattatagaaataaaatctttaatcagtttgatgcaagagcacttcattaatcaaatcatccaaatttgtagacgagctcccacttggagcagtggcttcatgtaccaatttcttaaattccattgccttagtcttcattttcttacctttttctccatcgaataactctttaaccagatttgtcacttgatctctcttaacatcactttcaatctccaccgccacaccccattcattgcatgcaaaccaacaattggtttgttggtcagcaaaatatgggtaacaaatcataggcaccccactagtcaagctctccagtattgaattccaaccacaatgtgtcaaaaatcctcctatggaggggtgatttaacacatcctcctgtggtgcccaacttatgattaggcttctgtctttggtttggtccaaaaactcagatggtagcctaccttccccaattatcaagtctggtctaatcacccacaggaaaggaacattgctatttgcgagaccccaaccaatttcaataacttgttgctcactcagaaccgttatacttccgaaattgacataaatgactgagttaggcttttgagtactaagccattttatacactcagtttcttccttccaaagactgtaggtgacagtgtgtagagaatgttgtggatagtgatcgagtagaggttggagtggtccaattggatatatttttggaagtgaagtagttgaagaaagaacatccaaaacatgtggttccaatgcttcaaatgtctgaataacaacagc

SEQ ID NO: 84050 - DNA, 617 bp, Cannabis sativa
ttgttgacagtataaaagaaaaacagtataaaagaaaaaaaaaggggaggacagtataaatgttaattctgccgtgtggcagtatttttgtatagtaaaaaatatatattcatatcatatgtgttgccttgcactaaaattttgaatatagaactaattaaatctaatttattatttttgttagttgacaaagaatattatatcatagttcccaatataaacaaaatatatgcatttattctaaaatgtaataaataaaatttatgtattagattttattaagatatacaataaatatgtaattataaataggtatgctgtgctaatctactatagctagtataaatatgtaatatgcaatgaaaaaaaaaatctgggaaattaataaatcattattttgtaaaaattcaagtaatatatatgttagtgtatatatataatgaagtgcatgttgttgctttcagtgatgtgttcctatcttttaataagaagttagaccacaaaaataaaataaaactatatataatatatcagtataaatgaaatgaaatgatgttgggcttgggcagtacaaaagtaatgatgttgggcttgggcagtacaaaagtaatgaaatt

SEQ ID NO: 84051 - DNA, 877 bp, Cannabis sativa
taattaaataataattattaataaaaagttactattaaaataatatataaaaaattactaattagaaagtcattctaaattaaaatatagctataataaaattatattatctaattacttgttattattaataattttatttattaaaaaaataaaacttcagcaaataagaaaaataataataatgtatattaagaagtttaacctttatagttttaatatatatatattaatttattaatatctaaaaatattaatataaaattatagtatagaaaatatgtttgttgtatacattttttaaaaaaaatttgacgacaatgaagtttttttggttaaaatattattatagataagcttcgttttgttagataacttttctaaaaaaaaataagaattattatttaaactatttaattaaaatgttgataattaattgataaatttaattttttaaaataaaataacataaagtggaataaggaaaataaatattttttctttaaaaatattaattattaatattgtaaattaactaattaataatatctaaaaaagataaaaaaaaaaaaaatcttcaagtttgttacaaatatttgagaatatgcaagttgttctttaacatcgtgtattgttagagaatattaagaatatgcaacatcaatatcaaaatttaaagaatattatttgtcacaaagaaaaattataatatataaattagaaattattttttttagaggaaagtaatttattataagtagaaattaaatgtgcatggtttacttacaatattaccaagagagatgacatgaaggaaagtgaaatcttgtcctctgaatgtggaattttcatccatctctttggggagtagggcaat

SEQ ID NO: 84052 - DNA, 687 bp, Cannabis sativa
attttcttatattatgtaagtttcgatagaagtcaacatcatcttaatcctattctcttttctgtccttatgatttagccttatattatgtgctctcatttatactaatttcacacatgtttagtgagagaaaataaataacatatcatgtattcttgcccattgagttctgatagtcaagaggtaagaatctatttcttttttttctgcatagattggcttctattgttctcactcattaatatatagatttatatatataaactaataaagtgatgaatttgtattttttaagtattttttaatgccctttggtgtttttagtaatcatatatatataaaaatgtgtgcaatcttttgtttttctttattgtttttgtcttttgagaagatatgttcaacttttggagataaacaaatagttacgctgttacttttcacaacaatatcaaactataaacttttactagcttagacataattgacttattataaagattttacgaataatataaaagatttgtttgtggtatatataatatatagggagttcttttggatggcgatcaatctaccaaaaaagtttcttatataaatataattaacatattatttttcatgaaaaatatgttaatatttggataattggttaccttcgatagggaattattgaatcgctgaaagaca

SEQ ID NO: 84053 - DNA, 697 bp, Cannabis sativa
  modified_base (63)..(71): a, c, t, g, unknown or other
ttaccaaacggcacctaaataaaaagaaagataatgttatatagaaaataataataataatannnnnnnnnataataataataataataggaaaaaacaggtaaatagcacatgggttttcaaatttcacttaggtggctaatatttttgtactgtagcaattagatcccaacctatatctcttgctacataggttgttattattttttttttatttaagcgtttatatttacaaccatgttgtacttgggactccaacgcaggacctccaagacacacactcacttatggcaacttgagttagcctcaagtacataggtcctcattattaaaatttatgaaataaaacttaaattttatatattaaacttaaatgagaaaaataataataaaaatatataaattaacatagctcttgtttttattttattttttatcatcaaacttcttctaatttttttattttttgcaaagtcaaactttttttaattaggggtaaatattattttagattctgtattttacaaaaattactaattcgattttctattttgttaaatgacaaaatggaccctgtattttttagaatagtaaaaatatgatcctgcttaatttttgacaatttttttaatataactaatttgatggcaattcctaacacgaacatataacaaaaaatataaatagttttgtcata

SEQ ID NO: 84054 - DNA, 1294 bp, Cannabis sativa
gaatagacctcattggtcaattcccaaagggaaaagaaaatgtgcaatatgttgtagtcgcagttgactacttcaccaagtggatagaagctaaacccttggcgacaataacttccaagaaagtccttgactttgttgtcaagaacatcatatgtcgatttggactgtcatagaagattgtgtttgacaacgggaagcagttcgacagtgacatgttcactgacttctacaatagacatgacatcatcaaaagtttctctgccgttgctcatcctcaaacaaatgggaaggtagaagctgtgaacaagaccctcaaggacactttgaaaaagtgtctagaagaggcaaaaggcaattggcctaaatttctcccaaaggtactctaatcacacagaaccaccgagaagacggtcaccgggcaaacaccatttactttagcctatggctatgacgcaatgtttcccatagagctagtgacatcgtctcataggaggataacttatgaacaagaaatcaaaaacaccttgctggcgaaatctcttgacgaaatagaagaaagaagagaccaagccaaccttaagttgtaggcctactagtagaaggttgcaaggcacttcaacaaacaatttaagaaaaggaaattcttcataggagacttagtggttcgaagagtgttcccaaataccaaagatcctgtagcaggcgtgttcaaaccaaactgggaaggcccttatcaagttatagaaataataggtaagggcgcctacaagcttggtaggtacaataagaacatggagttagctctcttaccaaggtattggaatggaaaacatattaaaaagtactaccagtgaccagcttgtaagaacactgctcttcagtagtagttctggcaactcatttataagagttaatttagaaagagctgtctccatcactcttcagtgatgacctctgcttggcatgtcgggcaggggtagccacatgacttctagaagtagactttttattttgtaagctttaagaatcaataaatgtacgtcgcacaacaacacacatattaaagacaaattgacgaataaaatcggtgtttcagtttaatattgtgtctaaacaacttgctaacaagataacttcttaaagttattatttattttcagttcgacaagcatacaattggccccccaagaaaattcacaggcaaggtctaagaaacttggtgagttgcaagggaccaagagaacataagtctgcttgctcgcttgggggacacccacaccgtacaagcatcgaa

SEQ ID NO: 84055 - DNA, 1192 bp, Cannabis sativa
tggtaataaataaaagatttggacattcacataattattaatatttataacaaataatttctaatttttttttctaataggcactaatgagttccttgctttcaattttccatataaatggagcaatcttcctattgagattgaacatatatataaaatattatttatgttatggccaactcaaagctatattattgtcaacccgtttactattaaaataatctatattgttaattataatttaaaggttaatcttatttataactgacctaattatgacttaattttttataattaattagatgttattcggagtattcttagatgtagattctactgtatattagtaaataattattttttattattatactaacaaaattaacagtcgcacgaaaagcggctatattgcctagttactaatacaagaaccgtgtacaagttgtttagcagaaagctaacaaaattatctaatcattaactaactgtttcactagctttttaactatcagaagattaattaatcagaccaattaatatattggtttactagggacaggggaggagcaggcaatgttaaaccacccctttacatgcctaacttagtcttgtatttagctgaacctcatccttgacctatatattaaaaaaataattcattctggagtattaataaagtaattatatattttaaaaaagagagcataagatgcatattacttcatagatgcatattacttcatacttttccaaaacttcatacttttccaaaagaatatatatatatatatatatattataattcacatgtaagataaaatatattagtacatggaatggttacttgggcaataaataaatattgatatatattaaacaatgtgatagttatactatattgtaataattttattatatatgttggttttataagtcacgaaatttaatgattttattgaataaaatacacaaatcctttattcttagaatatggatcgcaaagtaaaaaaatacagaaataacccttaaattgtatgaaattcacgtacattaatcaatagaatatttaataaaatgtacagttatatagtttttgggctaattaaaagtaaaatccatgagtatagagagctctagttacgtagatataacagtatttataattttgagatgtatacaatcgttatgtata

SEQ ID NO: 84056 - DNA, 798 bp, Cannabis sativa
ttctacaatattagcttctccttggttcttattcttgttctttttttaaatgttttctctcttccacttacccttcaatgccaaaaattcatctcagaattgtccatctttcttatagtaataacacttctttcaaattggtgtttttaaatttgaccttggcttgtacccattcttgggtttcttgaattgcttcttctctgttcttccacgaacaaatagaccatcgctacttgattcaagtctttcatcaactttccttttcattttctttaaattcaaggttgttttaacttcaagcatagttagtgtttctttcccataaagtatagtatcgacaaagtgttcatttaccttagggaataaactaactagcagtatggcttgatattcttcttcaattctgaccccatattttttagtactttttgaaataatctagatgccttcgaagctctttagtttcatatccatcctcatcgtgtaaagtcttttcttcaagtagagcttattgtccaatgatttcttcatgtaaatcaattcaagcttgttctgtaataccagtgcagattcttaattgaaaacttctcaaaggacttcatctcctaaacttaaaataatagcactatgtgctttcaccttgatctcttgagaaaccttcttggcatcttgtttttccttagaactagtcaccatgattgcctctgcaagtccttgatgcacaaggagtgctttcatcttagtcctccataatccaaagtcattaagacctgtaaacttgtctacttcatatgtagg

SEQ ID NO: 84057 - DNA, 738 bp, Cannabis sativa
aagatatcaccaaaccgagttctgtgacccaaacatatgaaaactatattttattattataaacacgaccaactaattttcagccacgctttttgataaaatataataaagtgtgcattgatgtattattttttatatttttaataggggagggttaattataatcttttaattataattataatattatatttataagttttttttttaaaaaaattctaataatttttgaaaaactttaaattaatttttgataatgtaaatttaaattttttttaaaaaatttataaaaatattgtaactataacgaacccaatcataaaaaaatattttagtatatattttaatatctgagtaattatcattttaattattttaaataataatatatattattgtttaagataatttatatacaaaatataggatttaattaattaattttattttactataaaaaaagatacatgtaaataattatttaaattttatttttaatatattaaatgattgtgaatttcttataaatttacaaaatatttttttttctgagaaattttcaatgttattaaaactttaagagaaatttacagaatataggaaatgcacaaataaaaaaaaatgctaaaaaatactattggtgctaagcaccctcttaattattcgtgtaattaagtatcaagttccatataatttaataaataatttttagccaatatcactaatataagatggtac

SEQ ID NO: 84058 - DNA, 533 bp, Cannabis sativa
tgggtgggccctaggcgcgggcctagcccaccttagcctagggtcggccctgtgtgtcttcacaatgtgctccaatcatccaagcatctatgatagataattataggacctgtttgtttaatattttctaaaaataatttttagatttttttattaaaaaaaccatttcaatacaccagacctcaacacggaccctaacctagtccagacccagacccctaactcaaccttgatcccggtccgtgcccttgacttggactcggacccatacccagacctcaaaccctatacccaagaatggacccccagtgcatgatcaagtcgtggccttggacccaacccgatcctaaacctagacatacatagctccacttccaactccaagcttgacctcggtcctcaaccctggccccaaatggagtgtcagcctctaatcaggccccaaacctggcactttccctaaactcgacctcagactcaatctcaaccctacccaaatgccgaatccaaaccccaaactgtaaaaatgatat

SEQ ID NO: 84059 - DNA, 669 bp, Cannabis sativa
aggtagactgggctccctgattcgaattgcatgttcaacaggcctgtgctcgacaagaagcttcttcctccttttgagcagagtcacctactcctccttagcctcgtcttcatgctcagaatgctcctgagcatactgttttgcccccgcacctcgcttcaacttagcctcacacttaagttgaatgagttcattctcccgatgagctcccttagcccagctagcaccagatatcctctttttctccttcacagcctgaggaaggaaatccttcgggtagagcctgtattccacaaagttgtccttagaggtcaacatagtgatattccgggcagcacccgacaaatgagcaagcctttgagctctatccctaagaggaagtgtgaagggtgggcggtgatatatagggatctactggaaccgagtgaaggtggttcccatgccatccaccatgtaatactcataaaaaatgcccaattttgctaatggccttgccccggtgcccgtcaaccacttgtagtctggctgagagaagtagaagtatcccgacctgccttccttgggagtagacttcaaataaaaaaaaaccagctaagttcatggggagaaggcatatcccatttctggatggcgtagagaatgaacagggtagacaaatacttgatgccc

SEQ ID NO: 84060 - DNA, 1205 bp, Cannabis sativa
aattaagatatttgaaaataatatattttaaaaaatgataactctaaaattttttgctataacatttttgtgcttttggctttttctttttttaaaaaattaagatatttaaaaatgatatgttttaaaaaaatcgataacgctaaaatctatcatcatattttgacttttggttttttttaagatattttaaaaataatcatgtttttatcacttattactaaactgtctatatatatctatctatctatcaatatacatatataaagaagaagtacgaagcggtgacatgacattctaaaattactctagactatttttgtcttctctccttaattctttcaattttagtattttattaaagcataaatctataaattgatattttactattttttatattttttctatgaaaaaacataaatctacgaattgatattttactatatatatataaagaagaagtataaagcggtaacatgacattctaaaatcactctaaactatttatctcttctccccttaattctttcaattttaatattttattaaagcataaatctataaattgatattttactattttttatatattttttctataaaaaaagcataaacctaggaattaatattttactatatttttaataatttttctataaaaatataaaatattttaaaaaagttagaaaatatctatatatgtaaaagagagatatgagacaatgatgtggcactctaaaatctctctaattaacattattgattctctcattaattctctcattttcttaattttttattagcttcataaataataattaatatagaatattttatttatttttctcaaaattttctcttttttttgtattttttttaacttttcgttttttttaatcacacgtgagtgatgtatttatttatttatttttttttttgtgttttcggcctttttttttttaattaagatatttaaaaataatattttttaaaaaatgataactctaagatttttggctataacaattttgtgcttttagcttttttttttttaaaaaaaaaaaattaagatatttaaaaataacatgttttaaacaattgacaactctaaaatctatcatcatattttgacttttggcttttttaagatatttaaaaaataatcatttttttatcaattactactaaactctttatatcta

SEQ ID NO: 84061 - DNA, 833 bp, Cannabis sativa
caaaaaaataacttagatattaatttgcaacttgaagataaacttaagtattattgccacaaattattctactatatttgataaaagagttagtaatatttacaaaaactataataatattatttatttaaaaattataatattaaaccatattatatcgaattcttatgggtcgtgataattagagaatgtaattgggatacaattaccttcaactaatttgaattacacttaatttcaatacaatgcaattctaaatacacatttaattaaaacaaataatggaacatgtttttttatatatttaatttttttactatatttttacaaaatagtattaagatgtccattgtaactgaagttatgagatgcaccttcgcgcgtgcactttaggtttctttggaaaacttatatggagctcaatcttgtgctaagatggatgacactcgaaccaaaattcaaaccatcaggaaaggaggtacatcaatggctgattaccttcgacaaaagagagcttgggcagacagtttaactcttgtaggagatccttactcagaagcacatttgattgcaaatgtgttatagtagccttgatactgagtacctcaccattgtgtgccaacttagagagctataaaaaccattcaatgaattcaaagaatccttaatatttgggtttgtttaatttgaacccaaaattacattcctattaatctctagctctactagctcattcatacgtacggtgtcacagtcaatatcttttagtaaacacatacataatattgcgatatatattataagggatacgattttgtcccgtgatgtacttt

SEQ ID NO: 84062 - DNA, 648 bp, Cannabis sativa
gtgtttctactatcttattcaaatttattgtatttccaacttcctcactaatatcttcatcagtaaaagaatcattttttttcttcagatgatgacatttcaatctctataaaaatcaataggtagttcattcatcattacataaccaacctatttttaagaataagataatgtgcatataattctaaacaatttagatagttatatatgttcatgtaaaaactttcttaaaatgaaaaatatttcattaataaattaataatcaaaacatcataataatagaaatatttttgaaaaagtaaaagggaagtgacacttaccaatttcttctttgtattcttattaaatgtgcacccctcttcaaaatctgcttataatcgatacatatatataatatatattgagatacaaacaagttatgataaatttctttttaacaaaaatataattggaaataaagtggtgtaagaaaataacaaaaagagaataagtaatattaaatgttgtgtactatattctttgtagcaataccagaagaagaagaatagaggaagaagacgaaactcaatagtcacttttagaattgcaatagttcttttttttttggctagagtttagaattgtaatagttagttgtggtagagagaa

SEQ ID NO: 84063 - DNA, 634 bp, Cannabis sativa
tttttttttttttttgagggagctacaaccaaagagaaagcaaacgggaagtagcagcccaaagaagagaaacaatgtttctcaactaatagtcctcgtcgagccgaagagcttccctaacaagaacatgtgcaacatttttgacagatcttggaatgtacttgagggagactgaagggagaagagacatggactagcggatcagatccacaactttgttcgtggtaccaaatagcaattaagcctcatcctatttttaagaattcctataagtcacccttatcatatggtataattaagtatgtacttctatataacttaaaaaaaatatatttttagaaatatcgttaactaatcataaaatgtcatttataaaaggtgttagatattattgtgcccaataacaatgctctttatttttttttatgtgtgtaaacctttaaaatcacttattttttcatttaattttctcatttaattattatgttagacttttcacatattcattcatacatatatggcacttatacattgatttaaattatttgaaaaactttaaaattaaaaaattatttttaaaattttaaataataaaataaatcatcaatgaaacttgtcagtatatatttatcta

SEQ ID NO: 84064 - DNA, 716 bp, Cannabis sativa
attgaaagtaacaatagcaagtaccaaaaactatttactaaaaaaaaaattaaaacaaatttaaaaatgtaccaaaaaaatagtaactatcaatatgacactaaccacattattgatatagtattaagcacattaaaagtatcaataacaagtaaaaaaaattatttactaaaatattgaattaaaaaaacaaaattacaaaaatagaattaaaaaaagtaaaaaacaaacttaaaaaaacattaaaaaaataagaatgacttgtgaatatccatcctttataaatattagttttttaaataagtcactatagtatattgttcaaaccataactaaataaatataatatacataatcgtaaaagtaaattatatataaaataaaaatatattaacaatatttaatagcagttggaataaaatcatgggacatacatacctccatgacaagtagacaacactattaagaaatgtaaagtgactaattatggtgccgtttggtaacacttttatttttgaattttttaatcacaaaatgaaagtaaactatatatatatagattaacgtaagagcatctccgagtgttaaaatagtatagtgttatatttaaaattggctaattagtaatttttttttttcgaattttgatatgtactaaatcatgccccctaaatttttttggccattaaaaatttctcctgaactattaagattgt

SEQ ID NO: 84065 - DNA, 639 bp, Cannabis sativa
  modified_base (26)..(35): a, c, t, g, unknown or other
ataaaatggattacattgaaatggannnnnnnnnngggcataaaacccaacagccatatatattttaatgggtgaaatcactattgtcgaaaatttaaaaaataaaattactaattattctaattttaataaaagaacctatccctttaaaaaataaataaacaaataaaggaacgtgtgtttcattttgggttcaatataatttaaattattttaacaatataatattaggttatttgaggcaaattttttttattatttgagattattatacatataattttaattaatttttttttttttgaaaataataactttcattactatttgattgtagtcatgctcctttggctgttattccaattaaattcattgaattccattagaatcatattttattcaaaagattaataaaataataattaaaataaaagcaaattaatattattaaaaattaaaatttatataacttttttttgactgaaaagtatataaaatatataaaactttaattagttttataaaaacaaatgaaagatttttcttttctctcactattctaacatgttcaagtaattttcttacaaatccaagagtagaaattagctaaaattgtcaagagagctcaaagattgtacc

SEQ ID NO: 84066 - DNA, 990 bp, Cannabis sativa
aattttcaagtcgctaaaaattcttttaaatttatgtctaatttcgttcaattttactgacgcaatgattatccatctaccaaattatgtccataattttgatatttacaaaaacatgccccactttcacatctatcaaatcgttacccttaaagtttaattcaagttagacattgttttagccaaaaacagtcctaattttttgtgtaagtcctttctttttcaatttctaatcctccccgatttttacgtagtctatttcttatttatatggtatgtcctttgattgcatggatgatttgtccttgacctattcttctcttgacgcgtgtcctttctctcagcttaccctggtttgccacgcgtctaattgttaggtagtggatgctatttttgtctcttttggtccgactgtattgtatcttttcttcaggttgtttgtctcgcctttttgggtcgtggcctctcttcccttgaaactcctttttactactcgtggtgaatggaggaatctcaatgtcaacctttattttggtgcctctttccgacggaggtatttatttgtcgtattctaagaattttctgttctatgccgcccaatacttcttaggaagtgagttttccgtcagtgagttagatagaagatcctcttttgagtctctttcgaatctatcaatcgtttggtcttcctccgtcggtccgaggcaataggctttaaaccctcttttttttttctatcgaattttcgtgggcacctatacgtcttcttggtttttcttattgttacttttttcggggaatgatccttattttgtctttcttgcgtttgtcgtttgtgctttttatttgcttttatcttttgggttttcaactgggccatctagtattgggtctttcttattttcgctaattatttgggttttgagcttttgggcatttactttatttgggccttcacactttttacgttttattgggcctttatttttt

SEQ ID NO: 84067 - DNA, 1767 bp, Cannabis sativa
atatatatatatatatagacaaaggaataagagttagaatacaaagagttttttttttttttaatagaagaatattaatagttttaataattaattgtagatttaatacataaacataaatcttatacaaagaatacgaatagtttttttgttataaaattttgttttaaataacaataaaaactctaaatatataagagaaattaaaaaatttgaaaaagttaaaaaatgaaaaactctcatatatgatgccacataactttatctaaaattcacattattaatttggcaaatgtgaaaaggatagaatatgtaacgttggaacgtttggattttatgatatattaaaggaaaatatgaataaagatggaatatgtttgagtgattatagataagtatgtaaattaaaatgctatcatcaaaagccatctcattaaagttaattaatgagtttaaacaaataaatcaaaaaaataagaataaatcaaaaaattaggagataagagattacaaaataatcgcaattagactgccacatcaactcttaaaaacactcatttatatatatatatattgattcttcgtaagattcatagttttacttttttgttaataaagagaatgagaagaaaacaaaatatttagatttttcttagtattttttttatgacaatataaaaaagataaaaatacttgtattattgtaatatcgtatcattttcaaatttaataaataagaaatgtattgatacaaaaatgagaagagtttttcatgtatatacaaaaagacaataaaattataacaacttatggctaaaggtgtacaccgattaatcgttgcggtaggttttataagaacctgaagtattaggccgaccactcaagtgaaccactaagactcatccaatgtaaggccacctgtcaaccaagcatgagcaatagaggccaagctcttgccaacttcatggctaattataaaataataactccccaaatctcttaaagtttgggtgaaaagcggaggccagagaagaagcaagagcaagacaactcaacccaagaggtgcattgaccacctacccgatgcaggtatggcccccaggggacttggggggaaattgatgcacgaggtaacaaggctagtttcaaagcttctaacagggtgtatctggaagtatgaccttagatttctagaagccaagagcaagttgtgggtcggcttctccatgagtgagtaccgacttttagcgtcgatcagtctcttacggatgtagtatacagggtgttgtactttgccttcttctcttatggggacaacactcacagcattatctgtgactgctaagtacacacctaactcttctttatctaggggtttgagcaacacaagtgactgcgccaattgtttcttctactcctggaatgtggtttcacattcttttgtccatgcaaatttttcgatgccactgagaatgttgaagaagggtacacatttgtctgtagacttggacacaaattagtgtagcaatgtgcactgtttggctttgtacttccttgatagttgtgggtgacttcatgtcaaaaagggcttggatcttatctaggcttgagcttcatgttatagctgcggagcattttgaagcttttgtctaggtcctccatatgcccgtagcctttttggacttgacaagtatgttgtccacacacacctccatgttgcagccgataggatcattgaacatcttgttcacaagcctctaatatgtg

SEQ ID NO: 84068 - DNA, 814 bp, Cannabis sativa
actaaggtactgtgatactatgtccaggtactttattagtatcgatttctattacaatagcaatatattaattggaatagaaatacaggatcaagaataagttctaataatttgctaatttgttcattatattacatccatgtctaatcagaaaatgtgtgccatagagattctgtggtgtattgagtatagtctagagttcaaaaatgaactacatatgtcaataactttatccacccctaagtgttatagagatcatgtggagttatgaatataattcagagttcaatagatataaaagatcgttgaactgcatatattattcttaacttcttccacccctatcaggtcaaaggattttttttattaaacaaaatcttaataattgtttaagaattaacaattattcataaactttgaaataaaattcaaagtgtttatgtggtattatctctttgcagagatgaatataccatatattttgtatcaataataaaacacaaacacatacatgcattataaacatataaatataattggaattggcatacacaagataaagaaatatgaagctcaactcagaaatgtaattcattaataaaagagaaaactttattataatattctaaaaaaaatgaattgtctggaataataagaaaattagggaataaaatcccaaaccaatagttgaaatcaaattgttcatatattaaaacaattaatttaaaaattattaaaagaagattttgagctttatcatcaatcttggacaatctccacccttttgtccaaccatccgactcaactcgctagg

SEQ ID NO: 84069 - DNA, 1990 bp, Cannabis sativa
taataattaattagaaataattttaatataattatttaatatttttttttcgaaacactttttaataacgacattgtcgtcattgataataatatcaatgacgacaatgtcgttgttgatgcactcagatttaaaaaataaaaaataaataaaatattattcccaacgacaatgtcgttgttgataattttcattcccaacgacttcaaaagtcgttgttgataatcgtttttaccgacgaattattcccaacgactttttaccaacgaaatgtcctcattgatgagaaatactgacgaaaacatgagtttttaccaacgaaatttgtcctcattaatactcatttttcttgtagtagggctatctcaggttctcttcctactaagtataaattaccattcttatgtgatcaatattgctctctttgtgattatgctgtggaaagttctctacatatccttgctagatgcttttttgtaaaatcaatctagtttggtagttttcagtctattaggatcgacatggtacaaaaagagaacttattggagattatttggggacttgttcttcagtcttctcaggatttgaagcaacatttttcttttttaataattacctccttattttagattgttggacggaataggaactttatggtgagaatttgtaaatctgcccccacttaggaattaattgctcaaactagaactagattcgagaaatttaaagatgttatctattagtaactcccggcccatatgttataaaatgatgataactaatatatttgtgaatttaatattaatattatgtgtatgttacacataagatattgattagtaacatacatattatattaacatgagtaatatgatatgataataatattgatattaatataataatattgtttattactatattgatgtgaaaattattataatctatattataaataaagaaaatttagaattacttttctaatggtgattttgaaaagaaaaaaattgtgacttttgagatgttacatcatttgggaattaaaagtgataattatctcattatataagaaaagtaaactatgggagttacacttgtgagaattgtcttgttatagcaaaaacaaatagatcaaaagtggatccaaacttgtgaaattagtcataaattagaaaaacaattttagactcaaataaaagtgaatcatgatggattcaaaaatgtgaaaagattacgaaattcgagaaataattttgtatcttaaataatcaaaatattgaacaaaattaataagaattttgttaactttgatataattttggaataatctcaaggatgggataaccttaaaattatgagtaaaaataatcacattatgtgttgagtagtaatgcgagtttgatattttaattttgttgataaaactaaaaatgtcaaatgatattttttaaagtgacctcaaaaagtcattttaattaagagaagccaatgtctacggttaagtgtataatttagacatattttctgtctacatttgtatttaattttaatttgtttagtatcaaaattaatgaagatttgagttatgtgaaaattaatcttttatgattaaattttcaaagcttaagtatttaaggagaaatgtggtccttaaagtgggcactatatttggcaagcatgattcgcttggaatcaaaagtgtgtggtcaccaaattgcttaatcttcatacaagaaagcataaatttttcgagggatgggacctaaactcccttagtgtcattgatggtaacctatcttaactctagtaaaaatctagtcttaagtttaataagtaataataagtcaatagagtgaatgtgaaattcaaattgtcccatctatgaatgagtacatgtgataaaattgagagttacaatcgaaaggtttattaatagagcttaaaattaagaaaactcacttaagcttaagaagtgtctaaagagtggtga

SEQ ID NO: 84070 - DNA, 677 bp, Cannabis sativa
atataatcttgaagccgatggcctcgaattgcagagagaatttgtggacgctagagaaggaagttattgtcatccaatttgacagagactttgtgagaaaagaccacaggattgaaggtgtgaatcggagcagccatggaggaaagagagcaagaacgagtggagaagatgaagagtgtggaagcagagaaaaaaaggttactctgataccatgttgagattgagagaacagaatgaattgaagtgtattctcattacactgaaaaggagccaaagcttagtatatatacagagtatatttacgagaggaaagatagaatctattgataaatacagctgtacagtaaaacaaacttgtaacagaaataacagattcctaaactaactcctaactaacatgatggagtttccttggtgagttgagtaagagaatgaatatgaaataaatatttttgattatggttattgtgtgagatttttatttaactttgcttgatggtcaatttatctgtgaatagtttatggagtcaaaattgtacaacttagtgaagttgaagtggcgcatatgcatttttattagtattgtactttactagttttagaaatggcaaagaatcggagaaatttcgaaggaaacataaagagtaaagttactgatggaagaaaacaaagaacta

SEQ ID NO: 84071 - DNA, 1780 bp, Cannabis sativa
ataatactaagtgcattatttctatttcggtattactaacgttatttgtaataattaaaattacttttgttattttgataaataattatctaaatcatgcgtaaatatgaaaaatccccaatactttattggcccaaatttttgatctactcctgttctcgagtcgaactgtcgagatttcagagaccttgtaagcttccgccatggagttcgaatcaacatacgaaatttcccgtacggtcgacttcatacgcagtggaaacttcactaaggtggctttgcaggtgattactctctctctctctctattttggtgtttaacgagcaatactgttttattttgttcgagagctgccgaagaaagggtttttcgagggtttaatctggttcatgaagagaataatgaattaatacactctaaatattgattattctcagtttccagacgagttcttgaaggactcagtaagagttgtgaagtctctaaaggacaagcttcggtggctaagtgaatcggaaaccgaacgaaataacgactttaaagatgtttctatgtttgtcatggcggacacggcgtacggtagctgctgtgttgacgaggtcggagcttcccacatcggagctgattgtgtcgtgcattatggccatgcgtgtctcagcccgtgagtacttatccagatcttctctaaagcttttactttcatggtttcaaatattaatgcttaagatttttattgcgtatgggaagaatattctatagcattagtataattgaaactattttcatctacattatcgttttacattttttgtttttggaaaggtatcaatttcaaaaaaaaaaaaaaaaaaaattaaaaagcatggtaacaatttgtcttcgtaaatgtttttggcaggaccactaagcttccagcctttttcgtctttggcaaagctcccatgagtgtgtcagattgcgttaagaatctcacagatcaagctacaaccaataacaagcgtgttttggtatgtttttgattgatgactttaaattgggatttattttctttaatgtgtaatgtgaattctatatatgctagatgtactagctgaaacaacagcgttagtgttatcgagatgtactgtagtgtttttttttttggaaagaattgtgttcacaattttttccttgcaagtgtaggtcctatttgggctggaatatgcacatttgatacggaacatcaaagaagaagtgatggaagcttgtgattctagatcccagttagaaatccaatttgcagacattttgtgttcagaaatctcaccatctgataatctaaacctatgcaatcatggagtgctaccagctgaggaattgacagataataaaagttttggggtggtcgcttgtaacagatacgtgatcggaggtttgcactggggattacgtgcagagcgaaaaatggaggactacttgctgttttggattggctctgacaattcagcatttgcaaatgttgtgcttacatataatggctgtgaaataagtacataagttactttgtctttcatgtattttattatagatttatctttgtaatatttttgtattccagatatcataaatgaaactctttgcattaggagtgtgtgtgtgtgtttctccttaaataaaccttctctaagttgatttctttttattttgtaatgttggtagtcagatatgatgcaaccgataattgcatggtgacagacttatctcaacagaaaagaattcttaagcgcaggtatcatcacc

SEQ ID NO: 84072 - DNA, 593 bp, Cannabis sativa
agtcactaccacctctaccataaccagaggtaggagaagtagtggctccaccaacatcttgagtcccttagggctcttgaacaacctctaaagtgtatgcagctagaaaagtattcatctcatctaagtttctcaaaataattgatttcctttgcatcacataatccccaacggttgattccattcggttaccagccattctctgttctgctaagagcatcagaataaaagcaattggacatcgagataaaggtacaatagaggacctttgttgtctcaatctcttaatttcctcctcttgtcattgaatcctagcttccatttcaatgaaattttgctccaagtctgtgggaatctttagttgattttcgtgaccacctctaaaagtctcttcacaaccttgagtaatagggggatcccaatctttccatttgccatcagtatcgctcacattagcccaactacatgattcttgcaaggcgtccattctatagaacaaccctgcacattcatgagtcggctaggtctggcagcaatcaaagtcaaaatctaattaccacattatgaagttatgtttagggatgtcaaatctc

SEQ ID NO: 84073 - DNA, 754 bp, Cannabis sativa
gcctaggtgctggtcccttgtcctaacacccatcgtgggttgtttcttcctcgtaaacacttgattctacacaattccctgttggacccaaccctcttggtctagcttggttagaacttgtataactcatcttcaaaactcttcaactcatggttgaagcaaaacagcataactagtgcatgcacattagagcactcgtgagccaaggcccagcaagacagaataataatacagcatgaataattagagcaattacactttttacagtacgacattgcgtatagattatgccatcgcactacatattatattattccatgtataataatgtcatataattaatgtccataaacctacgtgttacactcacacgtctcttttacatttaaggccttactagagtttgtctcggttataattactgagtctaacctggtgatgccttacatgcataactatactcatatatacataatccatacattatgctcttacagtggtttatcctaataatatttatcaggtctaacctagttatatcttatacacacgtaactctcaacatatatatacatataatacattcaatatatattttactatatgaagttttagggtaataaccctaatttatataattctaatcattcactcacatagcatattatcgcatgctgaagactatacatatttagggtaatcaccttattccacaataagtgatcttagtgcaataaccctaatccacaataaa

SEQ ID NO: 84074 - DNA, 611 bp, Cannabis sativa
tgttagtgaacagaatagttagttagtctgttatagttagttagtttgttatttatacagctgtaacttctaacttactcttgtatatatattcatctctgcctttgagcaataataagactattcatttttcctcaaatctttactttaacacacgtcttaacaaactcaaaaaaattagttaacaaaatcatttaagtaggtttaataactgtttaaaaaaactcataaataattataaaatatccttcttttttttattttttttttctttcttttgataaaatatcaaaaattatttatgtcagtatgtacattgagcagggcaattgttgagagtcactccgagacaattattaatacattgaatggttctatacttttgtttttaagttgggatattgataattatgtgactcaatgcattcagctctcgaacttttttatggagtgtaattttttgtttatttttaaaaactgtaattttatgtcccatattatatataactaagtaggcttttactactaaagttactggactagttgatccttcatccatcccacacatttatatataatatactatacattatattaaaaaaaaaaaaaaa

SEQ ID NO: 84075 - DNA, 518 bp, Cannabis sativa
tattttcatagtcagcctctcttgaagcagataaatcactgccagttaaatagttatagctattgctagtacatggacatacacacaataaacattaaatcatactgtccatatgaaactatgcccatgtacatagctcaatcttcctttgtggcatatatatacatagaaattgatactttacacaaagatgaatatatatatatattggtagaccaaaagccaactaagcttcacatacttaatccgcaacaaaatgagacccacaccaacggtcaagcttcaataaagttaaccataagaatgcttgattatactccttatatatacttatatcacttgtccactcatatacctagcttacacttaacttgtatcagccatacacaaggcatcgaacaggagtttatatatacttatatcactcattcactcatctccatttattcccttgctcgaattgtctccaactctaattagctacaattttacgctgaacaagatgaggcaccaacata

SEQ ID NO: 84076 - DNA, 715 bp, Cannabis sativa
ttaaatataataagaagaaaaaaacttaacatagtcataatcaattttttcttctttttttttaaaaaaaagaaaataatcataaattaaattattttttttttaaaaaaagtattataattaccgcacgaggcgcgattatgttgtctagtttcataaattaatactctttatctttccatcactttgtcccttctaccaaacaacttaaaatgatcttaaaatgatcgttactttcctttccctccctcttattctttatcctctctattctccatcattccttacagatatagttgtagagaaataactattttatactatttattacttaaattattttttgccacgtcataaaatttgcatgtcttgtaaagtctttagttaatatatttggtaaaaatgacaaaataaattatatgaggtatttttgaaataaggttaagaacttattttggtgtgaaaatattttttaaaatcagattattgcttgtttagttaataaatatttagttttcttatttagaatattttttattgactttgtattattacgaaaataattgagattaattttatttattatgatctatttaatttcttaaaaaatcatgtacatgctgtgagtttaatgtatattttcttttttaattataaagcaaacttttgttgaaaacctatcgacatacagtaaatctatctttttttttttttt

SEQ ID NO: 84077 - DNA, 755 bp, Cannabis sativa
taatgctcatttttcttatagtgtggagtcggttatttcataaaaaccgactcaatagggtccctatggcgtcggttatttcatactcctttagcatcactcggataagcgtcagtagcgaatttcgccaaaaccgacgctgaaagaccttaaaaactgactctgaagcccaattttgtagtagtgcagaaacgtccaatatccattaatctagacatatatttatatatataaatgtctcacaattagctataagaaatgattgacgatgtatactatctacctattttgacgtgaattctcaactctactaattaattaggggttagcaaactatccacttaatcacgaaactcgtattttcacattgcacctcacaaagtggtgtgattatatatggttaatttttttactaccatggtagtacggtgcaattaagtaaaacaaatattagaaaactacaatattcatgcgcaacctatatataatattaatattttatatattatgatagaataacaaaaatggtttaatatttttttttatttttatttttttatatattattagtagcaggaatttattgaaattaaccgtacaatattttgtgagttggttaaattttttatcagtttatcgcaactcacaccacgctcacccctagtagagctttctgagacctttctgatggactaggtctcagaaacctcttaattaattttgtaatgataaaaatcatctatatctatagagag

SEQ ID NO: 84078 - DNA, 1070 bp, Cannabis sativa
aaaaattatggccgccacataagagtgaatggccccaaagtcaaacaatacagagtagtaagagttgttgaccgagagctaacctgtaacaactgaggggctagcttatgcatcagcctgagttaaagcaaatacccttgttagagcgggttttgctattattttctattcctctttcttaagccgcgggcaatctctcttatagtatcttggcaacccacacaacccacactcgaaacatcctcactctctacactcacccagatgatgcttcttacaattaggacatttcgggtaagtgtattgggttttggaaccaccctgacggttgcctcgactctggttccctcgaaacctcttactctgacctaagctactaggtgcaaatggtgcctttcatttctggttggtgatcgagtcactaccgcccctaccatgactagaggtgggaggagtagggactccaccagtaacctgagtccctcgagactcttgggtgcacccaactgtgcccttaactcacagtgcctttcccaccatatcagcataggtggtgttgtcttcactggtaatcataaggtcttgttttatttttggattcaatccatccaggtatttttctttcttgttgaaattaattggcacgattcctgaggccaacctagccaatcgatcgaactgagttgtgtattcagtaacactcatattctccttctgggttagttgggtaaattcttttcttttcgcacttctgaccgtctcgttgtaatactttgtattgaacaactcctggaactcttcttaggtaacagtagtaacatttcgagtcagagacatcatgtcccatcaaaccagggcatcctcctggaactggaacgtggcacaggccactctgtcattaccggtgacgcccataaaattcagaattcttgtaataactgttagccattcctcaactttcatcacatcggaacctcccagaaagactagaggtgcatgctcgcggaacctttcatatagtggtttcatccagttcactggagccacctgtatttctggagtaggcattg

SEQ ID NO: 84079 - DNA, 561 bp, Cannabis sativa
tcaattccagcaatgaccatgaaattaaagacttctttctttgttttgaggatttaagcataattcaaaatagatgaatgcattctttgctgaatttgggaatatatacatatattgactgtaaatgaatgtttgctatcattgaagaatctgttacaatatgtattttgagactatattatcgctgggagatattctttggagacttgagaattcagatccatgaatggcaatcaaaaacaagaattctcatgtgttctgtgtgaaaagaagcttaagtcccaagagagtagctcaaatggtcaggcatggagtttgctcccacaattcttctgttatataatttgcttgggaaattttatctgtatatactgctctgctactacttaattggtattgcatatatatatgtaattatagtacctcacgaacaagactatacttacattcgaaagggtgcgacccaaaatgcatacatgtgttgaccattaatacagatagaatagtgtgaagattctatgaatatttaattaattgaatgttggatatatcaaccaaatt

SEQ ID NO: 84080 - DNA, 1295 bp, Cannabis sativa
tgtataaatgtttaatgggccggcccaaagtatttttgtaattttttttccttttttgtatttttctgttttttcccaagaatttttccttattttttgttcgagtgggttaatcccactcggctcccataaatttgattttgttataaaataatataaaatagaaaaaaaaaataagagaactagaacataatgagagagtgaatgagatttttttcggtagtttattctaatgggataaactcttatttatacaaaatatagctaaaaaaatagaaactaaatcaatatacttaaaaaatacaatcagacattaatgatgataattaatttagtgatttagacaaccatatataatatttcataacacttgctcttagatgtccataaaaactggctcattaaaaatattgccaaaaaacctaataggataaaaactcaactaagagaaaaagagtccagtataaattaactctttatttaagcattcgtggagatcttctaatcgatgaattctaatcttgtatgtcgtcttctcaaatattggtgttggtaacgattttatgaataagtctacaaaattggcacttagttgaatattttagacaccaatatagctattctccttaagatcacgagataagaagaatttggtgaaaatacctttggcgttttcttcattatagctttaattgatcaatacatttcgcgttatcttcatagagaattgctaatattgatattgctttacaaagtacaatctatatgtttctcgaatatgctttgtcatgatctcactcccacacattctctacttgctacataaagtacaaatatattagcatgatttaaagttgcctcgttaaaaactttatcagaaaaactcagtgggataaaacctaatctaagggaaaaagagtgcaacatgaatatgtctctctctcatacacatacgatccacaattattttggtgataaaatatctcataagatcattgttatcacttttaaaatatcactatatattatttatgatcatatattatctacaactctctgagagtgtatgtgtgggcttctaaattatagatgaggagttttaggaacttcaataattatccaacttattaaatcatgtgtgtgcatatataaagttgttcttaattcaaagtttaaaattttaagtagttatgaacatcacacattgataatataaatttttatttgtgataatgatggtactccaagaccatatatttatttcattcttattgtttgatcttaattttcatatc

SEQ ID NO: 84081 - DNA, 1948 bp, Cannabis sativa
  modified_base (1174)..(1181): a, c, t, g, unknown or other
gtttgaagctgataaacagcttcgcaaatttgtcacttctaattattattctcgcaataatatcaactcaaatctttgatattatttaatctcctacaatgatagtatgagataatatagtataataataagtccaactagtatatatatatatatatatatgtacttttattacattattattataataacttcatttattatctcttgctttggtaagaattaatatgtgctttgttattattacatgatgatgagttggtagataatcaaaataaattgtgtggtgttattttacttatttggttaattaataaaacttagctcatttgattgtttctctcttggcttgtggatgcctctaaggctgaagctccctttttgtaatctttttatgatatgtttcaatagatttgttcctttcaaataataataataataataatactttatattttgatttcgcaaaacaatattcaggtatcactataaaaaatcttacttttaatcataataaaatttgtgagtaaaagtgaaaaagttgtgactaattattattaattatcattcttatattatgactaaaaggtctgtgatcaaaagtattatttacaaaaattacaatttgttgtgactaaatgtattttttagtcacaatatttgctgtaactaaaactaaatcattaaaaattaatatctaaatactatgttttagtcacaagtaactttttgttgtaacttttatatttagttcacaaaaaaattatattgtgattaagtcccaatctccatttgctgtaagtaaattcgcaactttctccaacccctctggccgagtgcaatttggttaagggtagaagtcttggccatgtataattcacggatcatcccagatattagtatctttcccgtctgaaatgatttcacaacatatcatattatgtatcataaatctacaaaataccactattggtaaaatgcagtaaacgacatacaatataataaatgtaccaaaataattaataacttaacttacataaaaaaaaaagtatgactgaacttatataaaagatatactattaattttggatgaaaaactaaaagataaagaataatttaataataagatatggagatgaagcacaaaagaatcaatattaataatagaaataannnnnnnnaaagctacactctaacctcaccaatattattactctaattcacttatttttatcactaaaataagtaaactaaaataataataagggagaatgaaagaaatgacaaagtgtgatttttctaccctgaaacctgatgcctctttccattgtatttgtctcctttttatagtgcagattcgctcctcaaatctagtatttttgtgtaccatttagtgggataaaagcacaaaaagctgatggaagtagtgccatgcattacatttggtactatttaaaaaatactgtgtaatgtgttaagttttcacagttgttccacagttgttttttagttgtttcactgttgttttaattgttctgttttgttattttataaaaaaacagtatttttgtaaaaaaaatttgtgtgatagtaaaattgtaaacttttgtctcaaatccaatatttttgtaaaaatccttataatctattctcgtttgaactttagagacttgggccacgtgaagcccaaatgatgcaacaatagattgaagttgagttggtgatatgtgtttcgtatttcaaatgattcttggattggacttgtcacgtgtagcaaattatgggccttgttggtgatgttggcgattaaaagatgagattggattgtcttattatggaccttttataattgggcttttatatttttttgagaaatttacatggtatactaactttagtcatttttttttacaaaaatactgctaggcaatattttttatttttttac

SEQ ID NO: 84082 - DNA, 799 bp, Cannabis sativa
gattatcgaaggcaaagaccttcgtgagcacttgaatcaaaatgcaccttatatgtgtaatcatcttaatcaaaacgcaaatcaacaacctgtgaatcccattcaattgtgagtaatataattagaggacaaatttaggaaatattaagatgaaaaatatgtcaaactgccaggatatgattcagatgaagaaactgaaccattccaccttgatatcttgaactcacaattttctcagggatttaaaaatctgcatgtctcgcaatatcacagaaccactgatctggtcgaccacttaaacaattttaacaccataatgtgagcaagaaatgtttcaaacaaattgtgttgcatattgtttccaacttccttgacaggagccgcaagtagttggtttgacaaattcaccaaccattccataagctcctaggaacaattgtcgaaggatttcaaaaggcaatttcaggctactagagatcgtcgacctggcgcatcctcatcaactaacatcaaacaataattaggagagtcccttagagtgtacttgagttgcttcaatacaacaacagcaaaagtcagaaacttgaatgatagtattcaattaacatcctttcaagctagaatcgcaactgatttatccactacaagggaagaattatgggatgacttgcaagggcgtcttgtgagaaatattaatgaatttaatgaaagagcgcaaattttttgtgcagaaagaagaagcacagaatgagatgaagctgttaaaatcatgctcgagagataaacccagcactagcac

SEQ ID NO: 84083 - DNA, 628 bp, Cannabis sativa
gaactaatgaaactaaagttgtttaattagctaaagttgtttgtggctaatcttaaagccttaaatctcattattagtatatatatagaacaagtacttattaattaattataacaactaattaaattaattaattagtagtggaatgatcgaatcatgcatctataaatttagtacaaacttttccactcatgttatttatatttatacgatcgaatctcatattttccaaatataagatttgaatttgatctcttataattaagatgtcattttctcatgtttaattatatgcataattagggttgaaactattttacctgtagtctcactttttaagtccagtctttgtaaatacttactaaacaactcgtatttcgcggtgaatatttttttaaaaaataaattatatatataaattagttatgtcttttaattaataattttataaataatttttgagtccagtctttataaataatttttttatgtatctatatgcttattaagagggatgcgtctggagaaaaaaaaaattaagcccttattatataagaataaatagaaattttaaaaaatattaaaaaaatatatatatttaaaaatatttttttttttatttaggtcc

SEQ ID NO: 84084 - DNA, 1118 bp, Cannabis sativa
atgacagtgaagaggaagtggaggtgtgctatatactatttatattattttattttcagcattaggtagcaaaaccaaaaattttcatttaatttttgaagcactggtgcatgaatttcacattgatatagcaaccagcttactcaataaagacattgagatgacaaatgaggtttactcaattgaatgttgattttgtataatattatgttctttttttcctttttctactcttcttattttttattttacaaatcactaaaatatttatacaaatgacaaaggaggtggaaatgtcaagtgtttagtgatttgtcgagagagagagagagaggaccatatgcaatatgcatgggatggttttgaaccttattttctttgtagataagtggccaaattgtatacgtttagggtttgtttagtagaccgtataagagtcatattatattaaataataggtaagaataaaacaatatattgcattaattgttatgaaacacacatataaatgattcatattatgtgtattacaatatttagaaagggtttggggttggggattgaggcccagactaggatctcggatccgactccagcactagactcgcacctagacacggactcgaaccccgagcctggacgtgactttggaccccgaacctcgacctcgacgctagacatggactcggatacaacagacccagacccaaacttggacttggaccccggaccccgaattcaaactcagactaggaccgggacccaagacccagacctaagcttgaaatcaaccctagacttgaactcccaacctatacgggacctgaacccatgtctatgtccagggtcgcggtccgagttggggttagagtcaaattatggtaaagataatataatttataaataatctagctattcatagaagtcaataccaaacatgtatcaaataatactaatacaaatagaataaatccaacaatactatacaatataatataatacaaacaacacggtgtaccgaataaataaaccctaaaaatacataatatactaaatatatatgataataaaaatgcctcctaattattatatattattttaaagaagcaaatcattaa

SEQ ID NO: 84085 - DNA, 1644 bp, Cannabis sativa
ccctagtaccagacatctactcctaccatcctcttgctaacgtggtaaatatgatgttgggctatgccttcctcacagactagggctgcattaattgaggctcgccagatgaagtgttttatttttaggggtatttccatgttccagatcatcttccaccatttttcttgacgagtggtggtagaggtcgaaggatcaagttggtgtattatgtcatgggcaaggtgatatcccgaatttacattgtaagcaccatgtggggtacgggaccaatacaaacggtcttggcaaggagattgcagaagagggatggattggatagcttgggcgatgtcggttgggaaaagatgttaaagttgctaaaaatccaaatctccgttgggggagattaggctagaaaccttatgatcaagagtagctggcttttgaagataaagtattttcccatatcccggaatccaagcatccttgtagatagatatggaggtaccattacccacagaactgcgtaacacagattggaggagtgttttgccccaagagatgctattccaaacaagagaagggtgatgccccttaccaaagtcaaggaaagatgagtgggggtaatatctagctttgagaagctgggcaacaagagaggaaggagcctgaagaatacgccaagcctgtttggccaacaacgcttgattgaaagctttcatagaacggaagccgaggccgccatgaaacttagatttacacaacgatgaccaactcttccaatggattttcctactttgagttgtgcctcgccaccaaaattgagccatcataggctcaacttttttattgaagtagtggggaaacttaaagcaggtcattgcgtaagacggaatcgcttggaccaccgatttaaggagaatttctttgcgtcatttagagaagaaagttgagttccacctgctgaggtgggaccacactcggtcttagaggtaggtgaaggcttctttttttgaacgcccaaaagattgaggtgaacccaagtatttctcgatggagtcccgaataggcacgttgagcaaggaggtgatctaatccttcactaagacagaggtgtttggtgaaaaataaagggatgatttggcataattgataagttgacctgaagccaggctataggtgtgaaggatatccttgatttgagcggctgcaattggggtgcagcgctaaaaagaatgttatcatcagcgaaaaaaaaaagatgggaaacgataggtgctgcccgagagatcttgagaccgagggcatgcttccgggggaggcgttggtcgacatgttgggttatgagcaaagagagaccctccgagcatagcaggaaaaggtaagggagagggggtcaccttgacgaattccacgggttggagttacagagccagttagttgctgattgatggagagggtgaatgatgcagtggagagacaagacatgataaggttgataaagtttggtggaaaaaggaatttttccataactctctttagaaagctccattcaacacggtcaaatgcttcagccatgtcgagttttagagccatccagccaacctttccatgcgtgcgatgagttagggaatgagtattcacaataaaatacttcataac

SEQ ID NO: 84086 - DNA, 808 bp, Cannabis sativa
tatataataaaatagaaattaaatatcaatgttaaataatgaatgatatattataaacaataaaaaaaacatataataaaatgtatatacttacaataaaaaattaaacaaaataatatagaaataaaatttatttatgattttttaagtttattattttttatctatgataatttatcccataatttaaattttttttcttaaaaaatataatataatatatagaaaacttttttttttttccatatttgtgtaaatatgctttccgtaatacttgagtttttgttttaaaaattttacttgcaaacaactttagattcctaattttctcacaaaaaaatattgtttaaactctaatgcagatcgttgtctatggaaatttggcctaatcacctcttactcgacaacaaaggcattgcgccaatcttgggatgtgttaataatttttctttttttttttgaaagagcgtacgttcattaactaggaagaaaaaatgggaatcacattaacttcgagccagttcacccactggaaaaatcaaacaacgattaataaaataaaacttataattgttgaaaacattaacttaatctaaaagggcaagagagacatgaaaacacccccagagcacacttaaaatttagaaaaagccaacacagctatttgacaatcggagaaaatagagatattgttgagaatcatgggttagagaatttcttttttcttgttgcgtgtacatgtagaatttgtactattcaactattcaatagagtctttctcaaattcctgtatcattacaattcctgc

SEQ ID NO: 84087 - DNA, 585 bp, Cannabis sativa
ttcccatatttttaaacttattttcttttttaaaacaaattcccataaaataattttttttttaaacaaattcatatttttatatagaaagtataaaaattcatcaaatttgtaattttttcttactaaaaaaagctgtatttttcctaaggctcgataaaagtcggggcctacactaaatctatcttgatcttcaaatatatagttgaactaattagggaacaataccttttttttttgctggagaaatcaacacaatagtttagccaatcacatggccacaagaggggccaagtcctcagcatttaaaaaatcagaaaaggagttacaaaacgcccactgagcaaggttgtgagcaacttgaacccctgcatggggagtccacacgatctccacctcagggagatcatgcaccacttcacagcattaatcaacgcccacgactcagcctccgagacagacgccacaatcccagttgcagcacgcatatctttgaacgctgcatccaccaacaacaccagcttacctgtgtaaatctcagtcagattttgctgcagcaactcttggagattcccaagcggctcg

SEQ ID NO: 84088 - DNA, 764 bp, Cannabis sativa
taatatttaaccactcatttaaaatcccataaagagagaataagataattaaagaaattttgaatatagattgccttttcttaactctaataatgacaatagtaaaataataaaacacaatttgtttatgggaatatatatccacttttgaatgattttctcccatttattagattaactatataaaccatgtagtgtcacacataaattactgaaaattatcattttccttttcttacttattttttttttaaaaggaaataaaatctttttatttaactccagtatcacatctaataaatacataagtttaattttttactgtaataatttttaaaactccgtaggtatctacctgttaaatgtgaagtcattattcaagtgttaatttttttattggtacatttaaactaattttttataaaaaaaaataaaaatttaatgacctggaccaatcaagaattgtcacgtgacaatttgcttaatacttaccaggtacttgcagaagatccataattataacttaagtgttattactactaaaaattaaacttaagtatttatttgcaactaaaaattaaatttaagtatttatgccgcaaattactaagaatctatatacattttatgtcgcttagaaaaaaaaaatatagtggttgccacatttcatagtactcttttcaattctatcaaaaaaattactttttccaataaaaacaaaaaaaaagattattttaaaaatacacaaaaacaacaaaaaacaa

SEQ ID NO: 84089 - DNA, 1189 bp, Cannabis sativa
attttctgtaaatggacgtcgaagtgactgattcatttcatcagttactgtggtcggaactgaattaagaacttggtcaaagcttcaaaatcagtacccgtagcagtgaacaattcaccaaaataagagcatgtgatttctgtcatttcttcctttgaacttgttgctgcaccagatgaattctacaaggacttaatggtgttatttgatttccttgatgaggcataagcgtgaagaaattttgtactttcatcaccacattgtaactaatctacccttgacctttgttgccaatatgtctcttcttgtgctagtatttcctctaatgtgtcttcaacttttttcagctgaaacatagaagcatcagttcggacagccacattgttaagctccttcacttatttttgagcctttgagatcttttttttttttcatgttcccatattttttattatgccacctttggagagagcttgtgcaagatgcaatgttaatgcaaaaattctctattgccgaactagtctggtttttttccaattctatagtattaaatcagtggcatcataatcattaagccacatttttttttcaaatttgaaccttgaatgtctttgaattgtttgattttggccagccaaagggacaacagtgactaagatagccctgtggtctgacttgaaatagtcgagatggtgtgttgttatcggttgaaaactccattgccattgatcattaatgaagcaccaatcaagtctttcctttattgcattcacattatggcatcctttgatccaagtgtaaaaatcaccttcaaaagatttctcataaaggtaacagtagtccaggacatttcaaaagttatccatttaggtctcatttcgtaaagcgccaccaagtttattttggtttaatagaatttcattgaaatccccaatcactgatcacggcatcaaggttgcaacatccttacatcttctaagagcttctaggtgtgtattcgattttgaatttctagtgcaccataaaaagcttagaaatgccaagtaggtccattatcgcacactatgtagcaatcaaacaaatttacattaaagtttagaatagttacatccacattgtctttccataataaaagtaaacccccacttaaacctactctagggacttcaagtccattattgaaatgtaa

SEQ ID NO: 84090 - DNA, 726 bp, Cannabis sativa
ttgatcactttttgaggtcaaaaattatatattttttgaaagtatatgatatagacaaaggagtctattgatcttttattgatcttttttattttttttttaaattttaaaatttacattgaaataggaacttactagatcatgtgaggctcctattgaactattgagaggttgttaagagcatgaagggttttgattgctacaagtattttttacatttgatattataattaaataaaataaataaatttaattttcaccaatcttagcataaataataaaaacatagtcgtcaccctaagttcactaacaccacgtggacatagtttttaaaaacccatttagcttcaaaagagaactacatatttgattattttttattagtgtatatattaaagttcgtatttctttattagtgtatatattaaaatttggttgttaggattttgtatggattgaatacttcttattattctttacgaaattttttttaataaaatttcttgaacttctcatgtaataaatatacttgggtccaatgttgaattcgaaatttttcaaaaatattggtccattattggcagtgatgtgatccatacagttaaacatttctttacaaccgaacaaatgcaagtaaggctgaataatacgaatattgagctaatcccaaaaaagaagaaccctgagcaaatgagtgagttgcgccccatttctctctgcaatgtc

SEQ ID NO: 84091 - DNA, 841 bp, Cannabis sativa
aacgccataaagattcatattattctcttcgattatatatcacatatcgacttattttctgaagtctagtgaatcgaagataaatataaaaatttttatgatcaaattgataacataagaatattggtctcttcctttcccctttgattatatatcacatcaacttattttctgaagtctagtaaatcaaagaggattagaatgactcttaatcacaacattgaaaagtaaaagaataagaagaatagatccatattatgaatcttcacttacccttcttgtaaagcttggagattaacatagtttttttttttctctcttttctcaatttttttttttgtttcactctgacgtatcaattctttgctggagattcaacttttttttttaactgttcagccctcaatatctttatagcctattttctttttcattatttttttttaataaaatccacttaacgtaaaagtggtggaagtggagaaaaaatctccttaatttgctcttttctttttgactgacccattcccattttttttttcttattatttaaataattaaatattccctttaggttttaactgcaagaaatattcatatactataataataataatcattattgatatttttttcgttcaagactctccaaaactatttttttctccttaattctctcattttttaatattttattgtagcataaatttataaattaatttttacaattattttaataaattttctataaaatatctattttaaattaattattttttaaaaaacacataaaataataaatgtaaactaaattaatactattaaattaaataattattca

SEQ ID NO: 84092 - DNA, 1534 bp, Cannabis sativa
cccttccttcttacaatagtaacattctttttctggtttggacttagtctttgatttgtacccctagttgtaccatctgttttgattactcttgttgtttaacttgtgatatccacccttggaatcgcttgattcactttcgcctttaacaaacaatccatctttaacaccatctgatttttcattattctttttctgcatttctttggaatcgagagatgccttaacctttgtcatagtcaaagattctttcactactacaaaaaagtccttttaagtccatcaatgttggactagataaagtttcctagtctattttatgttggacatagtagccagggacataaaaggggtacttttcaagtccaacaatttcagactacaaaaatatttctagtccaactatattggacttgataagcggtcccactacggtaattcttttcaagtccaaaaaagttagacatgaaacttaattattggactagaaaaatatttctagtctaacaatgcaagacttgaaaagcaacaaatccactggggttgaaacctaatttttttttaaaaaaaaataataataaaagcaaaaaaaaattaattttttatttatttatatataaaattataaacaactatatatattatataatatatcttttccttgtaaattatttataattattttaattcaattaataaacataaaaaagaagtataaattctaaactatcattatgtctcaaaatttacaatatttgttagacacatatatacataacaaaattaataattattgtactaaaaagttaatgaactaaaattgttagctaaatatttgccataactaataattttttttttttgatccacaatgtaatgaatgtatatctaccacccacacttctctcgtctcgtcaatcacatcttctgaatatgactttttgttctacaaaatataaaagagaaattaattaattaaataatagatatatataaaacaaaaaaaaacacaaaactttacatcaacagtttcttgagaacttttccactagtcttatcacctccataatttacaaataatttgtatttaatttagtattatgtcaataatataacatctactttaagttcaattcaactttaagttagaagaacagtacaagctcaattttttttttctttcacctgttcttctattggttggctaatttattcttctctggatatttaccatcttctcacttttgcccttttattagagtctttaaccttgatcttgtagtagatggagagttaccaccactttcacccagaattttttcaagattcttattgtcatctaaggtttctcaagatttacccaaaagcagttattcactaccagatccatcttcctttgaataattcaaagattgtatataacaattaatcttcttttgaataattcaaaggttgtaacagtggaggctaattaacaaaaaaggaactactaattagcatccaccttatattaaagctcatcaatcaagcaaac

SEQ ID NO: 84093 - DNA, 920 bp, Cannabis sativa
atatttcaaaatttaaaaatttaaattttgattttttaacaagtactgtatctttatatctttatatatactatatatacacaaattatcttcaattaattttttttctttactttgttcgctttcactttaatttttcttaacgcaaacaaatcttaattggcctgaacaaatctgaagagcaaatcagggtcatatttgttaaggtatgagctaaattaaatttatgatggctttacaatcttgtattgactggttgttaattaaaaactcttcaggtgtttcaactggttagggatttgaaagaagatagaaggagtcggtacatccaaccaggtttgaaaaaatttctatcctatttcactaaaacaatatgcattgtaactaactaggaaatatattaacatggattaatcatcttcgtttttggatgcatatagttgttttttctttggctatcaacagagacaaacaaaaatacaacttcaaacctaagaaagaattagatatccaactacttagaacaaggcatttaatagtcgtatcaccagccaaccaaactaaaaagtatataaaccctcaaaacattagtaaaattacacatacacagtaaaccttagaaatattacacacaggcataacagagagatataggtgcacgatttcagattttaaataggcttttctagagagattaaataggcttaaaaatgattatcttaaatcggaatcatatattcaaacaaggtcaaacaattaaaagtcatcatgaatcctgaaaaattttagtgatacaaaaataaacaaaaaccaaaaagaaggagagtagggattgatatttagtgtctatcaaaaacaaaagataaattgattcaaaataaaatatcattcatgtattcccattctttccaacctcgaat

SEQ ID NO: 84094 - DNA, 796 bp, Cannabis sativa
ttagttaatgccatattttgtggcatttagttttcttgccatatttatcataagatggcttatttttctcatatttttgaaaatatcccataaatatactgttataaccaaagtagtttatgaaaacattactaaagagtaaagacattgggcttttaattagattacaatacagaaacaaaactttctatatatactactttttgttttcttttatgtttattaccattttagtttaagttattataatactttttcaatagtattatattggtgtattattttttttttttttgagggaaagggagcccgctaaaaggagaggaaatccattaggttacaggggtcatcgcctatccaaattgctgcttcgtcttgacctgaagcccagtgcgccagtttgtcggccaaagagttggcgttgcgattgatgtgagatatccgggctgcagggaaaagggacaaagtatctctgatttgctgaatgaggtctccgaacaccgaaaggtcttccttggggttgttaatggcgtcggtgaccgctttacaatccgattctactacccgaaccgaaaaatgttcttcaatacaccagcgaagaagggaaaggaaccgcctccgacatagggctgggcaagagctgcgactaccgaaccttcgctattcctgattactccaccaaaacccgatcttccgccattcttaggaactgctgcatctacatttagcttaagggtaccgtgagctggaggagcccaaattgtggtagcatctgccaaactgggtcgaccgagag

SEQ ID NO: 84095 - DNA, 756 bp, Cannabis sativa
tcctacacaaattttattagaaaatagggtatgattatcgtaggcatcattcttaagtctaggcctagggtcaagtaagagtccttcattttagacatctaggagtttattcaaggaatcaatggttaaggtgaatctaactcctttgagggttccccttatgctatatggattgcaagaaatttcattacaagcataaaaagccctcactagcctagggtagatataggtttgaatgcctatcaaagtttcccaatccatatctctaaaaagattgctaaaattaacataatgaagggcatctaaatcacacttcttaccaatgagtatgtctcttttgagaggtcttcatgaaatttttgtgcaaatcttccattagagaagagtttacgcctaggcttgctcctttgctcttcttgttgtaaggaagatattgtcctcttcctttatctagatgatgaagccattgaggaagaaagagggattaagaataatatggactttgaaaagaaaaagaagagaattaggttttgagagtgagaaaggtttaaagagagaatatgggctgttatttagggttatcatatcaaatgggggtttgtgagaggttaggatcagttttatagggaaattttttagttttaaatgaccaaaaaccccccacagccacgacatcctatagaaaacggtaggctgttttctcaagtattgggaatggtccgccgttttctcagtacaatggctgatggaagaaaa

SEQ ID NO: 84096 - DNA, 717 bp, Cannabis sativa
tttagtgaatttcttttcctgttactgtgtgaaaactgctatagaatgtgttaacaggtgttttggaaagtaagattggatttggagaagttttggttgagctggggaagttttaggggttcttggtggaaaccagtcgaccagttttacaggacttgtaaaaccagttaatcgatttacaggcaggactcccaaaaattcaagttttacagtttgtgctattttcagagcctagtttggtgtcttccctgatatttagtgcagtaataggttgtaggtcgtcaagactacccttggttatatgtttagggttttaggaaagtttacttgagttatttactcgtttatgtaatgtgactttggacctcgtcaattcgagaattttccattcaagttgaccgacacgtttgaatttagaaatgaggtaagattagcataaattatgtatatgtatgtgtgtatgtattcgaatgtatgttgtttatattatttagactagcactacaagaatagttgtaatactgagtgtgtgtggtatagtgtatagtgtttaagggaatgttacggtgttaccaacatgagtaaaagtgagtagagagtttatgtggtacaacacccagtagcacctggaagtacaatttggccctaccaaccctagtacggaggtggtactttagtgcatgtggttcagatgtcggacttccattaagaatattc

SEQ ID NO: 84097 - DNA, 737 bp, Cannabis sativa
catagctccttcaaacccaagagagactcttaacttttccaccatatcttttctagacaacgtttcacaaagaaaaacaatatcgggcttcttttggaccaccaggtcctttatgaattgaaaagcccatgggttcccaagcccatggcaattccaagatattagactcataatgtctggtgggcctgagaaccaagacccaccttcatcatgttttttgagcccacttcaaactcattgacttgtgccataatcaaatcttctttgtccattgccacctcacccccactaatcacgtccccagtatccatccttctctttttgtttccaaataaagagtcatttccttatgagcagagttgactctttccaaatcactatcatcttcatcttccaccacattctttcctttttgcacacctcctccattactcccctggatatcatctcctaaaatcaaggaccccccattacgttctgaaatcatgggatcagtttccataatttttgcatcagcaccaccatgcgcaacagcccctgccctccgatcaccgccatcaacaacagactgaaggtcctcattaccagttttcagccactgtgcacctattaaataattccttttccgagtctgggccttcatggcaataccgtaaggcttaacaacctgacttagatcttgttcaaaacgttttggacagaaacgttcggagtgcccaatgataccacacacaaaa

SEQ ID NO: 84098 - DNA, 1356 bp, Cannabis sativa
taggacattcactctttggatgtaaatatgggtgttctatttagcgacattcatatttgatgtttgatttgaaccttgccaactcaatgcatagaggagactacttgatgcacctttcgaccatttactctaaaactaatatggaatttataatttgcatcatgtggtcgatttggtccgaaagatacaaagttttccatcgaggtactgcaagaccaacatcaacacttttttcttttgttgagaattacctacgaaacgaccaagaagctcaagcaaaataccatacaaatggtaactctatttcaaggccttcgctgatccaatctttggttccttggcatccacctgcaccaggagaattaaagctgaatgtggatgcaacaaaagatcaagctagaggcattataggtgttggtgctattatccgagatacacatggtgatgttgtcgttgcattctcaaaacctttgattagaaactttgtttacatgaaatggaggccaaggctatttttaacagtttaaattgggctctccaattgcagcagccaatcacccatgttgaaatagatgcattgatgctctccaatgctttgaatgcacatttttctacaatttcttctttcaatgacctaattgtagacatttctagtcttctatctttttttcctaggatcattgtacatgtcaaacgttcagttaatatggttgctcattgtttggctcgacttgctctagagttggatgaggcttactcttggttggagaatttccctccctccttttactctgctattgtaaatgacttacacttttaatttatgatagctttgtgtttttctatagcaaaaaaattattttttgaggtttcatcaatagcgcaattattcaatacaaaagtcagattggtgtatatatttatatctatatatccttacctaaatgtgatgagcccatgtatatatataaggctattatagtaaggattgagtattttatctatcaataaagatagttatttataagctttgatttaatttaataattcaaattaatccttaaaaattacaccataattattattattttttttttaattttttaattaattttaaaaattataaattataggttcaactaaattataggttcaactaacaaattctgaacttaactccaaacttactttttttattcctttttattttatgtctatttaaaattagttctaattagatattttcttaatttcaaatttatataaaaaatattctaattaaatttatttttaaaacaataattatacttataaaaaattataacatattcaacttataataattttataataatc

SEQ ID NO: 84099 - DNA, 619 bp, Cannabis sativa
gggcataaaacccaacagatatacgcttggtcatcaatccatctcaaaaattcgcgtctctattgagcgaacacatcgcaatcaacagtgtgtggttcttcaatttagccgacttggcagacaacctccctaagtcttgctaactcgagatcttctcccaagtctacatggggctcgccaatagcaggcttgccaattcctaaccctatttctccagcatagttttagggacgaggtctagttgttgttccttgggctgctccatgtgggtccttccttcagtgggagatgcttgtggagggtcttccttgggaggcaagggctgattgttcagatccactgagatgtttatgccgacctggccagctgtaatggccagattcgtggtacttgctgagatgacgagattgaccacatctgcagggttcatggaaattccaatcgtgaatagaacatgaacatcgggatttgtagtcaaaggatcttaagggagacccaatgaggcagaggctctacctagagttctcttcatgttaaccatggcatttgatcagatacaatattaactcgctcttaatgaaagcactaaattgttgaccacagatttggccaaccgaca

SEQ ID NO: 84100 - DNA, 586 bp, Cannabis sativa
aatggttactttcaagttattgctagccatctcatccatcaagcaatggcccactttgcaaatcgacataaacaacgcctttctcaatggagatctccaagaagaagtttacatgactttacccccgggattcacacctcctaatgaagaagacggttccactctagtgtgtcatctacataaatctatctatggcctgaaacaatcatcaagacaatggtataagaagctctctgatgctctgcttgcagaaggcttctcccaatcccaagtcgattacactttgttcacacggggatctaatgaccatttcattgctttactagtctatgttgacgatattattctcacaggccctaacattcaacttcttcaccagctgcaagagtcccttaatgcacaatttcaactcaaagccttaggaccactcaaatactttttaggctttgaaattgcaagatcaacagaaggcgtatttctatctcaaagaaaatacactcttcagctccttgaagacacgagatacacgggcagcaagcctgccaagacccccatggatccacgaacaaagcttgatgatcaacaa

SEQ ID NO: 84101 - DNA, 1276 bp, Cannabis sativa
tcactttttgccagtgaaagttacctattcaatggatcagtatgcagaactatatgtaaaggagatagttcgtctccatggagcccctaaatctatagtttcagattaagaaattaagaaaagaaggaaattagaaaatagagtttttctcttgaaactttctctctctttctttcggctgagacaaagcaagggcaaggacaaacttttctttcccatttctctaagatttagcaaggattcaaggtttttgcaagtaagggttgtaaggtaaaccctagaaacccttatctcttgagtttatgagttttagttaagttttctttggttttaagctatgattttgttagtaaggggctgttaggtttagttttgcttagggtttgaattttagacttaatttgacttgattaagagtcctagcagctggttttagtatgtggtgttgattttatgcaagtttgagttttgaactaaaagctttgatcattaatggcaagttgaattttaatggttggttttgagattttctggttgaattatgttgtaaatgcattgtttaggtatactggaaagttttgtagagtttggcttgattttgaggtcatggggagaattttttgagttcccagcacagaaccggaatttcggttctgggggaccggtggcaacaggtcgaccggttggtgacccagaactggacttcgggttgggaaccggtctgccgattgggggagtttttggaaccctagtttgtcccatctttgagatatttagggtatttccgtgttatttatcgatagggaaacttttagtttcaagtctaagtccccggaaagtgatttagcgagtcactcatctatgttataatttatgtgattggggcatccatctagcacgtgaatttccgttcagatcggccagcacacttgaattcaaaaagaaggtaagaactgtacataatgtgtgatatgaatatctgagtgtatgtatatgttgcgtgtatatgcatgcttaaaatgttatttgcactaccaacactttacggttatagtatagagtgtattggtatagtgaatgttatctgagagtaccgtgataccagcataagtacggagaggtaccgggaatgcgtggtatatcactcaggggtactcagggtatgaacaaattctactgacactcgtacattgaggtacgtagtgtatgtggtatagtggctataccctagtatggaacgttcatactcatctgttaagccttgtaaataggtgta

SEQ ID NO: 84102 - DNA, 908 bp, Cannabis sativa
  modified_base (99)..(100): a, c, t, g, unknown or other
cggaaggagacattaattccgctatatcaatgtaaggttttagaaagttcatatttagggtgtttaaacaacatacgtgtgagtagatctaagatcctnntaaaataaatttccaacaatttatagagcaatagagcttgtacttagttactttttccctctaatgggaattttacagataatacacagatttaggcttatcttgtgaagcccagcccatgaggcaatacatgtatgctgatgtggagatcagatcactgtgatagttgttcatacgtgtcctttgattgtggataattaatgtgatattaattatttgatcttcgattaattcagtttctctttgtagacaagatattgttttctgcccacgatcttaggagaatatcccttatttattgcggagcagtaaatgggaaactaggattggcttctggatacacacttagaatcttttctaggtacacggtgttgacattcttccgtatgctgactaggcttgacggaagctcatttggtgaggcatgcggttgttctcccaaaaggccaaataacaattgggctcgacctagtttatgttattttgggcccactgaagagctttaaacttctatttggaatccatgtgtctcttgtcgaaaatgcagataatatttacccctaagctttcgaaattctgtggattgcagtggattgtggaggttggcttcagtctgtacaggtggacaagtggaggctaaatgtgaaacctttataaattataaatactttatgtgaatggaagaaaattttctagttttcaaacttcaagtcttaagtggtgttatcttattgactcgcgaagcatctgttcacttgacgaagcatgcatagtgaagcaattgaatttggtagctactcacttcagc

SEQ ID NO: 84103 - DNA, 1876 bp, Cannabis sativa
  modified_base (276)..(276): a, c, t, g, unknown or other
gggacaatgttctccaatatccacgatcttacttttacatttaatctatgtgggacaatgttctccaatatcccccctcaagatggtggctatttttgctcaccaatcttgaattaccttatcacatgtcatgccatttgctcgcttatttttgttcggatctcaggcgtctttgcactatctggatctcgtgcgactggctaactatctggataggtgtggatcgaaagcccgttaggaatatagctctgataccatgttgagaatcatggggtnccatctcaaaaccaattggcaatgggaggagtagcccattcctcttatgtattctattatttttccacacattggcaatgtgggactctctaatactagtgcctaataacaatgatctttcaaaatatatgtatcatttattaatttttattgctcgtttcgttttttttaaaacaaaaagaaaaataataaaataacaagggattcgagatgaatacctcttcactgtgagtggatcttaatacaagaagtgaatatgtatgtgaaaattatgttatatataataaaaaaaattcctttgtcatacatttgtataagttttaattaaatttatgtaaaatttaatatttaattaatatttttattaaaaaatcattattagttttataaggtaaagtaataaaataagactctaatttgtccataatatatttaatgttaaaatatactactaaaataataaaaataatataaaaataaaaagatatattgtatttatagtgatgtaaatttggcacattataaaatttattatgtgtcaaatttgtattattttttggcaccattagagtatatttcttaacaaagcggattatattttcactttgttcatttattctcatcattggagatgttctaatccactcattttacaaaaattaacttaaacaatttttaattgtcaaaaaatatatatttaaataacgtccaatttttcattaattaatagatataatcttacatttttacaagtttcataatattattaataaactatagattttgagctattggttggctaagcagtgagtctaagattttagcttttaagcaatactgatgtctaacactcttctcggtgtcatacaactattattgtaattaaatatcgagtctaatataacttaagaaaatatcactaactaatcataagacactgcctataaaaagtattgaacaccactagtgcccaataacaattcttttgttaacgcagatttttgttaaccaataataaatctttttcgtaataaatttaacacagaaattataagaaattaataaagtataataataacaccacatagttttttacgtggttttccagttaaatctgcatactccatgaatttatcttattcaagatatgttttgagtattcaatatacaatataataattcttctctcaaagattttctaaaaaatcatttgtccccttatttatgggattctgcccctatttataagataatagattggcagttattttacatttaaattcaaatagtaagcctttaatggaacgtggttagttcccatatttcattttgatcacattggggataacaattagtaatcgcataaccgtgtggtatccttatccttaaagatagtcactgctgatttggacaattgtatctcgcttaacctgtaaacggttaatgttgatttgaatagtagcatgtctttcagcaatggcatgagcaccaatgtacagagcaaacttaagagctgctctttgaccataaggccttgaagactggacaatcatttctcgcatatttcttagttacaatccttagctattgtcgtgtggaa

SEQ ID NO: 84104 - DNA, 693 bp, Cannabis sativa
  modified_base (119)..(119): a, c, t, g, unknown or other
tctaaaaatcaaatgtaaaagtgatgattcgaagaaattaaagcttttcttcattaatactgacgaaaatatggtcattaataaatctaattatttatactgtatatatatatatatanatatatatatatttttataaaaattggttccaaacttcttgacctttggctcaactagtgcaggtttgtaatttgtattgccacttgagttgcttaaattatgatttggttaccattttaaattgcggcttgaattgcgattaaggctacaatttgttacattttgggctgcaacttgaattgccattaagatcgtgacttaatttgtaatgcacattacgatttaagattacaaaaatgaataatagaagagggctttctaaagttaggcaattatgagtggtgcaaatgagacaaatcccattttggctaagaaagaatgagaatgataaaagaacacataccctaattaagccaacaatatcggttgcaatgatgatttagtgtttcaaattcttgaaattgagggatacatgggaattggatttcaattttagaaatcttgcagtatgagtgggaatttacgattgcaaaaaaaaaaaaattaatgcagaaaactctactaaaaccattttaggcttttggggtcatgaaaccaccttttaatcagatattatgaaactaaaattcaata

SEQ ID NO: 84105 - DNA, 1095 bp, Cannabis sativa
tcctttgtgcttttgacatatacacagctgtcataagcactcctcttaaaccaactttcagtacaaagtcatcgaacctcttgtaccattgccttgggctctgttttagtccatatagggatctcttgagtaaacagacatggtcttccttaccttctatttcatatcctttaggctgcttcatgagaatttgttcatccaattctccatgtaaaaaggctgtctttacatctaattgttccaattcaaggtcttcagttgccacaatgcttaaaagcaatctgattgaggtgtgtttcaccacaggggagaaaatttcattgtaatctattccctccctttgtgagaaacctttggcaacaagtcttgccttgaatcttgccccttcaacacctggaattccatccttgtgcttgtaaacccatttgttgcctatgactctctgtccagcaggtcttctaatcacaatccatgtcttgtttttcttcaaagagtccatttcctgatccatagcattatcccactccttcttatcatcagatagcatggcttcctcataggaacaaggttcttcaccttcaatgccatctatgcttagagcaaaatgcacaacatctgcatatccaaacctatcaggaggttttactgctcttctttttctgtctcttactaacatatagtcaggagcttctggttcatgatctgacatctcttcctgaccttcttcatagcctggttcagctgttggaatctcatttccttctgtgttctcctgatctggttccatctccacctcaaactgagttctctcttcactattctttgttgtagcatttccagttcttgctgtagcatttccagttcttgctgcagcatttccatcttgtacattcatcaggtctttgtacatgactttctcatcaaacaccacatccctgctgataaaatttttctggtgattaccatcctcgatgctccacactttataccccttcaccccctctgggtacccaagaaaaatacattttcgtgctctaggttcaagctttccctgtttgatgtgaccatatgccaaacaaccaaaaatcctgagat

SEQ ID NO: 84106 - DNA, 876 bp, Cannabis sativa
ctagtaatatgcaattgaattaagtagcaaatgtatatgtacatatcatatactaacaataatttgaaatcactgatttcaaaaaataataaactatgtatatattaatttgcttctggcattactaatagtgtatatgtcaaatctaatattttgaaatagattttcatgtctattcattctctttaaagaatgatatttaaatattctaaatatataataaatttgtgatatattaaaatatgtgtataattcacattatattcaatagtcaaattaattactttaattataagtgtccgttctacatgtacgtgatcactattgtttaatttcacacatgatatataggcttcatgcactttaattgtgtgtgatatttcatctttgtatgtcgctcaacttgcttagtaaaagctcaacctggtgcaatgatcgtcccattgagtgaataactttgatatgtccacaatagtcagaagaaaacaatgtggatactatgtcatgaaattcattgagagtttcacgaaggaacaagatccaatacgttgagtgacagaaatggtaaaacacttaataagtaatgtaaatgttctttcttttattttaataataggtcattttactaattaatatatgatttctttatattttattttacatgataggagcaatccgtactcaaactatccaaccttaaagttttctggatggttttttacaagtaaattgatagttggggggttttgccgcaaaattactcttgaagtttttatttttattttgtaaaatatggccacataggatatttttttagtgacctgttattaccgtgggcaaaattaggacttaacgaggctggacagacgacacctt

SEQ ID NO: 84107 - DNA, 746 bp, Cannabis sativa
tggcgttttacgggattctatggggatccggatccaagccaaagacctcactcttggaaacttttgaaacgcatcagccgaatgtactcgggagcttggatagttggaggagacttcaatgaaattctaagccaaaaggagaaaaggggaggcccccccaaaccggcgtatctcattcaaaagtttagaaaggccttggattcttgtcatctgagagatatgggttttgagggtagtgaatacacttggtgtaatgggagaaaacaaaaccttatttttgagagacttgatcgaatgtgcggtaacctgaattggtttgatatgtttccttgtgcaaaggtgagtcatttagaccgcaccaattcggaccattttcctctcctcctcacggttaatgacacatcacaaagcactcccaatacggtgaaatggcggtcccggtttcattatgaaagtgcatgggctaaagaagaggaatgcaccaacattgtccaatcggtttggcttaggaatgagctgattcagcacactcaagatttaaaaaaccggctgggagattgtggatttgctttacaaaagtggaatcgaaggaagaagcgagatatgaataaacaattgaatgaatatgctgagaaaatagctcagctaacccgaagcaccaatacaactgattggcagcagttacaaaggctggaacaaaagcaaaacttattgctggacagggaagagaatttttggaggcaaag

SEQ ID NO: 84108 - DNA, 1770 bp, Cannabis sativa
  modified_base (1698)..(1698): a, c, t, g, unknown or other
ctctaactacctcttcaaaataccaatatatattgtgttattatttttatatataaaaatatatagtaataataatgtggaaaattaaatttggaagtggaggtgatgaagatcctgatttgtacagtacaaacaattttctgggcaagatttgagtttgatgaaaaagcagggactcctgaagagagagatcaagtcgaagaggctcgccacaatttctacaaaaatcgttacaaagtcactccctccagtgatctcatctcccgatttcaggtatatatttatatacataatcaacatatatatatatatatatatatttctatgctttcatgattgcagatcaatggtattaaaagttattattattgttaaaaaaaaattatattttacactataatcaattatgtttttaaataattgtgctggaataccagaccaaaaagaaagtaaaaagctttttatcaattttatttgtccaataagagacagatgccgtatttatatgaataggacacaaaatgggacacgacaaaagatttggataacctcagagtctctgttaaaaacctcagatctttcacatatttatcttcatactctttctcattttcactttctatcttcatctctttctctcttttctttttcttttatcacttttagatttttatgactactattttatttgattgaattatagaaaaaacttgtcctacttatttttttttttttttcataaaaacaataggacaaaaaaaaactttttacccttaattaattattatacttatagactcttgtccatgaatgattttgcttagcaaaaatacccctcaaattatagttcttgtaaatttttattccttctatttaaaaaattcacggtttacggataataaaatattttatggtatttcattaattaattattttttattttaaaaaataagtaataattattttaaaactaaaagttaatacagacagactttttaattccttaaaaataataataaaataaatacaaaccaaataattatatctaactttatttaaataattaaaactttctttttgggtaaaataaaacacttataatatcaacattaaaattgaaatataaatctataaacaaataatattatacttgaaataaaaattaagaacttaaataaatctcaacaaaaagtatgaagaaataaaaggagtgagcaacgctggctgaagaaaaagaaatttagtgcttgttggataatcattaaaaaacaatttttgtttaattaattaaaaactaaagagaaactgaaaattttgttaagtaaaattagaaaaaaaaaaaaatcaaaatgattcctaaacatgctttaagttaatttgttaatttttaattgagttttttttttttattttttagttaaattattttttttcactaaaataggtgatgtaaataatttaattagtagctttttatttattgctttttttaaaaataatttttactttttttttcaaaaaattaaatcaattaattaataaaaatactataaaatattttttttatagtgtcatgtcaacaagtccttaagtgttatagtttagggtcatttttgccaaactaaataatttagagagcaagaatctaagagttcgtttggtatactttattaaaccgtattgtattgtatagtattntattaaattgtattttatgtaatacttttatgtaaaattatatgtagtattaacttttaaggacacataaat

SEQ ID NO: 84109 - DNA, 887 bp, Cannabis sativa
aaaatgattgttagtgcttgaaaactactttttctttcaatgtgtccaatagaaaagtgatgcacaacggtcttggcttccttcatgtgaaatttcacgttttttcgggatgtatagagtgagattttaagataacacaaacaagtgtaagaataagggaaaaacttgttaaaatttatcttgaaaaaaagaatattttcaatttttaaattagggggtcattttaattaaatttaacgaaaaaccaatctttacattgacatcttagtagtacaaattcattgtgactagtagggaaaaatatttcgaaataagtctaggtcacattccacaaaggggtaccactaccataaatatctgatttttaatattttgattaaaatgattgttagtgcttgcaaactacttttttgctcaacatgttcaatagaaaaatgatgcacaacggtcttggctttgtccctgtaaaatttcaaaaaaaaattcgagatgtgtaggtttagattttaagagaacactaatgagtatatgagtaagcaaaaacttgttaaaaattttactgaaaagaaaaatattttcaatttttgaatgaggggccattttaaccaaatttaatgccaaactaatctttatattcatgtcttaatagtacgaattcactgtgactagtggtgaaaaatattatgaaatgggcacgggccacatttcacaaatgggtactaatattaaaaactagaaatgacctttacacacgatccaataaaatagaggtcttaaacccttgaaaatagacgagatcttcacaaaatttaataaaaatcgtacgtactgtcattcgtaaaaattacgctatccacatttaccttgattgtattagtttcgggttt

SEQ ID NO: 84110 - DNA, 1179 bp, Cannabis sativa
tggaagaaaatagcatgaaacccatccggcccgggggcctttgtagcaccaatagcacgaaccgcacacaacacatcctcacaagtaaaaggtgtttcaagcatggcgctttcctcaggagttatttgggtgtcaatgttggcaatcccattctccacttgttgcactgtaggagaggctgaagaaaaaattgtgccaaagtatctctcgatctcaccaacaatatcctcttcgacactcaacttccgaccatcatctgtcataatctccacaatagcattcttcttcttcctacccgtcgctttattatgaaaatacttagtatttcgatcccccatggctaaccagtcagcacgagacctcagcttccaataacattcctcccgggataacagatcattaagcttagtctcaagccgtttaacctcctccattcggaccaaaggcgccgccacactaaggagatcatccaattgtttctgtgtctctctcacgagcctaggtatcgaaccaaacttacccttattccacgcccccaacctatcggcacacctcccaaaaatatcaataataccatcttgactctccaacggaccatcaggcatcaaccaagtctgagtaacaatatcatgacattcctcatctttcaaccaatgcgtttcaaatcggaacccccgctgtttatcattcttctgaactcgagccacattttctaaaatagctaccactggcctatgatctgaatgaataaaatctccagtaacgacattacctgaaggaaataaattatgccactcctggttacaacaaaagcgatcaagccgttcttgcacatgtgccgcaccctgtcgtttattaatccatgtaaagcattgcccttgaaatcccatatcagctaaggagcacgtatctagtgcctgttggaagtcagaaatagcagataagctacggtccgcaccgccctttttctcattaatggacaaaacttcattaaaatcaccgccacatatccatggaagatcaaaaagatccttgagtcgacacagcaatctccaagactcggttctacagctggccttaggattcccataaaacccagtaaatctccataacctcctacccggacattgcaccaacgcatctatatgaccaaccgagaaagacttaaccgaaacctcc

SEQ ID NO: 84111 - DNA, 634 bp, Cannabis sativa
gagtagcggttacatggctcctgagtatgcaatggagggactctactcagttaaatccgatgtgtttagctttggagttctcctgcttgagatcattagtgggaaaaagagtgcttgtttccaacaatccaaacaggctctaagtctcatagcatatgtaagccttgttattaaattaaagattagtcaaatcgcaatttcagatgttggtattcacttttgggatatggaaatttgcaggcatggcagctttggaaagaaggaagggcacttgagttgatggatcccttgttgacagactcatgttctccagatgagtttaccagatgtgtttatcttggactgttgtgcgttcaggaagatccacaagagagaccaacaatgtcatctattgtggtaatgttaaacagtgaaagcgagactcttcggcaacctgaacggccagcgttttcttggggtttatcaaatcagtatgatgaaattaatgttgattatttgtcaatcaatagtataactatgtcaagttttttacgtgagtgaggacaatgtcaagtgtaactagtctaattgatcaattgactctgcatgttgatctggtatttgactagttacctaatatataactgtattctgt

SEQ ID NO: 84112 - DNA, 1720 bp, Cannabis sativa
cgaatccgttggttattagacagggatggggcgggaatgggggtataaataggtaaaaaaaaaaaaagagaagaaaaactcatcaaagacagatccattagaaatgtcaaaagcggcatctttgagtttgagctaaaaaaaaaaaaagaaagaaaaagccaataaacaacatcaacttgtttgtgtggctgttttttcagttaataagaaaatatgcattttttcaaaaaacccaagatcctctaatagagtattactgtactactagccagttcacagttttactcagttatttagttttagcagtttgacaaaagagagtaacatttgtatttttttttctttaatttcagataatttccagttttccaatatcttggcttcgccattcaattcgttattggaatgaattcattaaaaagaaataaaaaactatggagcatctaagcgcttcattgataaaaacttcactactgtaccattcaacttagatatggaaaacaaaaacgaatcttatcataaaacaagataacccaaagcatttccttttacaaagattttgataacttgaaccttctaataaacgaccccatatatcactaacaattgttgactcttgtaagaaatttagtgagtaatttttttctggtactggttttattttttggtcatcctccaaacttagcaacctttctttgctcaatttgcccggttaatggacattgcatctctgtccagctgactggaaccatagttgcacctacaaggaaaaaaacacaagtggaaagaccataaatatttataagaggaaagtgaattttaatacaaatatcataatatgtaagaattttaatccatgcttttgtctgaatttttttattaaaatgaatatgcttacatgctgcactctctgcagatacaacgcccaactcattttttgcagtggacagatgatatgcccttgcatcaccaagagatagcttattgaaagcattaagggaaacccatttggttaccaaagaaatttcatcactgaaattttatataacagagaacaaaagtagaggattaggtatcctagaaaaaagcaatcttatgagtacctaaatttccatcaaagttaattctattttagtgtctcattggttagacttttccacagtgacgcatatttcgaacataataatcatcaatttctaacggaaaatatatttgttttttttcaaggcataaccagaatattatgatcttttccaactagtattgatattatcatatatttacttcaaaacataaaggataccacaatagctctcacaatgtcgccaacacgaaatgatgtgtgcatatcgactttatcaatctctgttgctctaacatcttgttgcctgttaagaaactaattcagtttagaacagcacactgaatctaatgttaggcatgtcaatctctaaatgaagcaacgaatagaactgttgaggcggcatttagatccgaagctaaaagagaatataaagttattcaaacctacagtaattatctacattcaaaaagctaagcatgtacaagacactacaaaaaaaaatcttaaaactgtcaattacctaattataccggaaaatttctctggcacagactttgtgcctacacacataatgtcaagcgaagccattctggccatcactctagtaacctatcaaaatacaagacaagagaatac

SEQ ID NO: 84113 - DNA, 1066 bp, Cannabis sativa
tctactccaatcttctaacacaatcaagcatagagtatcaagattacactaatttcaacacacatgcatcacaagaatctctacaacaaaatcatgcttaaatcaacttcaatttcagcaataacacttaaaattaaggcagtaggaaactacctcaagcctcaagcaaacacaagcttcaagaccttcaaaatccaagcttgagttccaactcaaacccaaagataaaccacaaataatagagatggatttagagagagagggagggtcggttttgggtgagaacaaaccaaaaaatgcttctcattataataaaaaataccttttgttgaaagtaatccaattatacaaaaattacaaaaatgtccgtagggccacataacactcatcattatcacataacacaccattcaattaattttcagattaatcacatattaataaaatgccaataaataatcccgaaaatgattttcggctccgaacccagttcggccggaaattctcaattgtgactataccgcgtcgacctgtcagaaaacacctgaaaaaggaaaagacaagtatactatataataatatagtctataagcacatcataatataaattctacaattttacccttctcgggtcaaaattactaaaatattcctggctcaccaacagggtcttaacatgtcatatatccaattaattcacatataatagattatataataatataattccataataatacacacttaactagttagggtttgctaatcaattttcttaatcttagggtattacaccaatgaaggacgacagtacaagggaatctactggaaccgagtgtggacagtttttaggccctgtaggaagtagtactcgtccataaaattccctattttgctaacatcggagtccatagtacccttcagccatttctcgtccaattgggagaagtagaagtaccccgacctgctctgcttaggagttaactttagatcgaagagccagttggtgtcgtgcagagatggctcaccccatccttgagaagcataaaggatgaatagggcagat

SEQ ID NO: 84114 - DNA, 700 bp, Cannabis sativa
gatttgagattttggcaataactaagccttgtatttttgttttactttggcttcagaccttgactactcatccaaagtattgtatacatataaaatacgatacaaatacaattttttaatttccttatgtagatcccgaaatcatattgagtatttattgagattttttttttgaatggacaaaagaaattaaaaaacatgtactgaaacaaatttacaaaaaaagccatatatctataataaaatttgagaattagtgattagtttaaaattgggcttcccagacatatatctttccttctcgattgcctggtagataataggaatttaagttggactcatatattgaaatatctgataatattccaatacacacggcgactaaagctattacctatagcagcagcggtatagtgaaaatcacaagagaactttatgaaccaaatatcacactcaagaactgggtatttttgaaggatgtcaaccgatccctgaacacataatgtcggctaaatcttgtaattaagctgaagatcaaagcatttaagatactataaaaactaacaaatagtgcgattggatgaggagtcatctccaatcgattggaagatcaaagaactcaatagatgcactaacattcccatctttaagcttttcttgaatcaatggctcgattggtcaaggtacctccatccgagta

SEQ ID NO: 84115 - DNA, 1090 bp, Cannabis sativa
tttttcatccctttgattttagggagcgtggggggggggggaagaggctgatgtgtatagtttctagtctccaccattgtaccttaaatcttctatcatcgttcttcaaacaaagcttcccacaactctcaatgaaagccccaaaatgttgaccgagattttcggcaactaaatatttaatgtaataatgatagcttagggagaattaatgcatatatttttacgtggttcatgtattaatgagccgtagtccacgagtctttgttattaataggtgggtgtttcttacagagaatattatgtgttcttttttccaatcccccattaattttgttgaggagtatttatagcgattggtaggaagaagaaaggtcttaattgtctttaagtgccatcattgggcgcacacaagttcccaaatgtataaaatagggcatgcacaacctacatagtaggttggttaggttttaggtgagattagccttcatcctttcttgattgatgtgattcttcataatggagctgtcactagcacccttgattattgtgtaattgctaaaagatagcgtctgacatgccctcttatgggtgttcccagatgcttccctcatgctgcattaaatgcaaggtgacagttcatctccagttttgctagcccagaggggttcatacgcccttcacctcccaaaagggatgcagggttgcccttcccacgttcgggagcctactcttgaattagttgttggtaccttaagagggaatttggttaagtactttgctcatctccaggtaataggtcttaattcgccatgtgtcctatgctgagaccgccacgtatattaggaaaaacttggggcaacatcatatttttataattttcttatcaaattccataattatgtaattttcactttttgaattcagaggacatcaatattataagaaacgacataatttatgataaaacgacactacgttatgagaaacattatgcattaaagaaaattagttttgtcagtccaccgaaaaaccaaaaacccctaagctgagagagaaagatagtggagaattgaaaaaatggcggttccag

SEQ ID NO: 84116 - DNA, 574 bp, Cannabis sativa
taaggacttgttgagtttacacacgtagtgttcattgcctttttcttcaaagccttacggttgtagcatgtagacatcctcttcaagtgtgccatttaaaaatgcattattgatatccaattatcttatttcccagccataagttacagctatagtcaatacgattctcacagtagatggcttatcacgggactgaaagtttcaccaaagtctatgcctggtctttggtgaaatcctttggcaactaaacgagctttgcagcgttgatgtgtaccatcaacattgaatttgtgacgaaaaatccatttgtttccaatcagattctggtgtggagaaggcaaaaccagatcccaagtcttgttatttttcagagctgtattttcagtgttcatagccttgttccatttgggatgagcaagtgcttcttctacattgtctggtacagagaaatgaggctgccatttagattgacccatgaatactcgaggtttaaaaattccatctttggctcgcgtgatcatgggatgaccaatagctggtgcaggaggaataggctgaggagaatttataccag

SEQ ID NO: 84117 - DNA, 676 bp, Cannabis sativa
agctaacaatagtgcctaaaaaaagatcataactaaattaatagtgtatataacaagatttaatatatatatatatagaatacttctcaataggtattatttattgatggttactaaaaaaataactacttaatttaaatttcaatgcttaaaaattaagttttcatgcttaatttagttaattttaaaaaaaaatctcttattttatactatatcaaaaatatatttatataaaaaaaatatttaacatcactctacgccgataaaacaatcatagatcatataatataaaaataaaaagaattaattagataaaattaagtggagaaactcaaattttcctaacaatactcattcataggtaatactcaaattaaaaggccccaatagtacctataagataatgtagatgtaatttaatattaaatatcacatatttttaacttaatataattaactattatagatcatataatatatttttattttaaaattataaatatataaactcaatctttattaacttatccgcataataaaaaatttaattattttttaaaaattttatgtgaaatttatattatttgatttatttaaaaactttagtttaaagattaaggaaatgttaaggtataatattattattgatgcattcaaatattcaaaaaaaaattaa

SEQ ID NO: 84118 - DNA, 701 bp, Cannabis sativa
aagctctagaatatatatttatcaaagaaagatgtttagtaatgatatgcaagacctgggcgagacacgggtgaatagaatactatcatctgcaaagaaaaggtgtgtaattgaaggggccgatcgagccaacttatacccaataatgtcacgattagcttctgcttggcataaaagggcggagaaaccttccgcacaaaaaagaaagaggtaaggtgaaaggggatctccttgacgtaaccctcgtgttggtacaaccttccctttaacttcaccattaatattaaaagaataactaaccgaccgcacacattgcataagtagtgcacccaaggaaaggcaaatccaaacttcagcataatggcttctacaaacccccattcaactctatcatatgctttactcatatcaagtttcataacagaaaaacacctctttctccccgtcgatgctcgtaaattatgcaacagttcataagctaccatggcattatccgtaattcgtcgacctccaatgaaagaactctgggaaaaatggatcaattcattcaaccacggttgaaggcgtcgtacaagaacagttgagataattttgtacaatacattacataagcttattgggcgaaaatcctgcaccttctttgcagatttgaccttaggtatcaaagtgacaatggtggaattaataagtgataactctgc

SEQ ID NO: 84119 - DNA, 620 bp, Cannabis sativa
aatcaattatttattttatttcctcaaatagaaaataaatagaaaatttatttccataaataaaatattcttacacgcaagacaagtgtgattttctcaacaaatcactcgaaaacgatccaacggacgagatacaagctccaaaaattaacaatttttatcaagagtcaatttccaccattagatcatcatcaatggccaagatcaatccaaaatgatcttttcatattttttctatcattttcttaatataataagacctcattctctataaaagaagagctcatctagtttatttttttttacattcttttaagtcctcataaggttaagcattaattttctataacatcaatatcataaatagagtatatcatacttaagtgtaacacaaaagattatgtctcctttcgtttcaagatcgaaccatttttctttctatcgcagagtatcatcaccaataactaaacttgaatttttcacttgaataagagtgcaatcttcaatctttaattttttatagtcttctacagagatctacttttgtaatagaattgtgtgggaaattcttacaaccacaaatgtagtaaaattagcaaggagggagagagagagagaga

SEQ ID NO: 84120 - DNA, 847 bp, Cannabis sativa
cgtaaaaataaataataaaattgtacatttattgtgatgcaaatattacatcgtagcaaatgttgtgccaatatgtgtcaaatttacatcatatttggcacactattagagcactttcttttttcctaaatgagctatattttaactttgcatcacttggagatgctatttgcatcttactgttttcatttaattcaatccacactattttactcatagtacatttgattcgcactaattgaggatttcatattttggatcaaatctaatcctcatagtaactcaaatccaatccaatccgcaaaaatgcatattgaatcagttattttagatcagttattttttaatattgaattatttaatattattaaagatatattttttttttcacaaaattatcatcaaaattaaacaaattattattgttttatgtattcaacaacaaattaaaataagtagaacatgaataacaaattcaaagcacatgtataaagaaatgtttaatttttgttttaaactacatctttcttataaataagaaaagaatgtacatttaatctactatattttaaaatatatttacatcatatgtattaaatttttaaaataattattttatacattaaaatattcattgtatatataataaaaaatatatataaatatgtattgttttatttttacatgtcaatcaacatcctatctacacaaatacaaattttaaattttccaatccaatttgcaaaatgttgatatttgcactttgcaaataggattgtgcatatcaaattggattaagtattttatgaacacctctaatcatcttaacattgtgtttcaatgcaat

SEQ ID NO: 84121 - DNA, 627 bp, Cannabis sativa
atgcagaacacagcagtaattctatgggaatcaaatactttgttctcttttccagtgatgcgttagataagctagtgatatagatatttttagtaacagaatcagttgcatatattttttcctgaataagctgcatgtatttgttttctttataaacaggtgttaaataaacactagctctaggtaaaaaaaaaaacattgatcagcaacaagaaaatgactttggcttcacctgagaaagttgttcttggcccaattgcttttgggcacttttggattctaggagtgtttcctgcagttccatttctgccaattggaagaacagcaggctctctgctcggcgacatgttgatgatcatcttcagagtcataacaccatcacaagcatatgcagccattgatctctcagttattggccttctttttgggactatggtggtgagtatctacgtagaaagagccaatgctttcaagtacttggacatacttttttcgtggaagtcgcggggccaaagacttgttatgcagaatttgcaattttcactgctgtaacaagtgcactcttcactaatgacacttgtgtaatttatcttgaaagttgcaagggaaaacaacataccagctcac

SEQ ID NO: 84122 - DNA, 650 bp, Cannabis sativa
taactgaatattttggctattacataaataaaaatatatttacattagaataaaaagtacatctatattcttactttgtttgtttaaacaaaatgtttgtatactatagattatagcagaaaaaatcaatatttcaagtagaaactaaaaatacctaattaactgaaaagtgattgtacgtttaagattctttgagcataataaacttgatcaaaaaatcagagcataataaagaagaagaagaagtataaaaaataagaagagtggagaactaataatggttgagttttgaattggtggattattaaaattcattgtagctcaactaagagattttggagcataaaatatgaatgagttttgcttttgtttttgctataaaaaaagagaggataattagacgaacgaagcattaggctgagggaatggagacaatctaatgtcacaaaacacaattttacaaatataccctctaaaacttcaaaaattaatttgaaaaaagtttgtataagaaaaactgattaaaatatcaataaaacagttaaaacgacattaaaaggataaacgatagtgtgactaaaaacgatataatttctttcttcttttgtatgtggcaattagataaaatattctaaatttttaattaatac

SEQ ID NO: 84123 - DNA, 2903 bp, Cannabis sativa
  modified_base (501)..(501): a, c, t, g, unknown or other
gagagagagagagagagaatcaatttctatttttctctaactttgttaaactcttttctgtctgtttcaggttaattgcttattttattcatgatactatatatcctatataaagtgttataaataaaccattttaatcctttatttaaaatacaaatatccaaaataattaaacaattatcttttttttattttaattattattattttttaattcatttaatcaataattaaaagataattaacttaatttaatttaaattattttaactaataaaataattaaactaaattaatcatgggtctttatatgtcaccctacacgtgtgtgtcatattttaacgtccaaattgatttctcaatttttccacaaataaaatttattatttattctactaataaataataattgattaattctcattcatttcttatttcacaaggattataataaatattattttctttaaaataatatttctctctttaatattatttcanaataatattatatttaactagttatatagtttcatttaataaaactaaatgattaaataatattaattattattatctcaaattttgtccacctaacgtgacatgtccacataagcctatattgaagacacgtggaatataacattatcagcaacaagacaaagtctctttacaagccatggcaaaaccaccaaagcaataagcgagaggagctaagcaagccgtttaaaagctgcacaaccatctcaggccggccaaagggagtacataggctggccagggaggagctggtatggctggccgaccaaaaggtgattatcagactaagaaagggcccgttcaaccaaggaaacctaacctttgcaagaaaaaagtgtacaaaggctggccaacacttgccaaggctggcaggcacttaatgtgcatcttgcaggctggcaggcacttgatgtgcaacttgcagaccctgacagtcacatggccagacaacctcttcctggcaagcctttggtgcgcaaccttcatccgtggacagcaagctaagtagcagtttgaaccttgacaacccacaaaaataggaagaaaatatcagcaactttcctatttttgagagataattacctatttattttttattatttaattatgtaaataaggctttatctttctatttttaagagatattagtggttcatcttcatgtaagctctattatataaagaacattagtctaaccctaattctctaagtcactaagtctctagctccttaagctctcagttctaactctaaaactctaagtttaaaactcacttctctcttctcctttctcacgcacgcccaagcatccttctgactagagatttgccaacttgggtactcacattgtaatattaagagatccactccagattccactactattgtgatttgagtggtattatctctataccattacaactaaaagaggagtaggtcattacccgttaactcagggagctgaacctctatacatctggtgtctattttactttattattcttattgtgtaacaggtttgacaagtatcagtattaaatacgactccgctatcggttggtcaaatttgaggtcaacaattacacaattcataattgtcataattaatcaaaataataatttcacaaattactattttgctcttaagaatttattttccatagaaattaattctcactcaaaattcattcatcaaataaaatcttccctttgtacattgttgtatagaggtgacttgaagaccatggacctatatttcaaagctccaataaacacttgattattatcgatctcatcaatagaataattcgatttgttacgtccattattactccactataaatatagaattgcactatttgatcccagacgccctttcgtatttcgctctcagctgaccactgatggcatcctgcttttgttcacacctttcctcctgctaagtgctgattattaatctgggacttgatgtctgaccgtgcgtccaattttactcatccttgatggatgggcgaagcacttgactcttatggatccagtaaatgggattgccttcctcgatgggcctccgtaatggcccatgtattagctatcctaaaatacggataacatatattttttaggttttatgctttaattagacaatttaaagtaaataataattaagaacgattaaactaacttaaaggtaaacagacaaataactgtttcaattagataataaaaacctagaacatttatttctctatttcaaactatgaatcttagtttgccaattatcccaatttattttataatttgtagtttcaagaaccctaatgtaatctattaacctctctcgagcgatgatagaattaactaattaactaacaaaatatttctattcaatatcaatcaatcaaacaatagtaagacaatattattctctttaaataaaactcatatagttaatgagatatctcgatctcacactttttctacgtcacacaattctaattatgattttagattacaactctaaagtgtaaaacctaaaatcttattactaattaatggtattaagcattactaagatagtaattcagcacaaaactgcacaaacaaatatcaataacatatatgggaataatctaaaaatttaaaataatagtctaaaatagtttcatcaacactttagaaaaaagtgtttagttcataatgacaaacaaaataataacaataatcatattcataattaaacaattaagcaaaagaataaagaaaaagaaaaagaaaatgactttaatgatgattgattggaatctcttatttattgctcttcaatgtgttttttgatctaaaaattgctctctctctctctctct

SEQ ID NO: 84124 - DNA, 909 bp, Cannabis sativa
caatcctacagactacagaagcatgactggagccttgcaatacttggctcacacaagaccagacttaagctttgccgttaataagctgagtcagtttctcaaggctcccacaaccagtcattggacagcggtaaaaagaatacttcgatatctaaagggcacaatgcatcacggcttgcatatcaagtactgtcctagacttgctctcacgggtttttcagatgcggattgggcgtgttgtcccgatgacagacgctcagtaggaggttactgcgtatactttggagacacactcgtgtcatggtcgtcgaagaagcaagcagtcgtgtcgagatcaagtacggagtcagagtatcgtgcattggcacatgtatcagccgaaatagcatggatccaatccttgctaaaggaaattcgctttccactgcctgctacaccaattacttggtgtgataacctgggagcaaaagctttggcctccaacccagtttatcatgcacgaacaaaacatattgagcttgatgttccctttgtaagagacaagattcttgccaagtccttagaaataagatatgtgccatcctcagaacaagttgcagacctccttacaaaaagcctctcaagcagcaggttccatttcttagtcgacaaactgggcgtgatatctccaccgctcagtttgaggggaagtgtaaagaaatgatcctactcagcccagtcaaatgctatgtcagcgcccaagtcagcatttgctgattgttctcccacgtcagcttattcctaatgattagggaatgatttccctgattctcattctgtattgttaagggaatattcctctgttttgtcttgtatgtaacaaactctctggtgtgctggccctaatccagaatattctagtatgtgtaa

SEQ ID NO: 84125 - DNA, 552 bp, Cannabis sativa
ttttataaaaatgaaaatgttttttaggaaaaaaaatatagatgtgagattatatgaatgtccttacatgaaaactatacaattaaagtatatacatatattcaattttttttttaaaaaaacatgattattgatagttttattagtttttattttataaatgatacataaatatttagtcatttgctaaagaaataagttaaaaaattaattaaaagaaaatcaaatttcaaactttacattaatagtatttttttgtcatcattctcgataaaaaatctttcgtaatttatttatttttattattattctaccaaaaatctattaaggtcaacttaattatttatattatcaataggaaataaaaaatattggaaagaataatctattttgactatttcatttatactaataatattaataaaaattaaaagaaaaattgtttcataatttttttagaacaaaaaaaaaaagataattggagaaaaacaaaaaaaaaagttgagattgataaagaaagtaaataataatgatatcacctatatttgttca

SEQ ID NO: 84126 - DNA, 580 bp, Cannabis sativa
agaagtaatatttttcaacataatgtataaaaaaaatcaatcttaataaatacggatatcatcacctttgtctctactatataagagcgtttgtttttatttttactacctaaaaagagttattatatcctaatttttcgtacatcttttccgttgttcgggagttaataggctggaaataacattcaaacagtgagttgtatacatgtttatttttataggagtgcaacgaactattttaaattgtatttttaatatattataatataaaatgtgagatcgatatatgttataactaaaatatacgcacgctatatatataagaaaaaaagagatataatctagggtaattggaggtgaaacttaattccttatgtgctttaattttgaataaattatggcaaaacccctaaactttcactatacttgcaactaactcccaaaatcaattttttgaaagtaaaacctctcaagctcatgttatcttagcaattgacttttttatccattttttgatgttaagtgtcagactgtctgttgtctattgtatacgtgtcacacttttattgatccctataaa

SEQ ID NO: 84127 - DNA, 968 bp, Cannabis sativa
caactagtattaattaatctaagttaaaaataatatataataattaattaaaagaaaaattctacgtacacgtaaaataatataaaatattctttctcaattaattgtctcacttattttttttcccctatataaacacaccccaattctccacattttccacacaaattacaaacccaaatacaatctcacaatttcaatttgagtcatcataaattagcaataatcaataacattaatttcatcaaaattatgggtatcaagattgttatggtattagccattgtggctcttgtgggtgcaactatgccaatgatgactgaatctgccctaagctgtggccaagtgacaagttcacttggcccttgcttgaattatcttaagaacggcggagcacccggaaatgggtgctgcgctggaattaggagattagtggggatggcacagaccacccccgaccgcagaactgcttgtaattgcttaaaaactgtcgccacaaaaattcgcggaattaacctgaatttcgcctcttccctcccttccaagtgtggtgttaatattccttacaggattagcccttccaccaactgcaacaggtaatataatatatatgtgtaaatcattaagataatatatatatattcatgtttttaattagggtttctatttttttatatgaatatttaaaatatgttctattttaattttttatatttttttatgaatatctgaaaaaaaaattagtataattaactaaataacaaaaattattaaatgagatgctagtataattttttggatgtaattaattaatttatatatatatacggttaggtttaatttaagttgtttttttagtcacaacaataatatatgcttttaaatacaaaatatatctataaatacttgtcaaaaaagtatatattatattgtatatacacatgacatgtgtctagttattttactca

SEQ ID NO: 84128 - DNA, 863 bp, Cannabis sativa
aacatgccacttcggtaggaactttcacccagaatccaaagtaccccaatagctcaaatcgaaatgggaagaggtctaataacgataacaagtaggttaatggaaagaaaggcaaattcgcttgcaatgatgagatgcaccccagggaaaatgcctcaaaatttactgccttcttagtccctacaaacgacctagagacaatctatgcgacaactctgtctatggtactgtacaaaaaaccatcccccatgaaaaatgatgtaagtaagagggatacatccaagttttgctattttcatgcggactacgaccatgacacaaacgaatttaataatttgaagcgggaaattgagtttttaatcagaaaaaataacccacatttacagaagtatatcaaggtcgaccaaaagcaaaaggccgcccaagcagacaataatcaagattaattgatgcctccaccgatggacgggcacttacaggtcattaatgggggtccacaccttgttggagacttgggcaaagctcaagaaaagtatgcctcaaccctacagtatggacaaattgaagcagtattggccgtagaagagagaaaaccaaaaataacatgggtaggggaaccaataataacattcactgaagcagatgccagccatttccatttcccgcacaatgacctcatggtcgtggaagtgaaaattgcaaataagatagtggcatagactataatagatgatggagcttcctcaaacattctgtttaaaacaacttaaaaaaagatgggactccaacttaaagatttgatcccctacacctagctcgtatacggtttttctggccaaagcgttgcacctctaggaaagatc

SEQ ID NO: 84129 - DNA, 1387 bp, Cannabis sativa
taggaggttatctccaataggcacattaggtctatgcctgttaggatcaataatagggagttgagtgctaaccttatagagctgaaatttacagggtttgacattatacttgtatgattttctgtccaagtattcgactcgtatagactgtaagcggaaaatggtgacgtttcagccagtgggtgaagatccatttgtctatgttggatcggttcaagggtctcgaatcccagttattttagtgttaagagctagggatctactacccattggatctgtaggatttttagtagttgtgattgactctagcaaacccgaaacatttgggcgggcgtgaggtagtcagggatgtttgttaaagattttctcgacgtatttctcgaggagttgtcagaattacagccacaacgagaaatagactttgtgattgatttggcacctagagccaaacctgtttcaaaagctccgtataggatggctccagtagaacttaaggagctaaagttacagcttgagaggatgcttgatatagggtttacccgacctagagtatcacccaaaattgatgatttgtccaatcaggttcagggaaagatagtattttcaaagattgacttgcgatccagttatcatcatctcataatatgggaagaggatataccgaagactgcgtttcgaaccagatatgggcattacgagtttctggtaatgtcattcagattgaaaaaaatttctgccgcctttatggatctcatgaatagagtcttcaaggatttcctcgataatagcgtcatagtggtttttgacgacatcctcgtatactctcagtcagaagagcagcatgagcatcatcttcgaatggtattgcagcaactacgagatcataagttgtatgcaaagttcaaaaagtgtaaattttggttgtcagaggtctcttttctggggcatattattggaaaagatggaattatggttaacctgagtaagattgaatcagtgaagatttggccaaggccaaaatctgtgatagaagtttgaagttttcttggtttagcagggtattatcgacgtttagtcgaaggattctctaagatctttatgccactaaccgagttaagtaagaaaaatccgcgattcatgtggtcggacaaatgtgaagcaagttttcagaagtttaagcaacgtttgataacaactctggtgttagctttgccatcagatcgagaaaagtttgttgttgattgtgatgcatccagataggatctgggatgtgttctgatgcaaactgacaaagttacagcttatgcctctcgtcaaattatgagcaacgctacccaacgcatgatgttagagcttgttgctatcctaattgctctaaaaatatggc

SEQ ID NO: 84130 - DNA, 2099 bp, Cannabis sativa
atatgcaaccaaataaagaaatagaatgaaaattgtttcttttctattccattctatttcattacctccaaccaaacgccacctttaatgtaatttatggttgtatgtctcaagaatgaggacattttgagaaaagaaatcttatgttgttgttggcatgttttcttttgaaccaaactttttctatcctatagtaccagtctaccggatttataatgtttagaatcttaatactaaaatactcattattttgaaattaaaatttcatatattttcatacaacaaatcatattctacatttctccatcacaatttgtataagtttgtgtatgcattgtgtatgcacatatcattactctaataatatattgtattaagtaacttaacaatatcactgggcaattctcttaaatttttgttcatttatacattttctctaacattgtccttattttaattcaatattaaataatatcaattcagttagtcctataattttaaagcattgttattaaatattagtattgtacaatatcttttataagtgacaccataacaaaaaagtgttagggcccaataatatatttattagccttttttataatattaatatttaataatatccaattcccataatcgagatccaagtcaggctgtttccagatcaagccgcgatatgtatcatgtgtcttcagatttcattaaataaatatttcataaactcaaaaccaacttcccactacattattgactttcgtttagcggttgaagaaatactttctttttcttttgaagaagggaaaagaagtactaaaaaactctagttttcagctaacacttaaataaaacaatcctcattaaattatagtattatttaactttgcctaaattcagagtaggaaaggaggggcaaaaacaaaccccaatcatttactcattttccttttcccagaaatcatttttacttttctaattcgaatttcaaagtaaatttgttttattaacttaatcaacgctaattgacaaacatcactttctaactctatttttctttaccggaaagtaccttaagatctgatccatcctcatttctcatttatataaaatattgctggaaagagagaaacggccatgtagtgcaaaatataatattaaaattatcccatatgaacaacttttcagtacaagaagttcgaagcaaatttgtttctattattattattattattacatatttcaaacaaacagaaccatgaaaataaagtaccgattatacatataataaattaagaatttctgacaattagtttttaaataacttactgtgcttcgaacaaattttatagcacaataaattatttaacatataaatatatttaaatataggggtcttatgtaaaacctcacctcaaagtgaggtttgagatccctcaaataagacaaagataaaataattgtaggctaacttgattgactttcaataaccggttttacaaccggatggtacaaatattgatgtgagaataattatattttgattagtttttcttttttgaaataaaaatataatattttaaggggtaattttgtaatttgattttattggtgagatgtatttacaaagaagggatttgtatttcatagggtagaaagtgtattcatgtttttagtgggttttagtgttagatgaggttatattgttgagttactcacatttttctattaagagtattaccaaatcaaatttaaacaataaatacaaaaacaaaaaagacaaatatttcttgctgacaataatttataagggttgccttttaagaaaaataatttataactactactattttttattgttaattattattattttattccttttaaatataattaataagatttaaaatacgaaaaaaaaatatgaggtgaactaataatattatttcatgtggtatctaaataatggatggaacaaaattataatattagatatttttgctgaaaaattggatatataagtgaagggtcgtgtttagaaaaatggcagctttaggcagcgtaaaattatagggctttttttttttttttatttaagaaaaaca

SEQ ID NO: 84131 - DNA, 1422 bp, Cannabis sativa
aaggagttgatgtggcaacctaaataagtttctttctctaattttcattttctcaaattttttgatttaattagttttgttctatttttctcatttaattatttgtttatgaataaagtgatatcaattttgtagtaataaatagaataattattgttattatttactaaatatcattaaacgtataaagaaaagaaaccaaaagacacataattaattttgattattatgtattattttaataaaataatatattattaccaaaaaaataaaagttggaaaaaaatattatgtttattatcaattcattactcatcaatagtaatgacataataatattaataataatttaaaattaataactatatatatttccaaaaggactgtttatatgttattattattattctaaaatatactaattattttttttctttcttttctttttatttttaaagaaatatatattaacttagttacaaaaaatatatttaccaatttaattattatacatgacccaaatataattaatgtacaatcaatatcattattcttcttttataggttgattttttcacattaattttattatacaaaaactatttgtattcttttattaaaagaaaagaaaaaccttttgtattcttgtatttaaaaaaaaaaaaaaactatttatattctttgtataactcttatttatgtgatatttgatgcactatattatatatagatataaaataaaagagtaaaaggtagtatgtgccaccaattatatatggagtttaaacaagatgacagtaaatatttctttggtgtttatgcatctccactcttgtgcattcggtacaccataccaatttcttctctttaagttttaataagatatatatcttgctaaattacatgtaagttgtacattgttataacttattctttttcattttagatacaagaattcaatatatataatttgttgaaagtttttgatacatgcttttaatttcttcatcaagttggttcggaatcgtagctaggtatgctataactactctctaaaacttttatcattcatagtatttattttctttgtatatataagtactcattctcttttatttttatattaatattgtgttattacttatcaatttaaaattctaaaatatcatcttttgaaatatataaagtagctaggggtagatcacatatgatccatcttctcaagcacttgcaagacacacactcatatatttattctcaaattcatttattttaaggtacaggattgacgtaccaatgagaaactcaattgcagtcaaaatcaacaaaaatgactctcaaatggataaaaacactacttgggtcgaagaaaacgacaaatggcaagagaacaaattgaaattggatatatattatattatt

SEQ ID NO: 84132 - DNA, 784 bp, Cannabis sativa
cattgtctaatatcattcgaaattaattgtttagataaaattaagttttaatattcattataattaattgctttaattatttttaatttctatgggacgatatcaatctcttgaccactattattacttgtcaatttgtgcacttgcaaacatatgcatatataaaattcgcatgtaagctcaacaaagccttgtatggcttgaagcaagcccctagagcttggtttgagaagttatcaacaatcttgctgcactatggctttcacttctccaaaggatatcaatcctcgctttttagggttactccatcgaattgcatctatatcttagtctatgtagattgtcatgggaagtgatgacacacttgtgaattagctcaatgcagaactcaattctactttgctctaaggtatctcggtttagtagattacttgggtattcaagttacaaggaccctagatggaattttactttcacaagcatactactttcaagatcttctctacaaagttgatatccagaatgttaacacaaaaaatacaccaatgaattgtggccccaaactctccacttgatagtgaacctttcaaagatgttactctttataaatctattgttggagccttacaataatatgccactatcacaaaaccttaacttgaattttgtgttaacaaaatgtgtcaatttatgcagcagctattgcttgcacactggacgaaaaaggattctcaggtacatagctgggacacttgactatggtcttttacttaaatcaactcta

SEQ ID NO: 84133 - DNA, 1053 bp, Cannabis sativa
ttctttaatttttaattatatcactttcaaataacatagaaaaaaactagcaaaaaatttagttatatgtatactatgtgtaatataatataacatatataatatatattatataacatatatatatatattatatctattctatataaaatgtggttatataactgaatttttatgagaaattattgggtgatttttttttaaacttttctattcaacctaaacttaaaatattccaaaaattattcacgcctagattgagtggaagcttaaaagagttcgactaaaattttcaagcgtcgctggatcgaaatggggtttgctaggtctcgctcgtggattattcaaaatccatatctacaacgatctaattaatagtcttcttcatccttattcaccgatcgaggccattaatttctatatattatatttatataaaaacaacaacatggttaacacaaccaaccatttttaaatcatataatattaattcaattccataaaacttaacatctcttatctcggagttatgaatgcggtacactggcattgaagatgaagagaagacaaaatggagttagggttttcgcgagaactgatttgtagcgggaaaaagggacagtgttgttgcaaatgtgagaatgaagggaagaagaagataagagaaatagttttaaacttgtaattttaggtatttttaattttgaactcaaccgaaaccgataatcctacccaacaaccgtttcacagtcaatcttgtttgttttatatacacgtttctcttttataataaatgactatatttcaaaatacctataggctttgaataaatgtttgttggatttttgaccaattgcaggattcaaatttgatctctacaaattaataagttttccaatctgttttagactttccttttgccgtgttgatttgttaatttattgttattattattttattttttatttaacctttttttggtaaatatgacgaacattaatatagaattttcttttcacttttttagtttttgatccatatataatgttttct

SEQ ID NO: 84134 - DNA, 778 bp, Cannabis sativa
ttgcacattttttgtaattatgttgtttttgttgtacatttatgaaaaaagccctattttttattccttgcataccagattttgtacactgcagcaactacacaagctgtatagcagttctttttgaatttgctttatttttccctattaatccacctcagaacaccctgcaacgaattgatttttgacttccgtcctagccaatttttcaattcctgtagggaaggttgtgaaaacctacagttaaaaaatagatgacacatactctctgcttcagtattacacagcaaacaatttgttttgtacagcaatccataatacaaaattatgttttggtacattcaacctgctccaaatctgctggctgaggtgaaaattcctctgttcctgcatcagcaacttataaacagcagagattttgaactcaaatgttgcaaattgatcaggaggaataatttgtttcaccaaatcctttgtgtacactactctcctccaataccagctgctttgactgggagcttcatacccccaccaatcatcctcttcaatatacacactatgcacccactttacccataggttattcttcttagaagcaatcacccacacatgttttgcaactgcagcttgattccatttggcaatatcttgaaagccaatccctccagcttttttagacttgcacagatgctcccaagcaatgttgcctggtccattcatgttacttctccctgaccaaagaaagcttctacagatactctcaatctctttaattact

SEQ ID NO: 84135 - DNA, 1270 bp, Cannabis sativa
caacgtattttctacttttttccacgtggaggggccacatcaggtggacaaattttgggataacaaaatgcaatttgcatattaagatagtgagatcaattatagatagaggatattgcattaaattatgtgaggatagataaactccaagtccatttgcaaagtttcttaaaaggtatgggttcattacccacacacccaaatattggtgtgtgacatgtttaaaaaactaatcattattggacacgggatggagcctgcataacaaactccaaactttcctaaatttttgttggttgatactcttcaacggtagtgtgcatatagaattgtattctaaccaaaattgtttctcaaacatattttgagtggtgataaggttggaaaccgatttcatgatatgcacacattttaaaaatacttgtatacagttagagtaaaattatcaaagaaaagatctggatccaaataccataaatgggcatttcacttagaacactataagatctaaaggttacatattttattatccatctcacaatactagaattgcagaattaagaattaacttgattagtgggagtgattgatccatgaacatagtttttgagaaagataatttatattttctcaaacttccaacttaagtattaaattgactgtgatttataacaacccttaagtttaattgttattgagatttcacaattaatcattaaagatccacaagtcactgataaaattctaaccagtcatattattagtaattgcttgcaaattgctaaacaacatacatgttgaaccatttgctctttaagagagtttggttcatccttaagatgacttattagaacaaaaatatcaatggtttctagtgtttacattatgtacaataagagtacaactacaatattagtttaagacacaaattaatggtataatattccatgaatgaagaaatgaatatcctaatgagcaatgtagtctcttagtaaagttacgtaatggggtggagaacattaattatagatttttttactaataaatactcattaagcaatatggagaaacataaagatataaaactagatttattgttaagaagtttattttgaactaagaatcaataacaaatgagatttgcattctcagttgtatttatagaagattctattattttttggtcgtttcaattcattagtcggttccaaacagtgaattaaaagagaaggtatacagataattataaagattttcctcttatagtggt

SEQ ID NO: 84136 - DNA, 1040 bp, Cannabis sativa
  modified_base (981)..(989): a, c, t, g, unknown or other
ggagattacataggggcattcgtcgaatgttgtccaaacaatttcatgggtatatggagggattatatgagaagtggagtcaccattaatttgtccaaacctctgaagtgaagaatgagacttcgcaactgggtaacatggatcctattgataacattgggcaaaaaaacttgactgggcgggctccgaatcacggacctgccatggattatgattattttaagctggaattgttgtgggcttgggaccccgttgaccgttcaattcctaaaggatattattatccaaaagaaacccaattttatttttctttgtgaaacactttgtcaaaaagaaaagatggatagattgaaaattgctatcggttttgagggttcactcagtgtaggaagtcagggacatactggtgggcttcaagttctttggagaaataaggaggaggtggaattaaaaactttcagcacaaatcatattgatatgattattatatctactcccgaatggcctcaatttcgtctcacatgagtctatggagaaccaaattggtctaaacaaaagctcacttggaagctcatgagtgatcttgcaactacgtccagtcttccgtgtgtctcatgggagacatgaacaatgtaacttgccaaagtgataaaagagggggaagactatatccaaattggctcattgaaggattccaaaatgttttggctagttgtggtctcattgacatggagatggaaggttacaagttcactttggagagaggaaagggtactgaaatttgggtagagatcaagcttgatcgagctcttgtcactccaagttggctagataagtttccaagtgcaaagctcaccaatcttgaagtttctacctcggaccactgcccgattctccttgccccttctatccaaactcaacaaccatctactcaaagttgttgggctttttgccctaaataaaacgcatttcaatataatnnnnnnnnntaattaataaagatcagaaatctcattttatgttgcatggtacacataatt

SEQ ID NO: 84137 - DNA, 599 bp, Cannabis sativa
aatatagggtctattttgtcattttacaaaacagaaggtctaattagtaacttttgcaaaacacacggtccaaaatagtatttacccaattaaattagattaaggacatgatagaattttagtaattgaataaatgttatttttgtgtgattaaacttatataaaaaaatagaattaggaaaaaaaatataaccattgataaatctataagaaactcatcaaatttaaaattgttgtcatcaccgtatctcacttgtcattaaatttaaagttgttatgattactgtatctcacttgtaatctttactatcttgaaaaaaatatataacgattgataaatttatatatacatataaaaaaaaatgatactgaatagagagaatgaaaagtatcaataaatgataatgtaaaaaaaattaatttaaattgtaagataatagcatgcaatcagaaaattcttttgaataaacttctcaaaaatattttaaaaggtaatagatattttattttgtaaatataacaaaataagaaaaatagaaaaaaaaatatagaaaatagataaataataaaataaaagataattaggtatagatattaga

SEQ ID NO: 84138 - DNA, 1249 bp, Cannabis sativa
  modified_base (77)..(77): a, c, t, g, unknown or other
  modified_base (492)..(495): a, c, t, g, unknown or other
  modified_base (596)..(607): a, c, t, g, unknown or other
tttttttttattgtaggtacataatatggtttgttgtatggtatatggtttttatagtatatcatttatttaagatnatatttagtttttattttattatacataaattttttggtatgtatacatattttaatagtggtatatctattctatataaaatgtggttatataacagaattcttagtttatgagaaattattaggtgatcttttttttttaaataaaaaaataacaaattattagatgttgtcacgtaataggtcagagttagttaaacctaaatataattaatccacctaaagtgttgctctttattttttttattaaaaattatttgaaattttgatatttagaattagttaaattttaaattattttaaattaaatttgaatgttttgatattttaaccagatgagcattttcattaattccgaagataaatttaggacaaataatattttttttaattactattacaaagtataatagtnnnntttgtttttatttaaatcactattatactttcaaatttcaatgacactacattgaatattattaattttattataatattaaaaaaaactaaaaactaaannnnnnnnnnnntacgtgacttggcacgtaacatctatctagtatacatatatataattttgttagcattgtatatatattttgagtattagtttagtattattataattttttttgtggtatataattttattactatggtatattaatttcagtgatacgatatatcaaatactgttgtatatattgaatgatctaatatatttttcatttttgttacaatataataatacgtaatactaaaaaattatataatttaatttaattattatattttttttacgaaaaaataatatataataaatatatttttataatttttgttaactaatttttaatatgtagtcattttttaaatttttttaataaaaaaatattaattaacgaaatttttaaatttaatatcatttcaattaagatcattttgcattctttaaatgaaaactctgtaacaatattttatgaaatagtactttaggaaattataataaatggccccaaatataggactatgttagtttatgtcctcatttaaaaaaaaaatagcaaatggtcctatatcataagactatgttagtaaatgtcctcatttcaaaatcattaatttttttattatttttttagaattagaagcaaattatttaaatattatgg

SEQ ID NO: 84139 - DNA, 742 bp, Cannabis sativa
attgtattgagaggtgagattggcatcgttagaaaaacaacttggttgtaggtgaggttgaaatcaattttgtaaataactcaagtgagattgtcaatacaaaaaattcgagagtgagattggtacttctacaatttgaagaggttgttagtcttttggaaactattgatttagatgaagttggcactggtggaaaaataactcagtttgtgagattgacacttcgactctccggtgaggttgatagtcatggaagaaaactattgtgagaggttaagaaaaaatcttggtgaaaaattctccaattgtaagggttagtcaagcccgttaacttgactcgatagttgaactcaaaattaagtccatagttttgaagaccaaggacgtaggtggtttagttctactaaaacttgtaaaaatcaagagtttgcaatttctatccccaaactctttatatttcaagtttattatttgtttatacttgtgttatctatgtgattgcattaaattaaatatttgtataaattgtctttggagttttcaaattttcaaaattagtttaaatttttaatttaacgctcctcttgaaaacctatcttaggttaatatttaatttattcaaaaacatagtatgtatttatatccaaaattagagagtaaataagaaactaactaaaaatataataacatagctaatatattctagggcattttacaattttgtatacattattttaattaa

SEQ ID NO: 84140 - DNA, 705 bp, Cannabis sativa
tttgccactatttcttccaaagttattgttgttgcacctgcccctaatttttttaccactaaaggtctggtctgggtaagattgctagtgcccacctacgcacctagcaagtcttggggcagggcaccctgagactgcctattgctgacttgtccagattgggcttacagatagcttcttccagcttgataaatctatcagctctatcaaggaactccttcatattactggttgagatcctctggatatctttccagaagtcactcaatggaaggatgcccccactatgctcatatactagccttcttttattaggcctttgaccttagtggcttcagccataaacctttggatgtaatcttttaaaggttcaccttgtcgttgtttgaccgcgacaagatcttccagctacaatggtatcagtctcaaggatgagaactgggtgtataattctcgagaaaattaattccaagaattgaaccttcctcgagccagctttaagtaccattactaagttgtttccaatagggttgccaggaagatttgacatcgcacatcactaataatcttttaagattaagttgcatctcgaagtacttgatgtgtgctagtgggtcctctcatccaggatacatcttccatactggcatcttgaactttggcaagggcaaggtatttatgtatgcgaagaatggtgaacccctt

SEQ ID NO: 84141 - DNA, 619 bp, Cannabis sativa
tgtcatttaacaaaatagacagtccaattggtaacttttgcaaaacacacggtccaaaatagtatttaccctaataatagtaataagaaatattttgctcataatttaatcaaaacaatatgaaaataaaaaaaaatgacagcatatcattcaatctagcagtataatattttaagaaaagaatggtcttcatctcattaagaaaatctgaaaaacgaaaattacaaacagataataaataaagtccataacagattaaagattgaaaaaataatacaaaatattaacccaaaatctaaccacctaaaaaaacaaaactatgaacaaagagagatgtgcaagagatatatggaccatcatatgtcggtgatggcatgagctccgagtattcaatggtcgtcgcacgaacgaagaagaaagtgaagagagtgatcttggtatagcgagaaattccagtgatggcctaagctctggtcttcaatgggtgtcacacgaacgaaaaagaaggtgagtagagatttggtgagcgagagaagaaggggaagagaaagtggagagagagatagagacagagagagagtgtgtgtgtgtgacggtaaatagagagagagagagagag

SEQ ID NO: 84142 - DNA, 871 bp, Cannabis sativa
cttaatatatattattcacatatatttatcacattttaatctatactttattatattataaaataatataacaatttatctacaaaagagctagatttttggaaatgcgtcaccagtaaaatttggtcacaatttttagtggtgcattggaaaagataataatggcagcattgaaatgttatatttttcaattgaaaaacaaaaaagagaaagatattggaatgtaatttgttaaagaaaacattggaatattatgtaatattttcaataaatacatcttagcttttgtcttgtttttctgacagtgcagcgcacgtgccaaaatgaaaattgttacaaccgagtatgatataatattgtgggtcattttctccttggactataaaacaaatcattcaacaccagcttatacgttatccccgcggctaaatgattctttgacccttcatcctcttataaggttataaatacttaaacatttagctacaaaaacactatcgaaacaaacaacatgaatatcacttctttaaattttgaaatggtaacttcaattattatttgttaacataaataattaattaatattatcccgaccacgaaaaataattggataggattctttctctcaaccgttccttagtccatgcgatacatcaactgataaggagactacgtacacagaccaaaagggaagcagcaaagatatatagctgatttttattataacgatgaacatataacaaataattaaggaatgacccctgcaaattataataatattaatttctacctcagaaacctacctagtgtaactttattaatgccaaatatcacttatatatacaacctatatctcgatttatttatgtat

SEQ ID NO: 84143 - DNA, 560 bp, Cannabis sativa
  modified_base (109)..(115): a, c, t, g, unknown or other
accatgctccccaaactttgatacttaccaaattatgtcccttaaactttgatatgtactaaatcatgccccttgaattttcgtctttgttagaatttttttactaaannnnnnnaaaagtccttaaatctaacaatcctaatagtccatggggaatttttaacggctaaaaaaattcaggaagcataattcagtacatgtcaaagttcgaggggaaaaattgctaattagcctttttgttactttaagtttttttggtaaaatatgtgggaacttgatttaaaaatatttatattctaaacatgatattagagtaaacaaaaatgaaatcaaaaaagtaattgtgattcaaaaattgttagttgatccaatctaaaaatttaagtcaaaaaagttacttataattcaaaaatagtcaaattaatcctacttcataaatcagacttccacattcttaattaacatggaataatacaaataaagcaaaaaggaaactcgtttcttcttcacaattccagcactttatattttctttgatgatattcaaattataagtatat

SEQ ID NO: 84144 - DNA, 524 bp, Cannabis sativa
aaattttcactatatcctaagtttacacacttggtggaatgatattggaacttgtgtgtttggtaaggtcttagacatggataacaagcaacaccaaaggtcttaagatatttgtaatctggtttcttagagaagagagtttccatgggagaaatgttacctaaaacaggtgttggcaacctgtttataaggtatacagcagtaaggaaagcatcacaccaatatttcaaaggcatgcttgcttgagcaaggagagtaagacccatttccacaatgtgtctatgctttctctcagctcttccattttgagctgaggtatggggacaagagtgttggaaatcaataccactctcaatgacaagattagagaagggttgatattccccaccataatcagatttcagcttcttaattttcctgttgaattgattttcagcaagattcttaaactgtgtaaaagcttgaaaggcatcagacttggcttttaatggataaagccaagtatacctgctgaaatcgtctat

SEQ ID NO: 84145 - DNA, 762 bp, Cannabis sativa
atttatgctcatcacgtggcctcctagcatatactaagtggaatggaggtttattagtgggaaagaaaaggctgagaaaatttaagtagtatttttaaatgaaataagtaatttagggtatacaataaaatgtgaatatattacaaatattgaacaacttaggtttaagtttttattcttaacctataacatgaataaaatcaaatttctctttcaaactctattggaacatgtccttgaataataatgttagttcgaactttaaacttgagttgggggttagtgaatgaaagtaaaattataattttgatatggtttgaaatttgaacctacttcgcacttcaccactgagttccaaaaatgcttgaattacttctatacttatttttcaaaacacaactttaaaaataaaatcaaatattattgtcacccaaagctaaaatattcacatgcttattaacgaagatagtgtttagtaatacttttgtttttaaatttttttaatcacacaaattaaattaaatcctttaaatttatttttgaaaaacaaaaaatatgttctataattacgtttatttttcaatttaaaaaacaaaaacaaaagtgtcctaaaaatatcatttttatttgttaattttatttaaatcgcatctgggttcagattcaggaccaaagttaaattcgagcttgagtccgaatctaaatctagatctgagtccgagtcaaaattatctaggacccgagtcagttacaaaatccgaa

SEQ ID NO: 84146 - DNA, 1400 bp, Cannabis sativa
  modified_base (42)..(44): a, c, t, g, unknown or other
ttcagaaacccaaaccgtaaatttgaaaaaaaaagttaaaannnatagtatatggggtaattctcttttttttttattagttttcctccctctcttgcctcctcttcttaacaatagaataggagagttttacttgttggctactcacatatatttatgaaatgtagtttttattttttattaattgttttatctttttcctttttgatttcaattttataaattatctctgttcacttatgctcttttactatctatctcatttttgtatatatataaatttaattgctccattcttttttttttcactactattttttcaacttatataaattaatcatgagtctatcaatatctatatatataaaagagagatatgagacagtgacatgactctataatcactcctaatagtactatttgttctctaattgatcatctcattttttaatttttttaacagattcataaatatttatttattttcacatatattttttctaattttttaaaaattattaatatatacataaagcgatgacatgacattttataatcactcctaatagtattattcattaggctcgattttctattaatatttcttttctctcaatattttataatatatttcttggtagattgttaattattgtcaatattctctggtactttttttcttacatatatttgtatgtatagactcttaatctttctctcacttcaaaatattttccgataatttagagacataggtttttctttatgacaactttacggttgtcggtaattttgaattattcatgattttcattagtataaattatttgatgtagataagttatttttttaatgataggccttgagattcgtgaaagatcataaaaagactattagaataaagttgaggatgaacgcggtgacataacatcataaacgctctacactatttttttttctaattttttttctcaattttaatctacattactttttttttaaaaaaaaatctacattaataaataattgaaataaaaataaagcataatcactgatataacaactaaaaaaatccctaactaatggtgtatatagtttttttctaaaaaagattcatgtatataataaaatggcaaactaaccttcacggtaaaacttattaattatttgtatcaaatattttaatttaaaaaaaataataataatagtaataataaaatatcaatgtttaaactaaaagtaattaaatattgacatagtgaattaatatatatatatatatatatttacgtcaccagttaataatactaaatcaatatctatatatatatatatatattaattctctatgtatataaaggagagatatgaggcgctgacatgacgcttcaaaataattt

SEQ ID NO: 84147 - DNA, 928 bp, Cannabis sativa
attttcaagtaataagtctgccacattagtaatgttggtgttgaggctcccaattggtttcgggcaaaaacctttacgatgcggaatccaggggtccccccagatcttagtattcttaccatttgtaaacagcttacaggcaccttttttcaagatagaatttgccttaatgacacttttccaaaaccaggaatcagaatttttatacttacaattcagaaagtcttcccctcttaggtatttggctcttaaaactctgcaacacaacgattgacttccagttagcatattccaaccccatttggcaagaaaggcctgattcatttctttggttttccggaatcctaggccaccacgcgatttagggagacacagtttatcccacgcccggagatgaataccatgatttcctttctcaaaaccccaccaaaaatctctaaccaaaccatcaatcttgttaaccacgcgtggataattttgtcgtttgcatggcatacattggtaaaccacagaataagagtagctcgccctgctttagacaacgttttcgccttccatccctgaagcttagtcgtgaggttatccaggataaaattgaaatcagcatctttctgtctggatcggaagagaggcagccccaaatatttaatacatccttcaggggattcaattcccagggcttccttaattccttctcgcacactcaccggggtattcttactaaagaaaatggacgttttaagcttatttacctgttggcccgaccaagagcagaaattctcaagacatctccagaatccgttgacctcagataagttagctcgacctacaagaatgtcatccgcaaagaagatatgggacagagtcgggccacccctacttaatttaatgccctgaatagtgccctgatcaagggcaacatggaaca

SEQ ID NO: 84148 - DNA, 679 bp, Cannabis sativa
  modified_base (54)..(72): a, c, t, g, unknown or other
catgcaacataaaaatgttatttttgatctttattattaagtaaatctgattannnnnnnnnnnnnnnnnnntagggcacaaaacccaatagttattccatcgtatagagggcgagacggatgaacatagttattctctccatgtacagctatgtgggtcaatgatttgcaagctcttactcccaagtatgtgggttaatgagctgcaagcttttgttatgtcgtcttgaacacttctatgataaactttgtctatcccgagatggatatattgtctcatgagttatacctgttaataattattattcttatcatgcatatgcttatgtagcagcgagtttgaataattttatcatctataatttattgaaacgagttatttaggccacatttagtaatgaatttaatattataatcattgagcttattcatatcccttttgtagtacatgtttcagcttctggttgatagtcgatttttggcgcgctacttgttgattttctatgttttcggcctaaaatagtgtttttcgccaaactttatcatttttcaacatttttttgattccataagtttgtacacctcacatttcacatcattaaactactttgaaagaaagtttttaattttgttgcttaaaactcattttcgataaggttctagttttcttggcaatttt

SEQ ID NO: 84149 - DNA, 1646 bp, Cannabis sativa
gaccgagcaggtagattaggctctctgatccgaatagtatgttcaatgggcctctgcccagtcgggagggttttcttcttcttaagcggcctttcctgctctgaatattcctaagcttccttctcctgctcagaatattcctgagcagactacttggctcctgcatcacccttcaacttagcctcacacttaagttgaatgagctccttctcgtgctcagctccctcagcccggccagcactgcaattcttctttctccccttcacaggctgggtattaagtctgccggataaagcttgtactccacaaagttgtcctccgaggtaaacaaagtgatatttcaagcagcatccgacaaatggacaatcctctgagccttgtctctaagtaccaatgtgaagggtggacggtaatatatcgagatctgttaaaaccgagtataggtagaatccatgccttccacgaagtaatactcgtcaacaaaacccccaatctttctgacatccctgtccacggtgcccgttaaccacttaaagtctggctgagaaaagtagaagtaccccgacctgctttgcttgggggtagactttaagtcaaagaactaattaacctcgtttggggatggcataccccatccttgaatggcgtagaagacgaacagggcagacaagtacttaatgcccttgggagtgaattgggtcggaaaaaggtgaaaatagtccgccaccctcttgaagtgcaggtgcaaaggcaccatcgccccttgcttagtgtgagcacccgaccaggcacacatccctttctacaggttcgttgcccggtgattcggagaaggaatgtaacactccagtccacccaaatacccagccttgtctaaagccttcatgtgtgcctcacttatttcggacagagggctcacccatctggtacctaaggcaccttgcctcttatgagcaactgcttcagtagactcctcggtaacgtagtcctccccttcgaccaagacttcatcgtccgcagacactagccccagcctcattataccctccaaagtttggaggctcagccactccttcctcctcgacctcgaaagggctgccaggacagacgtcgtcctactcctcaatctcctggacctcaatgtccccctcatgatctccctcctccatggcgggtagatcttgttcggcacttggcaatgtgatgagctgggccacatgaggatcagatgcgttgaccttccgcatcgtctgctttgtgcgagtcatcatcctcctcctggacggatactgatgtgtatgtcgtgcaaccgttacagcagggacaacaattgggatgccgaagttacccaaacttggacggccaacaggaagggtatcagcaacacctggtcggacaatgtatgtccagttggacgtaagataatgcctccaacctttttacacttcctaaataaagcggtcgtacccctctccaacgatctactcagagtaatggtggtgttgcactactgttatagtaagatttctcttatctagaaactcgagaccagacccctacttagaggacacgtatactcagattttccaaagaaagctgagatgtccctgagggactcctcgaattttaaacctcgcttaagatag

SEQ ID NO: 84150 - DNA, 1347 bp, Cannabis sativa
ataaaaccaacatacaacccaaatcatggtcgatttatagaaagctaaacaaaatctaagataatcttaataagaaaaggaaaaataccattgaaaattaccaaaatccactcatggaaaaacaaaaatattccaaaactaattagtttgaaaactgtttctaaagtccaaaacacaggtctataaacttgtgcaagataaaacaagaaaggatattccaataagttcctaaccttgtttttttaccatataataatatgcctccgcatccactgtcgtcataaatatacacataatatatagttataaattattttatagttatagtataagttacagagtcggttcatcatctaatctccacactcacacgatcaaaagatcaagagatttgccagtataaggctatatatcttcctatgactagcctcaatccacacacgacttgcctcactgtcccttacttccactgcatcttcacaacattccttctacatagacacgtactttacacgtgttctttcattttttaccaaagctttaacactacttactaacatactacacctaaaatcaaactattatgatcaattgactattaattaattttcaatcaaaagaaaaggaaatctcagtggactaattgatttactagcagtttcatatggtttggaacctttctaatattacttgaaaatactacatctttggtctgtcattttctatatctgaaactcaaaagaagcataaatatatgaatatatatgaattttctcttccacaaagaaagtaagaagcatatacccgaatatgagatcaatccactcatgaagatgtgcagagacatgttcactctcaagagctatacgatgcttatgaatgaaatcaataggactttcagcccaaaggaccaaagtcaaatcaaatacctctcagttgtcttcttgacctccagaggtgcctccacaactttggcatctgaaacgaacaaaaaaggttaagaataaaattcatcaaatgaaaatgaacaaagaaaaacattaataaatcaagcaaaaggggacatgcatacccagattcattttaattttagcatcgagactgcaactatggaaactgagcaaatatcttgaagaaatcaaagagtggtgttgagcaactgccgagaatgaaaaaatagagagaaatagagaggggaggatcgtggagattgtaaagaaatggagagagagagagggtattcatggattataagagaaccacagggaaatgagtggatgaagcggtagagtttcaaagaagggaacaatgggggagtgagagagttttgacagagctttctcgcga

SEQ ID NO: 84151 - DNA, 675 bp, Cannabis sativa
ttgtcacatgtccccaaacttctttactatattgatgaagtttggcaccgtgtctcaaatcttggtgatgcaattagatacgcaacattcatatgtgagctgatgcttgacttccacaacttcgttttcgaaaagacttatattgtggaaacaaacggcatggaagaagaacgcatgaagaacatacgatttaagctaagtgacgacagtatggaggacataactgaatctgttaacgtaacaaatgaacgagatttggaagaattagaaatgctagactattttgaagtgacagcagaaatgttggaacttgaactaaaaatcccacctcaaatagaggcagatgaaatagtagaagtaatagagattccttcaaatgaagaatccaaagatgaggaaatgcctgaagggtccaatgacctagattacccccccaataccgaagagcaaggacttacatctatccacagcaaccaacatcgatcaactagaagatgacatacctgattatcattttgaagtagaaattgatgagtccgactctgaatctgagaacatgccagcatcaattccaacagatgtagaaatagaaatagacttcgaggaacacccagaagaaggcctggaagaagaccctgaagaatccaaagccgagtcatgcgtagaggacgaata

SEQ ID NO: 84152 - DNA, 560 bp, Cannabis sativa
ttgcaaatctttacaaaaaaaaaaaaaaatgccaccaggggaaaaccattgtcttggcaaaggggccattttctaaaagagaaaagcgagataaataaataaccaagtctacatgttaggagacatgcacaggtcttcttcttcttcttcctcgacctcgccctcttcttcctccatcctggtcttctcgcaaagggctaaagtttcctcttcctgctcctctaagaagctggtgtccatattggggttcttcatctaggctcgataaacggtgcaaaaaccaaccttttcgcatcgttcaacggtctcgacttctttttcagcgagcttcttcttaaactcatcaacttgggctttgacggtcttcttggcctcctctttttccttctcggcttcctctttggccttctcggcttcctcttttgcattctcggcttcctccttcgctctctcggcttcttgcttaaggcgggtattttcttattaggcgtcgtcctgatgcttattcacagccttgcattggatagtaatttgtggacctcgccctccaagtattcgag

SEQ ID NO: 84153 - DNA, 795 bp, Cannabis sativa
tatttgatttctcgatttaatatcctgaattaattgtcaaaatattctgataattaatgtggcagagacttttgatggaatgtctcacctatataaatataggatatcaattcccgagctcactactcattttgtgaaaatataataaatccatctaaagagagtagagagagcttggaagctcgattacccacgctaattagtttccttatttacagataaaaacttgtgtgaaatggaagctcaaacttcaatgactatacgtatttcgattctatagttatatagtgtatttgtttattttatttcgcattttatatacatatttatatatttcatctattcatataaaatgtctaacaattctgtccaaacaagaggaattgcgagaaaaggagagagaagaggaaggatggataggttaggaggggattgagagactagctagaggaatagaagtgatacttctatgttgtttggtaagttaggaaggagataaataattagagtgaaatagagagaattttaattaggaaattattatattatctgttgttaaaaatggattttttgaatttggaaggatttgctctcccttcacttccccctccccctcctctaatccttcctaccaaaataaaggaattgacctctccttccacttctttccttccacacatttatctatccataaatcccctctaccaaacacacaggtgaaggtttttgtgggctttttgattgctaattattattggctagtggtatttgactattggagttgcatttcgttat

SEQ ID NO: 84154 - DNA, 752 bp, Cannabis sativa
ttttttatataaaatatctacaaatttttatttttaaatatataaaattaataaagaatattttgttaagtaataatatattctattaaagttaacgtataaaactaaaaaatactattgaattaaaaattgtgttacgtagtcacattttatattgtatagattatgcaatgaaacctatggtacggaaaaagaaattttactatattagttttaaaataagtaataactcaatttgagaaaataaaaaaagaagtaaaactcaaacatgctacttataaatccaacaaaacataattatatctgagttgattattaaattcattaattaaattattataattggtgtgtttcaaataagtcacatattaaatgtcaagttacttaattgtagaaaacaataaaaaaataagctagagtaatttgcgcggcataaccttcataagtgcttaggtttttgcaactaactcccaattccaaaattttattggtaaaatcacataaacctcgataccgttagcaaaaacactcccccgtctaacagaccccattttctgtttatgtggctcggcagcccaaatgctaagtagacttgcaagtgccaaggcaccaaaataccaattacgtggcattatccattgaaaacctagaaatataacttaaaactaaaattaactaataatgttacctaaattaaaataaaccctatttaaataaaattcaaatccacaaaaccagaataagaatctcaa

SEQ ID NO: 84155 - DNA, 507 bp, Cannabis sativa
tcaaagtcttcaattccttttttgttttaggttatgttgtgtaacttgtgttgtgtcttcaataatatcatagtttcttgattcatttttcaatttgagatatttaacatatttgaaattagattgtgatcggatttaattccaattttattttatatgtgtttgcaggtttagtatgcactttgaaatgtagctataaaattaagaagagacagagtgtgtatggatgtttcgatggatatatatgtaaggcttatgataatatgttatcttattagctagttttctttccttttgaatttctgattctcagtcattggcagtgttgtgatcataataacgtaagtccttaactaaggcagggtgatcttctaagagctggaaagagaagattagtttcaccattcaatctaaaggtttgatctctactctacttgtttgttaaggcctttcaaattaatagccaccattccatttcgaccgtataaatgagtaccggtttgcatt

SEQ ID NO: 84156 - DNA, 4968 bp, Cannabis sativa
  modified_base (4923)..(4932): a, c, t, g, unknown or other
gtatttgttgtgttacccaacaactaaaaagggaaaagacactagtagtttgccacgaaatatgtctttttcttcatgtttttcagtccaaatagaagcttcgccattgtcgataataaacacttcactaatggttcttaccatctattaaatctacatgtaaatataagactattcataaaatttctaaaacaaaataacaattacttttcatgaatgtatgcatgaatctatatagtttctgatgtgcttgcttgtggttgattcacataatgtatttgctagagattagtggtgagaataatttatgttacccaagtcagtccctctgaagaatataatgttaaggttagagccaatatatgtggaagaatgaagaatggatttgccactgcaaatcaatcattgatgaactctcatcctttcatctcatcacccactgtaaattcttaggctacaattttagtgatgctttgtcttttgacaatttatatttatatatgactgatatgtttcctatgatcaaaaaaaaaaaaaatatgtttcctgtgatcaacttgcaacactttgcaaaagttggaactagttccaaagaaaattacataaaacaagatatgaaatcaaatcggaaaactaaaatctgaaagaccaaaatcttatttcagagagattaaacccagaacccaaataagagattaaatttaaaaacctagaaaaagctaaggagagattatctcaaactttgaaaatcctaaaatcagaaaataaaagaaagaaaatcatacttgtaatagtaaaaaaccttcctctctgataagcttatcatctcgtcatcttcatgctgttctcatttttcattctcaaatctgagaataaaggaaacataaataaacctgacactatgacagagagggagagagaaagccacacatatatacagagaaagagaatatggagagagagaggaagggatctttacctgatgccatggaagattgaagagggaaatcgcacaaggaggagtagaaacaagcgagaaaaagtgattgagaaaaaaagtgttttcaaaatttttaatatcatcagaaatctgttttcaaaattattatttttgatttcaaattaaaaaaatagaaaataaattaaaccgaacacattttcaatttctgtttttatttttttaattaatatttacgtttattatattatataaatcttctgtttaacaacaagcgcatctggtgtagtggtatcatagtaccctcccacggtactgaccagggttcgatttccctggatgcgcagacttttaaattttttcctttttttttttcggctatgtacctattcttaatggaaatttcatttaatatttaaaagaaaaaaatcccatgataaatataccttattattaatttttaatatttatttaaattttatttttataatttttttaaatttatgtatatataatttttttatttttttaaaaaattcatataatttttttatcatattatttaaaatataatttatttttgttttattttgtaagaatataaacaagaagaaaaaagttataaaaaaattaatacaattattaaaatgaggtgtaaatgaaatatttttccttctaaatcgtggcaaactacttgtgtcttttccgtttttacttgttgggactttttttttctttttttgataagttacttgttgggacttgggagcacaacaaatacacttccaatttcgaaaccaaacaaatgagatatgacgccacttccagagctcaataatgttacaatcaaaataatctctttcttaaacaactcaacttcacacaatcaaatacgccaaatccaagctcaactcattctccaaaaccttgtaggtgactccaacattggctcccacttcatcactgtctgcaaatctttaggcctcttggaccttgcccatcttttttacttcacccaaaatcgtagaccccatgtttttatttgcaattctctcatcagggccttttctcattctcataattctcataccccactctttatataccttcatatgctcagaaactcaatccttcctaacaatttcacatacccatttcttcttaaatcattgtctgacttgcgtgagttcaaacaaggtgagtgtgtccatacccacgtcataaaattgggccattataatgatatttacgtgctgaattctctacttgacgtctatgcttcgtctggccatatttacctgtgtcgaaaactgtttgacgaatttccccaaagagatgttgtatcatggacagttttgattatggggtatcggaatgctaggaagtatgatgaatcattaattgcatttgagcagatgcagtatgctggtgttatccccaatcatgtaaccatggtcaatgccttggctgcttgtgctaattttggggcccttgaaatgggactttggatacatgactttataaagagaaacaagtgggacatggatgtgattttggggacttccttaatcgacatgtatgggaaatgcggcaggattgaagagggtttggctgttttcagaagtatgaagaaaaagaataccttcacgtggaatgctgttattcaagggctggctcttgctaagagtggagatgaggctttgtggtggtttaacataatggaacaagaaggggttaaagcagatcaagtaacattggtggctgttcttcttgcttgtagtcatgcagggttagtagatactggtactcgaatttttggagctatagttgatggtaaatatcaatttcctcctactgtcaagcattatgcatgcatggttgacatctttgctcgtgctggacatctagaagaagctttcaaatgcttaaatgaaatgccttatgagcctacaaaagctatatgggggtcactattggctggtggtaaagctcatggaaatctaaacctcagtgaatttgcagcttggaagcttattgaacttgagccaggcaatagtgcttacttcgttgtgctttctaatttgtatgcacagatgggaaaatggagtgatgttgagaaagtgagggagatgatgatagacaagggtcttaagaaaaatttgggttatagttctgtagaatttgagggccacaaactagttgattatttagtatcatagtaattaccttttgaatgtgattacagacagagagctaagaaagaatgcacgatcaatgatatggttgtttctgatatagatattgcatatggtgatgcaaaaatgttgtgtgtgtttaatttctaatttagattacactatgcatattgttatttgcttctaggataatattattgaagcagtaacttattgagtacaaaaacatcaaagctcttaagtatttccatctacttaaacttcagttttcatggcaattaggaccttagaccaagctggccttgctgtaatatcagctgcccaagcatgaacatgggaccgggattcgaacagcttccaggaacgtgtctccatcaagtactgtatgtgaggaaggtggtgaagatctgccaaggtgaagctgtccccagccaagtattttgacttagccaggcgattttcgtagacatctaaaacatttgccaacttagattcattttcctctaccactgcaaaatctgtagtacccatgccaagcattggctttaagactagctcccatgtcaattttgctgctgctggatcaaactgatgactctctatttccagccatactaataagattgccttcttctttgagtctgaatacaataactctgttccctggttagcatactcggtagctatgtattgagtaattgcccttgattctgcgcataagaaggtaatttatttgatacaaaaaaatcaaagcaaattaggatgaaaaaatgagtcttaccaaagagcgttagatctccatcctcaaaagctgggacctgaccaaatggctgcatcatcatccaaccaaaccaatatatgaacatgagtaagattagctttgggaaaacaccacacagaaccaatgaaaatgagttcttccttacattgagagaaagaaaaggttgtcttttatgttcaccaactttcatgtcaacagaaacaaactgaaaggccaactctttctcattgagacaagccataactctcattgcaggttctgagttattgcttgcgtggactttcctcactgccatggttgcttaactaagtattatgagcaaaggaattaataaccaaaacgattatgtcttaggtatttattcttgggacgcctgtatattctaattgggagtagttcttatcctttgaattgatgattattgtattacaaaatgatgagaaaagttgtggtgatctggttagtgattttgtagtcaatattatatagtgtgatagttattttaatggcaagaatacgtacttgcttacataaaattttgactatgtgcactaaatagtttgtttgtagtggatattcgttttctctcaccatattacttttgaagcagccaaaatttaggtccttgtagaatatagttttcttcctaaaattaagattactttattgtttggttggtgaaggtcctagaagaaagaagcatctatttccaaaatctagtgaccgagtcaatttgattcataaagtttgtggattactaccctatatttatttctaaaagaaaagatagttttaaataaataaattagtgtatatggagagcataaaaaggaaaaaagagtagaaactagaggataggagatgaaagtagttcttgcatgttgtttggtggtaaaaatggaatggaaaagaggtagaaaaatttaccacttcttttttacactgttttaactttctaaattttcaaaagggtaaatactattttggannnnnnnnnntgcaaaaattaccaattggactttctattttgttaa

SEQ ID NO: 84157 - DNA, 792 bp, Cannabis sativa
aattggaacagttaattatattctacttaacaagctataatttaataaataagaaatcaaaacataaaaaaaatatgaatataacaataataacaataaataatatataatatgctatattataataaaattatatttttaaataaatataatatttatacatgtattataatttaaaataaaattattaactctacataaataaattttgaaactatatatattctattaagatatactttcttaatatatggaacatagaaaatgaataactgatcataattttgatgatattcttatttataactatcccaaattaagatttagttttttttaataacaaattaaaaattattcttaaatagagtattttttttttttgacaaaaagaggtgcatcttattcatgatcagagaaatcatcccatcacaatagtttgaaaattagtagggataagtcccccaccatacccacgacctggggaggaacaagcgttattcgccaaataattacctgtcttgttcgcaaatcgtttgtaatgaccgcattagcaatttagattagtaaaggcaataattagcactaattattggtatttttataattattatttggatttaattatttgtgggtcccattggtagaaatgtgggcgcactagagttataataattatttttttcaattctggagattttattaaattgtaggagtattatttgaattatgtaatttttacaatttttgctcggcgacagcggaaaatgcgatggatggctagtttaatcacat

SEQ ID NO: 84158 - DNA, 638 bp, Cannabis sativa
atatgattcctagaccagaatcttcaccattatatatagttatttgaaataatttttatgaggttgcatcgtaaatttaaacctcatatatcatcttatctttcatttatatgtacctgtctcttcaagcaaaaaaaattatatttatatgtatccatctttaatattgtagctcatcagtaaaagttactattcaacttagaaataataatcaattatatcttttaccttttatacatactctaaaacaatatatttacaataatgttctatttcatgtgatttgtaatatatgacatgataaacatttcacactaccttaaatagatgttgagattgtaacaagggtagaaaaattgatatcagttgtagaagcataacatcaacttatttgtacacattagtggtaggtcaatagaaagataatacttccaaaaattaagaataatttgcaattttcatattaatgttttaaaattaataaaaaaaattaattttaaaaattaaatttttataaatagtaaaaaactttagtatttatcaaaattgagggggaaaaataaaaattatttaaaaaattaaatacaaaaacaacaaataattgaagcttaattacgaaaacaaaggtaaaacacaaa

SEQ ID NO: 84159 - DNA, 818 bp, Cannabis sativa
taattctaaaaaaggaatgtttacatattagtaacttacaaagaaaaatgtaaccatgatgtttacaataaaaatataaccattaaatactcactcccaatgaaatataataataataagttacaattcagttacaaaatattagaagtattaagaacttgataaaatgtgtcataatactagtgtaaaagttacaaataacttgtagaaaataagtaagagatcgaaaaaaagttacaaacacaataatgtaaataaagggcaatagcaagagaaataagaacaaagtataagaaatgaacaagaataactctccttatttacacaaccttagtgttgagtattgtaaataattaaacttgaacaagtataaaatatttgtccaaaaatctatttacacttattatctaagtaagtacttgttatgtttagttacaagtaaccaatcaccaattgattatagtaacatgtttacagagattatatctaggaccaaccctgagtatttatgggtccgagaaatgcattataagatgaaaaaaaatgggtcctttattgttcaatttattttttatttcttgcttttctgcacgttactgcaccaatcagtaaaagtattttttcccttaaagtatttgaagttatttttttttttgaatgaaaagtataaataagatattaagaggtaaagatcatacattagaaaacatatcatttgaaagattagtaacacaaggaagtccactttagagtgtcattagtagtacctattcacaatttaaaaattagttcaaattaaactctattcgtaattaatg

SEQ ID NO: 84160 - DNA, 677 bp, Cannabis sativa
ttttttttccctgctatttctgctgttggcttagttttcttaatttctctatgtaccatgttatgatatgtctttcacatatataggataaaaagaaaaactgtagacatgttgaatatgaatgatttgaaaaccagtaggaaggttcataagtcagtctaaatttgggataaatgttacgtgtcttaccttaaaccatacgaaattataaatatatgttttgcggtacgaattttgttctttccgcgttgaaccatttgatctaagcgaaacaagtgaagaaatcgaattgaaacaatctaattaatttggaaagattaggaagctgagtagtgagtagctaataaactgacttttcatataggtggggaattgggataacgtttgtttgtatattggagaatgtgtgagtgaaatccttttgtatattctttctctgatatggaaaacgattcaaaaacaacatatagtcccaattgtacaattatttgacattggaccgctatacgtacctgttgactaaagaaattaataaagatgaaacataatttaaataatagagctaactaattaatactattgtttattaggtggaactgggaaggttcataatgttattcatattatataatatattgatttgttttttcatattgaaaatattagtagtaacatat

SEQ ID NO: 84161 - DNA, 670 bp, Cannabis sativa
atatagttacctacattaattgttaatagttgtgtagacgtttcacaaatattattcatgacattagtagctttcttacttctcattgtattattattagccttgtgaaagtaattttggatgattgatgatgattcatctatagaaattgcattattttttgcaatttttttttttgagcatatctttctctttttcttcgacaaattgtttctttcatttcttctgaaagatctttataatttttttttttcattttattttcctggtttacaaatacaaaaactattaaattaattttttattatttaaactgcaaaatgaagatatgaaaagttaaagttataaggtttagttcctacatatttaaatgataatagtatatattatgatagttttctaaatacttgaattagcgtttttttttgaattagccttttttagtaaatatatttttttttcttaataccacaaatcattttcatgtataatgtattaattattacaagttacaactaaactaatggaataactttgatatatttaattaatattaatagttaaaagttacaatcaaatttaacaaaataactttcatctaagtaatattaattgttacaagttacaccaaattaaataaaataaatgagacctacaaacaggacaagtt

SEQ ID NO: 84162 - DNA, 742 bp, Cannabis sativa
ctcttaaactctttaaggaatctggttggtgaactttattatatggtatgatattatattaagttgtattatattttatatagtactgtattttagtattggcttatgtatgtactccacgtacaatatttttatataaatcaaaaatttatgtagcattatatatgcaaaaatatgaaagaaaacacaatataatctattactatataatacagtataatttaataagacataccaaacgaatcttagtgtgacatttggttgaagataatgaaatagaataaaatggaaataaaataaattttattctatttctttatttggtttcattttgaagtataagaatgtcatttcaatagaatgattttttcattattttggtataaaatgactttgtcatttgaaatataaagaaagaccattttaatgcaagatgaaaaaaaaatttaattatcttttattatttttttgcattttaaatttagttctattcaattcctattactattctcattgtattcttatatgtttttttcctttcaatcaaacaacatttaaagagtttaattggtttttaaaactttgcttttaggaagtgggtcctcagcccatatatcctgtccaattctctgtccactgtatatagtaatgccaatgatacacgtatgtgaaaaataattctcaattataatacaactagggaactaagccgcgcgaacgcggtgttgtccaacttttgtaa

SEQ ID NO: 84163 - DNA, 620 bp, Cannabis sativa
taaagagaaaaaactgttgaaattcgggtatttctatgaaaaaaatgtacaaaagtgatatttttcaaaaaaaaataaaattaaagaaagcccatttttggttggcctagtccaactcgaacttggcccttagcccatctgaacctgtcccacccgacccttacccacctgaactcgaaacctgaaaacatgaagcgaaaaatgggcgtgcgaagagtatgcacttctctcatacccgaaacccgaatccaaaaatccgaaaaatgtttggtgtgcagtcctagaaaaatataactagtcttatcataatacatttagatcagattatagttaagtttattttcacaaaaattagcaaaggatactaatttatactattttagaaaatatacttttaaatttgtcatttaataaaatagaaagtccaatcaataacttttattaaatgcaaaattaaaaataattaattataattatagtatcttatataatacatcaattatatacacatatatggaccatggtgaaaagaaaagacatgataagtgatttggtattagagaaatatacataattataggctttgtagttatttaatggttatataaatatatatatat

SEQ ID NO: 84164 - DNA, 670 bp, Cannabis sativa
gtcctctaaagagaaggaggagcttcttcaaatgcaaattactggtgagagaaagtaagatgtaaaaagtgaaaagtgaaaaaggcctttccccctaaaaagcacttatatagtacatgtgggaccctttcttcacttattccacctacacaacaaagagacaattaaatcaattatttttctactacaaatgagatcagatagttaaggtaaagtatttcaaaaagctaaaacacagtaacttctattcaatgaaggctacagcagtaccagcctgaccaatatagctggaaagtccctattcatatagacgttcccataggaacatgaggggtaaatgttatcctgatttttttccacctaacacggcagcgcttacgtggaaaaaattagtaccacgtggtagtatagctcaccaacaaaaaggccaagtcagtacctcaataaatagacaccctagcactcaagcgggcatcaaatgacagaccagtttcctcacagaagctagtcggccacccctggccagccctagctggccgtatggccagccaggctgctccttgcaggtgtctggccgaccaagagagaacttataggaacttctgtgcaattctacacgtggacaacatgattgggctacaaattgggccctaaaagcccattagaatag

SEQ ID NO: 84165 - DNA, 1119 bp, Cannabis sativa
  modified_base (27)..(30): a, c, t, g, unknown or other
aagaggagtctggtctcgagtttctannnnagagaaatctcactataacagctgactatgcctcaaatagagataccaaaaaataatcacttcttacgttttcttgacaaaccagagttgtataagtcggaaggcccaattacattatgtgattgctctttccaccacataagcagaattcatggcaactatgaaagcattcaaggaagctttatggattttgggagttctttgtgaattaaaagaaattaaagggggagtaattgtgtattcagattgtcagtcacccatccatttttgtaagaacccaattcatcatgaaaagagtaaatatatagatataggactctactggagtagagaaaagatagaagaagggcttgttgatttagagaaggtcggaatagaagataatcttgctaatgttaggactaagttcttaatcgtaaacaagttcaagcgttgcttgaacttgatcaatctcaaaagttagtatactaagattactagaacaccaaccatgatggatgcattctttcttcttcatcatcatcatactcttaatttgaagtaactaggtgaaatttgtggtattgttcctccaaatgaaaaggactccaaaggtttcttattattcctgaaaagttgtggactcgcggaagctggtcttagaaggctttcttgtccttccgagaaagatctttaggaaagctagccctcctttagaaatgagttttggattgctagttgttcctcctagaagatagtcctggatggtcaactccaattggctatttcctatctaggaaggtccttcagcgagtgccttgaaccgtgactttgaaagctctcatactcgctctcggatgcactcttacttcttacatggagacctcactcaaaagagagttggttaagttatttattccctaactaacttaacaacctcgattcctacagccatcgcctttaggatcttgatcctaagcctatatataccactctcacttatcatttcaataagacaatcagattaagacggaaaaatagaaagagaaaagattgagaggtagagaaagagatgtactaagggtgttcataaaaatcgaaaaactgaaa

SEQ ID NO: 84166 - DNA, 797 bp, Cannabis sativa
gcaaacaagttcaaaggttaggcacgatacatgtctcgcacatgttgagtgcaaacaagaagcatgagcaagcaaacacaaatcgtccccaaggaccaatctcacacaatctactagtaaacatatcgacaaatggcacgcaatggcccaacaaaggcaacaaataggcatcacaaaggcaacatagaagcatacacaagaagcattattaaatatcgttttattattaaatggccttgatagggcaaggcagtacacagctgggctcctatcatgctggtgacaaggtgcttcataagtcaccaggtcacccccctaaagagcttaatggggtttcaagggatttccaggaacatatatgattatagctctctatacatatctgaaaggaaatacaaaagaaagaaagctaatcaacaaaagtctccccaccccaatgaggtctacatgatcatcaatcttctacataaactgctgtaagtcctccgccttctcgcaactgatctcgtcatcagcgaggcccttccatttaaccatgtactcttttctcttcttcctcttcacacgaacagttctttcggcaaggatttcttctggttctctaatgctgcatcgttgaatgctgatgtcgtccctaatagactggttgcacgctagatcttctggatcttcatgatacgacttgagcttgctaacgtgaagaatcgggtctatcttcatccaagaaggtagttcgactttgtaggatgctaggccaactttggagatgactagaacagggctcttgtatttgcgta

SEQ ID NO: 84167 - DNA, 657 bp, Cannabis sativa
agaactggagtagaaccatagatcacatccatctataggacttgaaccagtatatatctttatgttgattttattactttattatttatagttttaatattctattcatccatgttttaatctctggttattgtgtgtggtttattaatcttgtattactaattgtttgctgattaagttttagttgatttgattctacacattagttataaatttcccacaaattagagctttgtaatcgatcaagaacgcaaaatcaagattctttccgatgcacttcttgaaggaacaattaaagatatcaatggaaagattcgagttggagaagtgttatggaacacgggattttgcactatggagagaaagtttgaaagggatcctagtgcaccaaaagttcttcaaagttcttggagatgagaaattactacctgaaaagaaactagaagaaaaagcacaaatggatgagatggcttactacacgatcatcatgtatctgtccaatagtgtgaggagaaagcttgtcgtagaaaaagatgggtaaagggatttcgaacaagcttgaagaacatgaagccattaatttctagaaagattaatttgctagaaaggttatatgactttagaatgatttcttctctttctttagatgataatatt

SEQ ID NO: 84168 - DNA, 7459 bp, Cannabis sativa
  modified_base (253)..(259): a, c, t, g, unknown or other
  modified_base (5654)..(5660): a, c, t, g, unknown or other
  modified_base (5699)..(5705): a, c, t, g, unknown or other
  modified_base (5734)..(5740): a, c, t, g, unknown or other
tatgtttttttgcaggttatattatattcaattattattttcagaaaagaggagtgagacaaagaatgtgttaacattggaatgttaagattcagaaagaggacctaaacatcggcaccacaccacacccccacccacactgattctatctcagactcagtctttactcccactcgacgcggcgctcctctcctcttcctcactttgatctctctcaactctgctcagttcgtcttctctctctctctctctnnnnnnntctctctctctctcttctttttctgctttatgatgttatagtttcctccacttgttttctatctgatgcgaaattgattctcagctaaaaatgtaagattatttgcacctctcatacatacacttttctgttatagtgatgatgattttatatgcgaatctgtatgcgtaaaatgaaagctttgattaagtagcgaatgaaaaaaaaaaaaaaaaattagagagaataataatatgaagaaaatatcgtgttggtcttagtaacagttcatagacatatagtgataatttcaataagtttgttcttatttttaccaaatgtttcgtttcagactgttgagtattctattgaaacgtttgtttctgtagattctattctgcaaattaagtatttctattatctatattctatagtgagtgaaggttgagttgagttgtttcgcttggatgaactaggctaaatatggagtggtataattgattttgactttggatagatgggttgttgtttttcttagtttctagcaatggttactagttagtacttatggttgagcattttgtgggatactgtactgatcatctagctaaattttaatgacttttttttttagttcgatgcttccattaagagttttgttgatggtcttcgaaaaattatgggccattgctccaggttcatcctagatggcatctcttataattattatactgtatcaactttccatgtctttaatgcttaattctgtatcctcttgtccagtttctagttctaggagctgttggggttgtcccacagttgtatatttattggtgacattttggtctttggtagtgggggtctgggtggggctcttagttttttggctgttagcttcattcttcttcttgtaggtcagaaaaagaaaacccctcttgcagtttgtatgatatggaattgttcatcgtttattccattttggggtctaaactttattaggggagctttctggttggaagtgtggattattttcagggaagccaggaatagaaattatgcagatcccagttccagaacctttggagaattatgtgacatattagctgaaaatctaaagagttatgataggtagttgctaataattacctactatacggtctgaatatttcaggtagggatttttgtgcgttttatatatgcttttttgtgcgggtgaaagccaaactaaaaagcatgcagaaggataacactagcaccccattaacaccaactggtcgggttcggcatcgaaggcgttcaaatgaggttagtcacttcataagtcaggttttgatcattgtcaatcacatttaaaattaatgatcttgtatttattgggttttggacttgtcataacttatataagagatgggatgatgggtacaattgaaatttgatcattttttttatttagctgatattcaacatcagaatttttatttttattgttttgaaatatcctgtcggcctctcaggttgttccagatgttagtgtggcaaatggaggcaatttacttgttaatgacagtaacaagtacaggtctatgtggatacgggcatgctcttctgtttggatgattgggggatttgcattcattatatatatgggtcatctcagtattactgccatgataattgttatccaaatctttatggcaaaagagctgttcaatctactaaggcgagaccatgaagagaggcatctcccgggctttaggctgttaaattggtcagattattaatttcttgtcgtggtaatagttaaagtgtgattttacaattgaagcagtaaacattcatgataataactaatgacttgtattttgttttctttcattgttgacttgtatgtgcaggcttttcttcttcactgccatgttatttgtatatggtcgcattctcagtcaacggcttttcaatactgtaacttcagacgactttctctatcagtttgttaacagccttatcaagtatcatatggcgatctgctacaccttatataccgcaggtttgttgtatggtggccatttagattttggtatcagacatttcatcttaaagcatgttttggtaaatttggtttcaatatctgttagcattgcatttccttgcttctttgtagttagctataatttagaatatagattcttttcttacttcccattgcaatttagtaaatttttttgggtaatttttaactgggttatcacttgtatttatacatttatttttattttgtggttcggcttaggttttgtgtggttcatcattacattgaagaagaagagaatgtacaaatatcaatttggccagtatgcatggacgcacatgattatgattattgtgtttacgcaatcctctttcacagtagccaacattttcgaaggaattatctggtaaaaaaacttcctatggaaatcaatctgcttaggttcttactaaatctacctttaattccacctctcagatcttttacaactttctttcttgttttcttttttcgctacaaacttggagcaagaaattacatgaaagttggctgatttcatcattttatatcctctataaatgagttaactgtgacgggacttattcctatataataactttagaaggctataaaagagttaaattctttcctcagacctgcctgatattgtatgtggcgtccactaattacatgctgaatattttatgaatatactaagcttactttagtattttttgttattccctgaatttggttctgtttgtcttcattctggactaattttttctttccaaactctttcttaatactcttttcaaatatggatgcaggtttcttcttccagcaacacttatagttatcaatgatattgctgcatatttctttgggttcttttttggaagaaccccattaatcaaattatctccaaaaaaaacttgggaaggattcattgatgcttctgttacaactgtcatatctgcatttttggtaagcatgattttcctatgctacgcacgttttgcattcttgtgcatattcctgaaatttagaaactggagtattactaagtcttatgcagtttcccctcatttagttataaagtggtgtatgtggttcagtcctggtcaccatctcatgttttaaggattaattatgtgtagatccacagtatagtttggctggtaatgggctcaataagtatctgcatgccctaatttctactgttaccacacaaccttattatattatgttttgcccatttaggaaatgttgactgatggagacatcttgcgcatcagtttctattatctagttctcttttctttctctcttataaggtctcaagttctttgacctaaatgattatataggttgtgagtatttttcttgacacttgatcacttctttttttttttgtttgtgtgatgaaatgatgccctgaacctagttcacctaatgttatattcaattgttcttcatgtgtacttgaattcatattcccttttgatcaacatgaaaatatatgatggtaatgtcaatgtttggcttggtttgcaatttagttacccagtgtatttatacttgcttgtgcagttagcggacatcatgagtcgttatcagtggttgacatgcccgaggaaggtaacttttattaacaaagttttgttcattgatggtcggaaggagatactattttgaataactgaaacttctgctcatgaaatttgaggacttgcaggatttatcaagtggttggcttcaatgtgatcctggtcccttgtttaaaccttactctgttatcttacctggatgggttcctcaatgggtgagcagattgacatactcttgaacctgttttcggcatctatttaatctctactcatgcttaattttgttctctgtttcatatcaaatatgtttctctttgtacaatttgagaggaaggatttcttttgccgattagacaagaatgttttctaattccctggtctcgtatgcatgttttataattaggctcttgaaattctggcagtgtcctctgttatccagtaacagtaattaggcacatcctatcttatgattttgttatcttctaatataacctgatttatcttatatcactatggaaaggaaatttatcttttctccctctatgactgttagccagtccatcttctgttgctttctgatgagcatacattaccagtttttcacctctagatgatacagctgccttgtcatgtgtgaagtaggctaggtcctgacctgaaatgctgtatggttgggcttggcctatgacatgtaagtggccagggatgcctgagattccggccctcgttgatgaagagtcaaggctagcctcatttatttctgaatggaaactctaatttctttctactatttataagattatttaaaacagttaatatattttttttttctcaagaaagatgctagacaagcaaatttgttccagatacttgaaccaaattatgtgccacaatttgtagtcaactttaaaaattaaaaatgtcccattttaaaaatgttttaaaaattattgttatgtatatggtgtaaatgtttttgtgctaactatgattgatgttgacagtgtttcattgttaaaattgtggctgaggctgtctttcctaatacttaataaaacatattttttgaaaaataaaatacattaacctttttcttgagaaagatgttttaataaagaggggtgtcaaggctcatgctggcccctaggcttcaacgtttacaagtctgactagggcatatgtatttatattcttcaacataaacctacaaccctacttagtcttttcttgtcctttcgaaagcttgttttaggcaaattcattcttgtgtgttaaattgttcatgcatcactatttaaatgttttttttttggtgttcacttatacagtttccttggaaagaattctcagtgtttcctgttcaaattcatgccttggcctttggtttatttgcatcaataatagcaccttttggaggcttctttgctagcgggtttaagagagctttcaaaatcaaggtttgctcttgcaaccattctaatttttagtactgtagtttttaaacagtatgcttttagaatatgtcaacaactttccccttttttgtttttcctcatattcccgttttctttgttacaggattttggtgatagtattcccgggcatggtggaattacagacaggatggattgtcaggtaagcttggatgaaatttgagcataaccatgcagctttcctataatctgttaccattttatcaccctcaaacactacacttgccatatatactaattgtgaaggaacataagatgagaatgggaatgagagtaagaatttnnnnnnngaatgggaatgagagtaagaatttatatatatatataannnnnnngtaagaatttatatatatatataaatatnnnnnnntatatatatatatatataaccttttcattcatatgcttacctgcactgcacatgacatacaagctttggtgagtgatattacaaagaaggatgactcaatttctgactcattctcattacacttcaaactccttcctcatacgatacttttcactagcgataactagacattcccttagtaatgtacttgcaatttaaaaattggtacaaaatggtaccctgtgttctcaataataatcattggttactctgttcttttgaaattggtataaaatgtacctcggaaatatacctatttggtagctataatttattgagtaaatttgagtccggtactattttataccaattttcaaattacaaggtactcaatgatcattatctaccatcctctgcactgggtctctttcattattctgtgcgaatcctccacttaagcgtataaattagctaatgtattgaatccaattatgcatacttctccttaattgagctgctctcatgcagatggtgatggccgtattctcatacatctatcatcagtcatttatcgtgcctcagggtatctcagttgagatgatcttggaccaggtatggttcatacatgttcacaacgatatgatcatcttcaaattttatgaacacatgctgattaatattctttttcttcgttttagatactgatgaatctcacttttaaggagcaacaagctctgtacgcaagacttaaagatatgttgcatgagagactgattgggcagtcttaagttcaaaatctatggcagtcacttgctagaatggtctctatgattgtgtggcaaggacagattttttatgaaaaattcatgtaatttgcgttctgtagctgtcttctgttttcgaagtgcaatcctccacactactcaaagatggcggtttttatgacctgcatccacaccacaccttgtatagtctttctctcaggcaattgaattggcagttttcaccgcaaagagagaaattaagtgcttctacctttgttttagttggttatttgtttttggttctgtcctaattttttcgggagggaatcttaatattgttggatttaacatacttttcctaatcttttgttgtcttcatatgtatgaatacgatccaattatggcaagcaattgattaggactgagggatttggttgagggggaattcaaatcatgaaactagtgtttttctcgttgtatttgaatgtaataaaaattaaattgtttataagatcgttttagttttgtggtcagggaaaaaaaaaaacttgtgttttgggggttctttttgcctcatatgagattaatttttaggaaacgtacattcattcatataatagaaatagtcctccatatcaaaatgttatgaagtgagtaaaataatacaatatgtaaccaaaacaatgagccaacaaatggaagaacgagctaacgaactaatccaaactcataccactccaatcccaccaacaactgcagaaatagagatgttggttgtatgtgtgtttaatatgagtatagttctaaattaggggttttcgtagtgcaggtagtgcggtttttgattattttttcaaatcaatttgcacatgtggcttttttaatttctcaaaccgcactcgcactgcaaaactaaaaaactacactgcaaaaaatagtgtgctgcggtttctgcggtttggactatcactaaata

SEQ ID NO: 84169 - DNA, 2114 bp, Cannabis sativa
ttagaatgtcatcaacatagagcaacagataaatttgatcattgtggtagatacatggatcatatttacttttagcatatctaatttgcttcatgtattcatcaaatcttaaattccattaccttgggacttgttttaaaccataaagagatttctttagtaaacaaacctgattaggatctttgctttcaaaatcttctagtagttgcatgtaaatctcttcatctaggtttccatgtaggaaggcagtcctcacatatatttgttctatatgaagctcttcctttgttgccttagccatcatgactctgatggaaatttgtttaacaactggggaaaagatctcattgaaatccacttcttcttgctgagtgaatcatttagctactagtcttgctttaaacttaattgattcagcactaggtatgccttttttctttgaaaatccatttgcatcctactaatttctttccttctggtttttcttgacctcaatccccagtcttattcttcttaagagatgccatttcctcatctattgcccttaaccattttagtttatttctgtcaataacaacttcataataactggttggttatgaggattctaattcttctgcaatgatcaatgcatatgctataaaatttgcataaccaaatttccttggaggtttgatttcccttcttattatgtctcctctagcaagctgatatgtgctcctcaggtcgtcagtttgatcttcatgactttcagtttctgatctggtttcatgactttgttttgcaatttgaggatttggttgctaatccacctcaatttgcatgccccgaacagaaattgcttgttgaatatcataaagagccttggttttcatttccatctcatccttagtgaagattacatctctgcttattatacgtttcttgaaatccaagttctaaacaccatagtttataacctttaacaccatctggatagcctagaaacatgcattttaatactcttggttgcaacttatcctattttatgtgtgcataggcaataaattaaccaaagactttgagatgatctatcttagggacatgccctgtcaacatttcttgtggtgttttgaacttgtatgtaatagatggacatctgttaattaggtagcaaatacttttgagtgcctcacccccaacattttctttctaaaccaattacaagtataataggcatcttactctttcaagtaaagtcatattcatcctctcagctaagctatattgttgtggtgttttgatcactgttctgtgtcttttaattccctccttggcatagaaatctttgaacagatttgagcaatattccaagccattatctgttccctttaatttctttccagttttattttccagcaaagttctccaattaacaaaagttttaaatgatttgtctttagttttgagtaggtacacccataccttcctactataatcatctatgatgtttatgaagtacctagctccaccaattgtctccaccttagaaaggccccacaaatttgagtgcacataagccagtttctcagttgtatgatgttccctttttctaaatttaattctacaactcttcccaaggacacactctttacaaaattcaagtttactctttaagcctcccttgaatatagccttcctattgagttcttccagtcctttttgactgacatgccctaacctcaagtgtcatatctttgtactgatctcagaattttgactcactgtaggtgaagcttttccaatcacagtcttaccatctaggtagtagagtccattgttcaacaaccccttgatcacaacttttgaacctttgaaaattctgagcatttcatcttcaatcttaattgtatatctattcttgtcaaacacttcaatggaaaacagatttctcttcaattctggcacatacctcacatgttgcacaactcttgaaacaccatcatgcttcaacatttcaactgagcctattcccttaacttcacacgctctgttattccctaataacacagtaccaccatgatcatatgagaaagaactacatagttctttattggggtgtcatatggaaagaa

SEQ ID NO: 84170 - DNA, 1600 bp, Cannabis sativa
attcgtacttgtgcaaggccattggcaaatcaatggcatagacagatgatgaggatagagactatcccttgccccaccctatcgtggtaacaaagactttgactttctctgccattgtaatttagggtttttggttagagaacagaaaaaaaccattttcctctacaaatattccattttgtggacccagccatatcagatgagaagctataccattcgacttttgatctaatatagttacagttattatagttattacaacataatagctacataatctcaatgcgttacatacatagaagatattatataattgttcgatttttcacaatttttttcatttctcgttacaaacaagagtggtgacatgttttcacctctctttatattaggaataagatgttagttaattgttagttataattctgttaagacaagttgtaggttgttacaacttgtccactaggcttcttgatatttagtcttcttattcaagactaaccctaactataaatagcttgttgtatcattcatttcttactttttgcaataatacaaacacagaacagaggattcactctgctctcttcttctaccttctttgagttcttcacttctcatattgcttaatatcattaaccagtagcttatgctaatgatattcatcaatcccactttctgttttctcaatttgaaagcagtagttgttttgcatgccaagtgttcgataaaatgtcgatgaactcatgtattgtgctgcttcttcaaccttattatcttagttattttatatgtttggtttttttgaatgggagggatgacatggaaaaaagtgtgttttataaaaatagtctttatggaaatagcattgctattagggtacctttaaggtgccaccatactgatatggtgcattgtgatttattaaatcaaaatgtctgggattcaatattaaattgtactaaaaacgatataccacctcttgtaatgcttggcaccttaaggtgccccttatcatttctctaatggaaatttttattagcataataacttcctaacaaattttattagcaaaatgaccagtcgcacaaacaactaaaatttgcactatgcgaccataaaatgactattatggtccttttgtgaccataatagtcgcacagtgtaagtttgatgtagttattttgataatttaacattttcatgttgttaattggtaaaactccccattaaaaatgattaacttgttagtggttcgggtttcgtagataatggcgtcctcttgtgctatggtgacttgcacaccatatgagcttccttcatgtactactgttggctcatctaggcagaataccaatttgttgaaagtttacagtcccaggagaggaatatgtggtttgtttttataccaaaagcactcaaatatgagaacttttgctgtggagtcaaaccaagtatcctcgttgaaacctcaacaggtagcttgggaagaacctgatgatggcagtgatagtgaagatgaagatggtgaagaagtggaagaaaatgacttggattttgaaagtgattgggaagaggagaagaatgatgctatggatac

SEQ ID NO: 84171 - DNA, 1570 bp, Cannabis sativa
gagggttagttagatacaattatcttatataataataataataatcaaatgcaaatttatgagttattcgtgtaataatagtcctatatataagttatctgcttaactattttggtaataaagtttaattagttagaatagttatatttttttctttcttttcctttttatttttttttttttttgctcttgtgtttgtttctctattttttttttcatgactttgaataaataaaaaagaaaaaattaccccatttatattattcttgtaataacaacaaataaagtgaagaattaaagggaaaaaaaatactagtcaaatcatgaaatatctttatgttatattgaaaaactttcttatgaagttgaaataaataattttttataacatgtgaaacattttataattaattgattttgaaatgtgagaaaataattcattagttaattaaaagtggtaattatttagaatttttaatggattcttttgaactattttcatgatcaatattcgtattttcttttttcttcctctattatgcttatgtcatatgtagggtcgaccatgaaatatagtgggctataaaaaaaattattttgggcccttatttagaaaaaaaaaatatggtatttttcaaaattagtaaaaaattgtataatttttaaaggaaatttttttttggcccctgggctaggtgggccctaggtacaggcctagcccacctatacccagggtcgggcctggtcatatgagtatgtaatagaaatgaaatctctttattttactgctattattcacatggtagaaatgccaaaagtgagtttagagtttacaaatgaggtatatatatagggaaaaaaagaggaagcccataatagcccgaaacagaccttctagtgtcactgcaggaagcccaatcagcatctgaaaaaattttgagatgaaagtctatgtttgacatatcagtttcagcataagcagataagttagttgaagatgccgagtaaaaaattagcccttggccacaggtgcccttaagatattatagtattctatgagcagcaacgaggtggggagcttttggattggataaaaattaacttagtttatttacggcgaaagatatatcaggccatgtaatatttaagtaaatgagtttaccaatgaggctgcgtttgatttttggattttttaatggttttccgacatcaattgagactcgaattttttggttccattggagtgggagcagtggaagctcctaaataacatgtgtcaatcaaaagttgcaaggtgaatggtcgtggagagacagatatcccagaggaagaacgaccaatctttaatcttaagaaaaaacgtaagggacccatgtccttaagctgaaacactgagttaagttgttgtttgaaagaagtaacaacgtcatcattattgaaggtaatcacaatgtcatcaacatatattaagagggcgagaaaaatgcctttatcatttttgatgaacaaggtgtggtccgagagaaattgggtgaaaccagttgacagaagataattgctaaattttgtg

SEQ ID NO: 84172 - DNA, 503 bp, Cannabis sativa
taacctaattttttagtagtgattattatattttaacacactaaaaaaactaatattccattaatggtgttctaaaaagtgtactaaatctgtcacatgttaaaagttataccatatttgtcataagatatagcattatgttaaatttggctcacaacaaatgctacgttttttgtttactataatcccgctaactattataattcattggcttttactaaactaaatattttttatttaccatactactattatttaaacaataaataaataaaaaattaattttgtatattttctataaaatattaaataactatcaatatataatcaattataatttttttgacttattttacatcttgtacattagagcacgattataaatagtatgccaaatataaaacaaactcatttttatgctaaatttaacataaattttaaatcgtattggagatggtgctaagagcactgacaacattctctttataatagagattctttaa

SEQ ID NO: 84173 - DNA, 987 bp, Cannabis sativa
ctgcgtaccaaacgggccctaaattcaataagtcgaattgtataataaaataatattaaagggtaattttacagtatgtaaataactaatatttgttttggcatttaattttcttttaataatctaattttttatcataattgtgtacattgtattattatttaagatcaagtactcataaattttcaaaaaactcttaacaataatttacaatatctaaaataaaattaaaatatttgtattatgtatacatagtgataaccaacaatataatataatagtgaaacggataataaagagtgtaccaaataactctttctgatatactataaatctttcttataataatattatatttattctacaataatatgcaaaatttgtttctaattacttgtacatattctctaaacaaacacttttttctttaacatacatgcatagaagaagaatagttaagacttttttttttttaaaaaaaaaaatatgtataaataatctttatttgaaaatgttgtatatttaagctaatgattaatgctatgtttgttttgttcaaaaatcaatgcatatggtatgtttgatttgttttaagctgtagaaaaaacactttcatttcagtccaaaaatatacttttttataagtttgtttttgtcaaaataataatgaaaatatattgttttgatcccttaataatttaaggaactacgtttatcattatgttcttaaagaacaaaaactaacttttaatttaatttgattccaaaaaaataatacacttttttgttcatactaaaaattatttttggaatgatttggaagtgctgaatgatttgtttaacatccgtgatcgagattaagttccctatttcttcagcaccttctgacttttggtattggtttcttaattcttctggtgtgtataaagtgaaagatgcctataactttttacacaaagaagatggtttgcatttgtcagctgatga

SEQ ID NO: 84174 - DNA, 1150 bp, Cannabis sativa
ttgttggtggaaccctttggccaccaacctagcttcaagcttgttcacactaccatcagcattttctttgattttttaaacccacttgcaacctattgctgtccttccacaagggagaagaacaagagtgtaagtcttgttccttattaaagcaagtatttcatctgtcatagcataattccattgaggatcaagcaaagcttctttgatattgacaggaagtctaaataaaagaaaagctttgggtttgtgtatgcctgctttggatcgagtcctcattggatgagtgcttgaagaggttgctgtagtgggaagactattggcaggcacactggttgctggtgcaacaggtgtgttattggttgaatcagagtcagctggtgtgggctgtgcaggacctggtgcaacagcagcagtgttttcaggtgtgtgcacctgagacaaatccatatctgctgagttatttccagtttcatctgcattttctataggaactcgatctgtacctgtacctgccacagaaacaaatctaccagaactgtcagtagcacctgcattgcaagaaacagtaggtatagcagtgtctattacaacattttgatcaatctcaggggtagaattattgtgtttaatgacagtgggaatagtagcacttgctgaaacaggaggagtaggaattgatggtgaagaagtaactttagagtgaggaaaggagtgttcatcaaatagaacatcctgagatatgtacactcgacctgtggagtctagacatttgtaacacttgtggtttaagctatagcctaagaaagtgcaaggggaagacctaaattggagtttgtgcttgttgtatggcctaatgttgggataacaagtgcacccaaaggtcctcaaagttgtgtaatctggtttcgtattgaacagaacctctatgggggatttatcataaagaacaggtgagggaagtctgttgtaaaggtagacagtagtcctgaatgcttcatcccaaaattttaagggcatggaagcttgagcaagcaatgcaagaccatgctcaacaatgtgtctatgttttctctcaatgaggccattttgttgatgtgtagttgggcaagggtgcctatggatgaccccaacttgttgaagaggggct

SEQ ID NO: 84175 - DNA, 579 bp, Cannabis sativa
gtcttttcatattcttcatgtaaccagtgtacctatttttcttttactattttattgttctcttaattgatataatttcaggtataatatgtgcattctcattttaggtttttttttatctctcttattttttctttgcattccttttctatatacacctcctccatcttctttttcctcttatttttcttcttcttcttagtgaatcgtagctggctttttttcttcttcttgcccagcgtcgacattgttctgagaggttatcggctgcaactcattctattttggattgtgttctgattttgaggtgctcgtgttattattactttttttttattattttttttttaatagctaaggtgaatagttggttttgcggtatttttagtcggtcgagggttagttgattgatgattttatttgaaccttttttctttgacattggtattcgtgaaaagagttcttttgttgtatataaatatatatatgtatatgtatattattgcatttaggttttttttacaaaaaaaaaaattagtgttataagagagagagagagagagagagagagagagagag

SEQ ID NO: 84176 - DNA, 685 bp, Cannabis sativa
tttatctttggtttatggcttccctaaaactgaaaataaaaagcacacatggactcttcttaagcgattacatgatgtgtctccacttgatccttggatgattttaggggatcttaatgaaattttctcccacatgcacaaaaatgggggtcccttgagacacgataatcatatggctacttttcgaacaactttagaccaatgttggttgaatgaattgccttacttaggtgatgatttcacttggactagaagtaaaaagaatcctactgctctaaaggagagattggattggtgtttggttaacaatgtttggaaggattctcattctttgcctactgtaacacatcttgactactatggttctgaccatagggaaatcagtgtggttttaaatttttctgatcagttggaaaatgatagaagacgttcaagatttcggtttgaaagactttggctaaatgatgcagaatgttcggacattatatcagcaaactgggctacaaattctgctctaaatggtgatatttttcaacaattggctgacagtattaatgcttgttcaactaacttacaaaggtggcataatggcaagtttggtcatatgaaacaagacattaaggaggcacaatcacgagttcagcagctcaataactgtgttgcaccagattccactttctcacaa

SEQ ID NO: 84177 - DNA, 1225 bp, Cannabis sativa
accgtgtagtggtatttaggtaataaagttatcattttatatttttgatgtacaaatttcataattaaatataataaattaactaataaaacttatatcaattttttaaaattatataataataaaattaagttatgcaaatttattaataagctaattaggatttttaccttctgaactttgacatgtactaaattatgccctttgaatttttaaggtcgttaaaaatgctccctaaactattgggattgttgaatttaaggacttttatctaattttagtaaaagagtcaaacatagatgaaagttcagggagcataatttagtacatgtcaaagtttgaggggcataatttgatagatatcaaagtctagggaacatagtttaatacataaataatcactgaaatagcaaaattgaataaaattagataaaagtccttaaatctaacattctcaatagttcaggaaaaatttttaacgaccaaaaaagttcagggattatgatttggtacatgttaaagtttagggggcaaaaatctcaattaatcttataaatattacatattattataatgtaactacaacaaatgaatatattatatcgttaaatatatacaactgtaattaatatattgttgttttaaaaattaatatagtgtaataataataaaagtttatatcatgttaaaaaattgtgaacatctcgagggtattttagtctctctccctctcttgtctagtcaccttctatttgtcatcacacagggacatttagggaatctttttcgttagcataaggattcattatattcatttttacttttacaaatttgtcacgtgttggcctttgtattggttgtatggaatattgtaatgattgacctccgtttataaataaaggagaatggctctcagtatagtgggctgagatttcaaaataaccaatttgtgtaatatcaaacttggtatctgagcactgtaggctaacgccatggaagatccaaatactactccagctcaacaacgtgacaacagtgtaagaacaactatctctgaagcatctcgccagaatccagccgcaccaagtacttctattgctgctatagctcagacgatagtgacaacttccatttatgcacccttcaacagtattctgagtcagccgttttctttgagactaaacaggaacaactttcctcaatgaaagacgatagtcttcatata

SEQ ID NO: 84178 - DNA, 1360 bp, Cannabis sativa
cagagttggaccctccccttgtcccgatctcggacccgacctcagacctggtctcggtcttgattttaataagattaaaaaataaaaataaaatttaaaattacataacagacttttattttttttttttaaaattgaaaaacaaaaatagttatagaatatatttttaattttaaaataaaaattttacttttatttttaattttgtaattaaaaaatttaaaaataaaagtgttagtaaatgctactattatatatatatatatagtaattgacgggtacacccctccttctggtcgccattttagcctctgtttccgcttacttttggaaaagacataaaggtcaaggaacttatgtagggtcgcggatcctcaggacttcaaactccaaataagtatcatatagtggcgtcaaggaaacacataattttggtccttatatctgagcaccatcaacaacacgtatactatacctattacttacatagttacatataattatttacttctgtcgacaaaatcattacttaattgaccttttctttttcgttattatataaaggccaattatctaatacctcaacaatcacatcccttaaataaaacaaaatagtgtagttagaagttgagtttatttaagaataaatagtatttttgttctctcaactttttaccttactaaattttaccccctaatatatactacttattacgaatagttctcaaattataacgaatacaaaaacatagtctttccgttcacttctgtttaattttgtcgttgaatgacttacatgacagtattattttaaataaaaaatgatgtgacaagacatgtggatattaattctgggtgatgtggatattttaatgtagcctaaatatatatatatatatttatatatttttttttttacattaatgaattaaaacaacaaattaaataaattcattataagaagagaactataaacactcagaaccctagctgcccttttctctttcctctctattcttcatgcacagttggtgttcttcacgcctaggtgatttttttttttttaaatctgggtaaataaaatttgggcttcacgcacaattgggatcttctcgatcttcacgcctgtgttcttccctcttcaattttttaatgtcttctgcatcttattcttataacagtagagataaatctatgaatatgtatgaatggagacaaccggagtgtaaatgtggtttagaatgtgttgaacggacagttgcaaagacatggtaatatacctgcttactttggtgggaagattgattatgttcattattgtcatattgataccatgtttatgtttaggctacatgggata

SEQ ID NO: 84179 - DNA, 1178 bp, Cannabis sativa
ttaaaaaatttatgaagtcaaaaattattacatagcaactttttaattactcttaataactatataaaaagtggagtaaattaaacaataaggttagatagtttattaataaaatttgtatgctttatatatatatagggaccggattttgtcccgttactgtacggacacggattgcaatccgtgatgtactgtaaccgtcggatgggcagttactttgatccaaaggttggggttcatgtaggggttgatgtaggggtatgtagggttaaataaatggataccggctacttttttgaaatttaaatttattaaaaaatggaaaagtgaacagttacatccatcaatcaagtcctatcaacctatcaaccgtcgtccctctccactcactataccatttcattgttatttttattttgttgtttattttgcaaagttctttcatttccattttcgtctctgctagggcaaaagcaaagttctttcatttccattttctttttcattttccattttgtttttccattttccattttcatttgagttggtgaaacccatactgtacattttgttcactgtggtgtacattactcgaagtctgccattgttggagttgttacagggagtgtcaacggtgggttttacactttgtccgttctactttacatacttttcacagaaaaaaaaatacatttttcaagcgaacgtggtgtttttgcattttcgtgtacttaatatcttccattttgtctcaggtgtggagggtgaggtgttgcaaggattgtgcatttctgtgtggaggtattactttctctatctctctctatctctttctctctggttttgtgttgaatggagtttgtatttctttctctctgtctccccccgtgcatgtgcttggttgtatgtgtggaatgtactctaaattgttttgagtttttcgttttagttttttatgaatatatgattcggtatttctatttaaagtggaatgcactgtaatttaggggttttgatttaggtattttgatttcggtatttgtgaaatgtgttagttgacttgtttggattttgaatatttggggattggataaatggagattttttgagcaatatgacaaaactcatttcaatttaaaaatctgaacccaataaaacaaaaatagttgtattgttat

SEQ ID NO: 84180 - DNA, 612 bp, Cannabis sativa
  modified_base (62)..(69): a, c, t, g, unknown or other
ctcacactagccgagccaccacattactttactttggagtattttattattattattattannnnnnnnattattattattattttgttaaaaaagtattaaattttcataaatatatttataaaattttaaattataaaaatacattttggtcagcaaaaattaacaaaaaaaacaataaataaactataaataaactataaaacaactaaaaacaatcccatgagaacaataaattaactataaataaactataaaacaactaaaaataatttcatgagaacactaaacaaactataaaataacaaaaaaataataatttattatttttactgaaaaagtatttttataaataaaaaaaaaacacaaaataaaatgaaaaaaaaaaatcgtgttgaagtatttttgtgattttcttaaaaaaaatttgtcaattatgtaatttttttaaaaaatataatatttatggatttaaaaatagaaaggctaattaggattttttttcccttaaactttgacatgtaccaaatcatcatgtcccttgaacttttgtagccgttaaaaattttccccgaactattgaggtaattggatataaggacttttgtccaa

SEQ ID NO: 84181 - DNA, 730 bp, Cannabis sativa
tcataaacttactattttatctttctatgtcaatatcaatggttgttcttaggtctatggatcttaatcctgatatagttaggtttagcttagttgtattatttctattcttcaagttgttcgtagaagctaaccaattgttctggcgaatatttacatcttgagaatagtagttcaattgagtgagagcactaatcatagatatggaatctattctataagataggggcaagacactttgaagacagaaaaaatactatataactataaaattcctataatgcttcttcttcaaggggaacaagaggaagaaagagttccagtccattgtacataaatctgtattaatattcaccgaccaaagggcctaataaaatagactcgtagactaagaatagttaataccggaaccaagtaaaaatctcgcatctattatttaatttgttatttctttcctaagcactaaatatttgatttccgaaaatctcagtaaacaccacgtctacacaataagaacaagaaagtaaggagacatagtatttttataaaggttcaccctcttagttagcgggtaatgacctactccccttttaattgtattaataccagagataatactactcatatcacaaaggttgtggattctgatgtggctctcttaagattacaatatgagaatcagtaggaaaaatctaaagtgagaaagatgagagagacttagtctcttcta

SEQ ID NO: 84182 - DNA, 850 bp, Cannabis sativa
aaaaaaaaccagttacatataccaaaaattatatataaattttacacgcttgtattctaaatactgtatggaatattgaacaaattaataaaatactgaaataaaaataattacaaacttcttaaaagctccaagacttaacctttaacgcactacactacctaaaatagtcattatcaactaaaataaaatattagccacaaaaaaaagtaaaaactagaattataatatttgccgaagttgttatcgttgtcagaaaattattaaaaaaggcatcagaattatcttcattactggaaaatcaccggagtcagacactgttgttaaacgttagaatttgacacactgaatccaattacaataatcaactagttaaaactatgactgagaaaccaattatttaaatcaaccgaattaaaaattagaatgttagagccagttatgtaaaataaaaaaaaaataactacatagaaaaactagttaccaatataaattgcagaaactagttacattagataaattgaaacatacaaactagttttttttttaaaaaaaaaaatggaggaaccagttacattagatagctaattaaacaaaactaacaattaatatagaaaaaaatataaaaagcctaaaataataaaataatatattgaaacacgaaatagctagttaattaaaaaaaaattaaagcacaccacaagagaattacgtaaagcaagcaaattacgtaaatctgacacagtaaaactaatttcccaaaataacataagaaagaatgaaacttaaacctcaattacataaaatgacaattaaagacaaaaaccagttatctaatataaatagctaa

SEQ ID NO: 84183 - DNA, 765 bp, Cannabis sativa
tgtggcttacgacacgcatcaataggggatagatattggtaacccgagccaaactacaaacattcctgctgtatttgcgcccatcagagaactaatcgtaaatcgacagtggactaagtttgtggatgtcactgagcgcagcaaccaaaccttagatttataattcctagctaactggccagaaagagaggatgacaaggtcaatgttagggggttagagtgcatgtttccacaaccgccattcatgttgtttatgacctaccaacctttactgtagaagagcaaccattgagatagcaacttcgagacaggagcttgaattatgaggacgtagctgaaaccctacgttaatcaggccttaggttccatgaatttgatggagaaccgtatcagctgtatcggtgtgaactcaacccggtagccaaggcatggttatactttgttagtgcaaggttggtaccaaacaaacattattctgatgctcagattgacagggttaagtttgtttatggaattatgaaggggtacaacttgaatgtgggtgacatagttggggtgacatttgatatgatggttgagggctcttgtggagatggacttgggcttgctgatattattaaaaccttgtgtgaggcacatggagtaccacagtactcttatgatacaaaagcagcgccacgacacagtattaccttgtccacggtgcttcgattcaaaccatcgcaccctcatggtcaaccaccagctcagagagatcctcctaca

SEQ ID NO: 84184 - DNA, 1002 bp, Cannabis sativa
gcttaagcaagagaaataataatatatagggatttttttaataatatacttaaaatataaattatttacaaaaataccttaataaatctcaattacaataataccttgccacgtcattaaaaaataccttaattctaaaataatatgcctaaaatgaaattaatcctaaactttaattttttattatttttttagattttcaaaagtaaaattttgattacttatgatattgataataaactattagttacttttacataataaaaaaaacaaaaaaaaaaaactttattattaaattatataatttgagatacaatttggttacctctaaaatcttatttataaatatcttaataatcaattagctatttttaagttatattatgctatctcattatttaaaatacatttaggtaatcttaatatttattttcgaaactaatggattgtcatataataatataataagctactatttttatttaccaattattttatatacatttttgttactttgaaacttattatgtgttatttttagattatactaaattaatttgttattttaaatacttttacattactttttaattttgcttttgcaaaaatatttttgttacttagtctatttaataaattaataagttacaataaagtttttttaaaaaaaaactcacataacttattggtaaaacttgtaaacatttaaattgctaattagttattttaaagttatattttcagttacctttaaagtttacagtcaaaattaattagttttcatatagtataacaaataagcatatagatatgaaatagttttatttagtatactttatagtaatatttaaattaattatgatttcgatgatatacaaattggttacttttcataaaatgatccactttaaataaaagtatattccatagataatcttcaatttttagattaattattttaaaactatatttttattattagtttatattatgttgattaag

SEQ ID NO: 84185 - DNA, 1906 bp, Cannabis sativa
  modified_base (561)..(562): a, c, t, g, unknown or other
cttttttttcacatttttttttatacattttctttatatctttagaatatgagagttatttttaaaaagtccaacatggtttagaaaccattgtggtgatatagatctaggttatgtataggtcactattttttcactttaatttatctcaaagttagtatcatttatttatttatttatttttatataggtgattgaagaacttaatcatgcacaattagttgtaatttttataaataaatgcgtaacacatacttagtattttttaatctttgtcaagtatttcatataaaaagttttttcttaagagttttttatcgtaattttttaaaatatatttaaaattatttaaagtaattaaaaataatttcttagtcacccttataatttttttaaaatgaaagaaacatacacttttacatttttcaaaatttgtcaaatattaaaaattaaaaaaaatcctttaagttctttaacaaatgaaaaaaaaataaaaatagatttttttttttattttaaaatattaattttagttgaatgtatattattattattattatnnttattattattatacatataaaataataaaaaattatttcaatttttatttagaaataaaaagaaaataacaaacacatgatttataatattgtgcttatttagtaaatatattaacaattaacaactacttaatatatgaatttctgaaataatcaaataatcataaattaaattttatttttcaatgattataatgagcgtgcgagcgctcaaccaaatttatacagtacttatcattttaattaccacaaaatattaagacaaatacacatttcattatagaaataattagtcatatttcacataatttattaaaattaatcttcttattatacatttcatagataaaaattctatcactaatatttttatgaaatcctcatttttcagttcttaaaaccaagtaatgttatgaagaattactttacagttgacatcctacatttacttttgtggagaaaacgttccacctataccacaaaataaaatgtaaaaactttcataaattgtatgttacattgtttctttctattaaaaaaaaaggtctaaacaatattttaaaaacaacaacatcatcagtcacaagctcagttaaattcaaaagctattatcttttttctttattttattataaaaacacatgcaatttctttgttaattctaccatttaatatttgtcacaaaattgttatctttctatgtattttaaaattatgtttttagttttaatattattactttgtttataatacacacatcaaaatgtaatattttagattatatcactcaataaatataatatatatatgtataatttacaaaaatttggaaacaccgcgcgaaacgcggcttagtaattataaaacaaaattaatatgaagtaaatgacaagattaaaaaattatttgtttttataatacgtcagaaaaactgacataatatttatgtaattatcaatagttagcttcatgagagaaaaaaaaatggctagatttactaagtttaaattggtctatcattagcaagattgttattttagcattaattatcattaaaatgtgtatttttttttattataatctttttattttgttattatttgtttacttttataaatttattattaataaataaaataaaaaaaaataaaactaaaaatatcaatgatatatatttctaaaattttcaaactctctatttctacaaaaaaaaaaaaagaagaaaaattggtcaaccaaaatggtttctcaaattttataaatccagaattatttaacaaaaacaaaaatatcaacggtatatatatatatatatactagcaaaaagctacgtgcaaggcacg

SEQ ID NO: 84186 - DNA, 999 bp, Cannabis sativa
  modified_base (422)..(439): a, c, t, g, unknown or other
  modified_base (811)..(821): a, c, t, g, unknown or other
  modified_base (961)..(962): a, c, t, g, unknown or other
gatattcctcttgtggaaattaagcgcaattttgatttttacagaactcgatttcgataaaaattgagatagctagtttgaaattttgggtgcatatgggcgtgcaccatgcgcgcacacctacggacaaggtgatccacacgtagaaatttagacattttttgtctgatgcgcacggtgagtatgggcttcagacatgagtgcctcgccaggaggctgtaactcacccatcaagaccctgcacacgccgagaaacctcggcgaagggactctacatctcttttgtgcccgcgcgcataagggctgcttgtagccttcctaggcagccagccacacccctactgcgatttttgtgggattttttctttctttcgaattttgccaatttcaaaccctaacaaaataaaatattatttttaatnnnnnnnnnnnnnnnnnncaattttaaattaataatatttaaattttaatcgattattattaatttataatattttgaggtttaaatttaaaaattgaatatttattttttttcactattgtcagattttaaaaatttatgaatttctttaatatttatatgttatttaattttaaggttagatattttaatcttaggtacattttaaattagaagatagcattatccttttaagttgaagtattatattaaaattaccttataagataaattaaataattaataaatttaaaatttacctaaatttttttaaagatattctaccataattttttcaattaaaaaataggttactttgttaaatattttattgtttataaattataagtnnnnnnnnnnntattttatatcattttacttatcaaaaacttataaatagtataatttggataattattatgtgtttattattttattcttaaaataataattttctaaccatatctattttaaaatttgtttattttgttattttaattnnattaaattataagattagaaaaggatattgaaaatat

SEQ ID NO: 84187 - DNA, 586 bp, Cannabis sativa
ataactttgatatttttgttgcaattgagttgttgtacatttgccttttagttttattgatgctcagagaattgatgtagcaatacttatacattgatcatgctacataatttttagtgttatttgaagatatttcataagacaatgcaacacagaattcgcataaaaaaacaattctaatatggttagtttgttcatattttaacattggttgagttgatgttgatttacagtgttcttacagttgattcttcacaaaataatctcaaactacaagcatttgttcattagtcaataatagttggttaaatttttttcttaacaatacccaaacacatggtttatacatagttgctagaatgttgtttgcacgttgtcaaatagttttcttactaacatcttataatgaaaaaatcagagatcaaaattggcaatgcatggctcatatacatgaaacgctattgtggttagtttgtttataataacaagcaaaagttattttttgttttcaagttgtataatagtcaccttataacaaacgtattatataacatatcaattcttgtgcctgtattatgaatgccat

SEQ ID NO: 84188 - DNA, 1634 bp, Cannabis sativa
attttaaaaataaagtgagaacaactatgtgagttttatcacatatattctaatattcattctaacaacaaaccaaatatcgtaattaattctcattatcattcttatttcattaccattaccaatactattaccattacattcaaccaaaccaaacatcatcgaaacttttattgttgcttatagctagaagtataaaataagtataaactttaacttattttttaatgtttggataactattacatgacgatttttttttttgtaattgaaagtacttttcaaaatatttggatttcataaaaaaaaaatgtgagtaaaacaggaactatataaattattcaaaagttagttgcaaatcatactttcttccaaaaggacttataaattaaaaaaatatattattttttatttaaacatccctaaaataatttttttaattctaaaaactaaaaatgagtttataaaagccaaaggccaaatctattatgttaaactttttttttaaaaaaaaaaaaatggttaaatcatttttttaaaccacattttatattttattttttttatactagttgcttataggtgttggatttgtaggatagattgtcacattaaatttatttctgaaaatggccgatttgttgtcatatctatttagttttttttttcttctttctttagaaataattatttgatgttttaggataaatatagatttttagatttagttttttttttttttttttttgctggaaattttaagatttggttggattttgtacataattttcaaagatacaaatacaataatggttaaatttctcaaattagtgtactattagctaattagcttcttagatcagattatgggtatcacttgttcttaatctatgattattttctatttttaactcttatagaaagattatattataattattttattatgtgcttgtgtagattaattggttatttatactaaatatcatgtaacttattttgttattttaataatttaccatataaaaaataaatttcaaaataatgaactatttaaatcatatttttgacaccttaaaattatttaaaatttctcaaaaatgaacaaaataccctataattataatgtataacgtagcgaaaataaaaacattttacttaaaaaaaattccaatttatatatatttattgaaaattcaccaaagaaattttcaattgtatacaccaatatttcaattagaatataaaattgtatataggtttataatataaaattaagtttaccaaattgattggtgatttcaaatatatatgatgtagcattaatttgttaaaaagacctttgtgactccatttgctatgaaccacaaaaataatgcaagtgccttagtagtcattagaaaccaaacaaaggccaagactttgggaatgtgtcaatttagagactaaataatgaagctttaaagtcaattgttcctttagggaatttgggtagaaattgtaaggccaccacccatgatataatagtaaacgataacttaggaagactttctttcgagttattattattatcagtcttaacaggattaaaattatcatatctttaataaatttactttaattaaaataaagtt

SEQ ID NO: 84189 - DNA, 675 bp, Cannabis sativa
  modified_base (619)..(629): a, c, t, g, unknown or other
aaaagaaaagcttgcatggaatgcgatttgtattgacaaaaaataataatagtaataaaaaattgtatttataaacaaattaatgcaatgttgctgtcttgtgcaaaatcaactgtactgattgaaaaagaaattaatgttcacaaaaaaccaaatatatcaaccttacgttacaagttttgttctgttgtgcatgccgttggcttggagtggacatgtatcatgtatgtacacaaaaaactgaaacatatatatatgaaatgtgtgtgtgtgtggatcaataatatttttcagtgtacttttgcgtccacatcggtctctccggccaataaattcttaaaatactcttccaaaccaatagtcaaactcttctgctttatgtgtccaaaccagtttatctaaaagaacaagtatgataagatcatcataccatacaaagatcatatatatttgcctcttacttaaaatctagaatttttagggtttttttttaaaataatttttatattaatatcttatataagtttcacttgatcagaaagttagtacagttaaataaagggttatttgtggtaaaatccccttaagtggtcatgtttttgcaactaacccccaattnnnnnnnnnnngtggtaaaacctcctaaactcgtgttctgttaacacttagcccttt

SEQ ID NO: 84190 - DNA, 752 bp, Cannabis sativa
tcttcatcaacctgtggcatcttcctgttgtcctttttaatgatccattgttgctgcccccccattttctttttacaatttgttgcagcatgacctataccagaacaatgtgagcaagaaattggcttccattcatattttattcctactgaagtgatcgaaccaaattcattttcaaactccaagaaagctggcaaatcttggtccatctgcacttctattaaaacccgagggaagttcaatctctccctttctttagtcacattatctaccatgattggcttccccatctgaccaactatcttaaacaatgacttttggccccaatatttcagttccagttcttctaattggatccatataggcacactcttcatatcatcttttttgaatgattcatttgggtcccaaggcctcataactactggtcttctgttaaagaaaatgaaacccccattcaacacttgatccctatcctcaattgaatgaaaccgaatgatgaatataccataggataacaccttcactctgtccactttaccctgccagattctatgaacaaagccatccagaatatgcagaggaggatttactcctaatacataacaaacaatcgaaggtttccaaaaggatatctcatcttcaatatcatctaatgtaatcttcactttactctccttattctcagtattcagaaacgaattctcaagattacgcataacagaatttgatcgcaaaacaggagggataga

SEQ ID NO: 84191 - DNA, 801 bp, Cannabis sativa
caaacgaaatggcgatgaagccatatgaagtttgttcttcaagtagttgaaccgatctgttgttaaaggcttggtcaatatatctgcagcttgatcaaatgaagggacatagcaaactaggagctgttttgctaggatttgatcacgaacaaagtggagatcgatctcaatatgtttacatcgagcatgaaacacgggattggcagtaagggcagtagctccttggttgtcaacccacagaacaggtgcttttaactgagggatttgaagttcagacagaagagatagaagccactgaacttctgctgcagcgttagcaagagcacgaaattcactctcggtgcttgatcgagcaacaacatgttgcttcttggctgaccaagacaccaaattgtcacccaaaaacataagataacccccagttgatctcctatcatcaatgcagcttgcccaatctgcatcggtaaaacctgtcaagtgaagattgtcagttggtctaatccagatgccttccgtgagagtacctttgagataccgaagcaatcttttgcatgcttcccagtgtttgatagttggtgccttaagaaattgacttagtttgtttgtaatataggcaacatcaggccgagttaagctcaaatattgtaaggccccaatggtacttcggtataatgtgatgtcttcaaaaggatctccatcatttagactcaatttagaacttgaacttgtaggattaggacaaattttggctccctccatgtgaactttggtaagcaaatcagtaatgtacttactttgact

SEQ ID NO: 84192 - DNA, 541 bp, Cannabis sativa
atcatattaaaaccataaaacaatgttaaacaatctccaacttaatcctaattaaatgtttagctacttatgtttatgagagcacaatcacacatattaactttaaaaaaaaaagatgaaaatagagaagaagataagagaagaatattgtgaaaactctctctgaagaatgcctctaatattgtagttgatctctcaaattcgcatatgtattctttgtttatttctctctgaaattgtttcactgaaatcaactcaaattcaccttttatataggctttcagggactgaaaagatagaaaaacgcacatgttaaatgcctattcgaattaggaaaccaccaaaacccacgtgagacaaaaaaaaaatatgatttttgtgcagtttaggggggcgggccgcggcccagctttctcatgccgcggcccgttttggagtttcacgtttcgacggtgatttttctattgcgtcgactcatagtattttgaacataactctctctatattgctcggaatcagacgattcaagatgttctagaaa

SEQ ID NO: 84193 - DNA, 1636 bp, Cannabis sativa
actgggttcgattggtctgtgtcttgatagggagaatcaatcatagaatgcttgcttaagcattttccaagaatcaatagatcctagagaaagcttgagataccactactatgctacttcttatagtgtggcaggaaagacttgacaatgagaatcatctcgaataccttgcaggtcagtctgtacttcgaagttgtgtatgtgagagatagggtcttctttgccagtgtatggatgccacactggatttctaaaatttgaggggatctccaaagccttaattcgatctgagagaggataacaccgctcatgatctaattcatactttattggcttttgagtagtgatacccttaaccagagtgtcaaatttggcccaacacactgtggtgatgtgtgtatcagttggccgcttcctgttgatgttgttattcaggctcttttgtcttccaagtcgatcaaaggcattgatcgacctaggccttgtggttgtttcctgatcgtgtggccttgatgacaactttggggatttatcctgtatgacgatagagtggtctctcgagcgtttacttcatgaagagctactcacagtactataccaactatttccttcaaaatattcttccttagagtgacatgtgtggagggagttggactgattgctcaagttcaacatgtctccatgcaccaatgggaagtattcgtactgttggtcatcgggacctcgggcgaagtacctacaccaagctacttgttcatctcgagagtactcttgagtgtggagtagttcattaatccttaccctttaaatctcatactcttcactttcgtggtagataggtcactttccctttataggatcacgaggtggtctagagtcattagacttgtgaagagaatcccacggaagatattggtttctcacattgttcaaattgctttgagtagaattgtggttggtcctatcagctgtgtatggtggaccagtaggtctgcgatcttgagttagagtaatttcggacggttgctcatagctcgtttccctaacaagtgactgccccatatcaggtagaggacccatagatccaagttccaaatctaagtccttttggatgctcgctcaaagttcgcttccttatggggaatcccaatgcctgctgcttgttgagtagtggcatggctacctggagtggtattgtggttttcaatgaaagcaccaaaatgttgatgttgaaaagtggtcaacaccagtttgctagattagtgagatgaataataagttttaagtaaataatttagagagacacacaaaatttatagtagtttcactcctcgctatgtctactttgagtttttatttctcacgagatggcattacagaaaaagaccaagtatttaagctttggtttttagagagagatgctcaatatcaaaaatgaactaagggagctctccttttataggtaaatgaggcccttgaaaataagaataaaataatgaaaaaaaaatacaatttggctatttttgaccgtagatgatgatctaatagtgaaaataaacttttgagatagatcatcaatttttggatcccgggtcgcgacagcgggacccgctccgggtaagtcaaagcttatttt

SEQ ID NO: 84194 - DNA, 860 bp, Cannabis sativa
atctgtgttcaatttgagccttcctggggtggtgctgtccattttggggcatgtatgaattctgatgaaggcctaggatcaggagcagcagctgaagatgttgttggctgtgaacgtttagctctggcacgctgaaactcagtcaaataggtaggggcatatgcagcaactgcttgtggtgatcggacagtattaccatggtaaatggcatttctttcatgccaattacaccagcaaagaaccaagaattgctcaaattcagatgtggttagaactgtcgataggtgtaataatatatcagcacttgcactttgtctcaaggtggtaaaatcaatattcagaggagacaaatcccatactgttttggcccgtggacaagagaacaacgcatgagtgattgattcatcagcagaattacaaatagtgcagtagggagaagttgctatatgccttcgatggagttcagcagctacaggaagtgttgagtggaaaactttccacacaaacattcgcactttaggaggaattttcatcttccaaaaagttgaccaccaatgctccattgaagaactactggcagtatcatcttgttcagcaagtgaaactgctagttgatatccagattttacattgtaaatacctgtgaaagagtggctccaaatcaagacatcatcatggggaaataggctgaaagggatggagagtatacgatcaacatctgcttggctgaaattggcttgcaaagataccaaatcccactgcctctgctcagaaattagatcagcaaccatcaaatttgggtcagctcccttgaaaaaataaggcttaaatgttgtatttcctggcatccatgcatctgt

SEQ ID NO: 84195 - DNA, 735 bp, Cannabis sativa
atattaaataaaataatgtaaagatgaaagataaagacaaaatgtacaaaaatattattaggctactagctaagttgtaccattactattatattttctcatctttatcatcattacatcaacaattaatgtataaaaatatatccccacataaaaacaaaattaatttctctaccataaacatgttcttttgagagaaaaattatatacacaacttttacattgcttgtgttccacttccacataaaatgaaaagaagtttaaatcgttatcagtagctgaaacttctgtttgtctatgtctacgtggcatgttaaaaaaagaagaagctaatttcttcatgttgccatatcaaaatcaatatgaaatttcttgtcccttttgttaggcctcgtatctccaaaacgttgaaagaccatcaagcctttaagacgttctaaaacgtccttcattgcaggtcgattcgtggggaaaaattcaatgcaacgcatccccacctctgtaattgtggaaccatcttcaccatggtagccccagtcttctgttaggcttttgtggactagtgagcaattgggtttgtactcatttttggcccaaatatgtatcacattatcgggtattagtttgggcctctctaggcccagtaccctcgtggatataagacccaacagaattacaccgaatgagaacacgtcgctcccggtttgccagtagccacctataccatgctatttt

SEQ ID NO: 84196 - DNA, 1211 bp, Cannabis sativa
atccgaatttgatgctacaaatcaggtattttcttaggaaagtcgtatacaactttgaaaacgtatttgtggttgtctctagggtttctatgttctaaaaataggacttagagagcaatcaaacgtttttcatctcttttagtctcatattttcatatctatctttgtgagaagagtgttttatttgtaaaaacctagagtgttcaattaggttttattttcttgttatgatctcgtactattcatagaatatgttgaagagaaaatttgaattcgaaaaaagacttttccaaatctaattttgggagaaagtgagcatatatcttcgggagaagatttgtttaagccttacttcgagaggaagtaaacacacatcaatagtcgaagggacttcactactcagtgtggttcagagatcaaattagcaaggtggattacaagggttgcaacaaatcattagagggagtctaaatttgtttaagtcaattgcttttgtaatctttgatactttactaattgattacattctctgggcgttgccccgtggactaggagtgttttaaaaaatactagtaccacgtataattctcttgtgtcaagttttaaattctacacaatttattttatgtttctgtattgttactgcaaatttttacatttacgattttattactgttattaaagaaatatattagcatttgtaaaaatattattttccagtgacacctccgcttcaagccttcattgagccttctcggttgtttcttagagtgacgaatgaccttacaaactaatacgagtgttttcatcctgctttgtccttactcacacgctccctggaaatcttccaggaggtcatccatcccaagattaccccaagtcaagcacacctaactttgaagttcataaacgatgtgctaccagaaaaatgtaccttgttgatataggtagtactcatcaattcatttaagccatctgtaactgtgtagtctcatatctatatagtcatagaatcatcatattttcgccatgcaatgtgggattacacaacttacccaatatttctttttatggatcacgagagtactgattgtcacaagttcacatcacgttacaccccatgttggctcagaaaattggtttacaaaatttttgctcatccctgtactctatcgacttataaagatagaaatcaactgaaatatatataa

SEQ ID NO: 84197 - DNA, 1259 bp, Cannabis sativa
taatatactattttctaagaatatatatctttacaattaattattatttaagttataaagtaatctttaagtgaaacttctttttgaacatttgactagtacttggcaattaacttatgcatgtatgacatttgtattttttgttcctaagttgagtcaccttctttttttcttttttgattataatctttgttttcaattgaactaataacacgtttactacacattatccaaaaaaaaaaaaaataattaataaaaaatgtaacaaaataaaactgaaatattaaaaattcattatatttaataagcaatgtgaatcaataataattaattaaggtacctcttcccttaccgttttctttttattttaatttattaaaattagaaaatgaagaacttgattaaaagaaagggaatactttcccctctagttttttaagaaatatcattaaaaataatagtttctatttatttttatttatttattaaaaattaattttataatgataattttttcctttaatatatgtcttacaaaataactatcatgtataatagtataactcaaaatgataatttagctaatttaagcactctaattacgttttctaataaagtaaacaagataaatcattatcattctatttagtaaacaacatattacaaatattaattccatttattcttcatttattatattatatttctccatcaatttattgtgattctcaataccgtgtgtaaacatgttataaaatattccacaaaaataactctttggctctctatcatgctgtcattttttgcattcgcggagaatggaaatttgtgcgtttctttaccgactgtcaagtgcttgttgctgctatgtttgttcgaaagcttcggatcgaaagttgatttctttttttaaacttattttgttctctcaattcgtttgagttttggaatgttgtttggattccttgttcccataattaggtggttcatcggattgcctcttgggcagctgatggccatgtttcccgctttctttctattggattgcacccctattgcaactctaaccttgtagttcttttttgtgtatgtttaatgaagtttttagttttgcaaaaaataaaaagtgttattcgtcatcttgcaagtataatattaaaaatgtactcatttttgggttcaacatcatatttataattaagtctatcaaaagcacaaacaatatcacatttatttttttttctgatgaagaaggtagt

SEQ ID NO: 84198 - DNA, 771 bp, Cannabis sativa
aacagaaaaataaccatataaacacttaaacaacaacacaaaaataactataaaacaacagaaaaataacaagacatcaatctcgtttaaatatgcaaatcattcaaaaattaactccgaattaactgtaaaacattcaaaaaaaaatacataaaaataactataaaataattatagaatgcctaaacaataacatggaaataattataaaaaataataaaaaaatagctataaagcaacagaaaaataaaaagacatcgatctcgttgcaacatacaaaccactcatagattaactctaaatatacaacacaacatcttaaaagatactatttttattaattatgtaaaagagagaaaaccataaatagagtgctgtaaatttttttgtgagagaaaaaaaaatattaaaactaaataaatatgtatatatgacaatattaatgttttttaaagcatatgacaatattaattaatcatggaaagttataaaaatatgacaactgcctttataattaattaaataataattgagtcaatgagtgctccttgtattaaataaagcattatgtatttatactataagtattgctattaggtattagtgatgtttaatactttttaaatatatcattctgcgattgactagtgatacttcttgaaaattataacttgtatgagacccgatatttaattaaactaatattaatattgacatataagaggatactaatcaccgatatcttgctagtgtatttctcttatactataa

SEQ ID NO: 84199 - DNA, 1697 bp, Cannabis sativa
aaacaagctcacattaatatgcatgattaaacaatgaattcaaaaattggttaatcccttctcaagataccaaacacacattaatatcaagtctttggacattaatattaactttaagtggtactcttgctatagcaatcaaatattgacaataaaaattgtgccaaacaataggttaatctttggactaacgtattcctcaccttataattgtcacatatttatcgtcagagatgtgtttgaaatctagcaaaatatttacttacctttgggtcagtcaatatatgcatcaattacaaacacacaaccatcttaatatttaaataaattaatctaaacaaaagaggtcactttggcgacatattatttcaattaatttactcaaaatataaaatattaaacataataaacaataaacaaacaccaaaatttgaattaaattgtttgaaccaaaatatataataataaactatagacatatattttttttttgaaaaattagcgaagtacttcattagaaagaaacaagtctagacctctcggtcattacaaagcagattctcctgcaagtcggagactggaatacaaccaaatatctggtgggtaaacgtccacttagccacattatggaccgcatagttacaatgtctactaatattcataaagttacaactaataaaagaaggagtggatctcaaacaaaaggaggcatagttctcaagtgcccaatgggactccttcccattgagaacattgatagctagtctcgagtcactctcaattataataaacttaaaccctaagtcaatagccagagaaatggttgaacaacaagctgctgcttctctgcacaaagcatccgaaaagtccaactgagtcatgtggatccggatcaccttaccctgatggttcctagcaacaatagctgtacacatgcttgcccgtcccactctaacatcacaattcagtttgatccaatcctcagggggtggattccatttttcctccgaaattggagtcggaggcgtcaccagagaagcatgtatctgcaaaagaagtgtaaacaaggtcaatacattttaatacatctggggaagtattattgtgaactttttcatttcgcgcccttcagatggtatcaactgcaatcgaagcatatagaaaaaccttctcctctcggatacccttatttttaaggctccaaagaaattttatccagtcccaaacacgaatcccattgccacaaatcggatatatgccccaaaggagaggagtgccaaatgtgtaacgccacatcacacgaaagaaaaaggtgttcaacagattcctccccctaccacatagaggacatctggtatcctcaatttgaaatcttctgccaatgactgctctgacagggagtgccgtagagaggatgcaccaccaaaggatcttatgccgttctagaactttactattccatagtttattccacagcaaatgggccacctcacaatggctggctctttctagagcttgagcaaggtaagaagatttactcgtgaacctcccattagactctaggatccaaccccatctatccacatcctggctcaaaggattacctcctttcaaaatagcagagaccgtgtctttatcaaacaacctttttagcttagaattgtcccatgagttagaatctgtgaggagatcggcca

SEQ ID NO: 84200 - DNA, 561 bp, Cannabis sativa
aggcaaacaaaaaataacagaaatctgacaatcataacagaactgttagttgccaactgtaataacaaacttaaccactaactgaaaactgattatctgttacacagtgccaactctcaacttttgggactttaacactttccaaactcaatcaaaacatcattttaacgagtcctttgatcctccaaacatcacctaatgatataaacatcaaatccattctgttttcttcataaaatctaatttactctttaaatttaaaaaacacataaaatgaactaaaaacactaagaatattaagaaataacaatctaaataagaggaaactaacaatttatagtccaaaaatatccttatgagtagaataaaaaaaatagaaaatgagaaaatttaaaataaaataaaaaattagaaaagtgagaaaattaagaagataatagataaaaattatttaaacaattttacactgtctaatcaccgtcttatacttcacctataaatatatatatatatatatatagatgaagattacaatattagtctcttttttttttttttttt

SEQ ID NO: 84201 - DNA, 734 bp, Cannabis sativa
tgtttttgatagtttcataacttataatccaaacacagatacttttaaaaccctaagttttccactactcacacaagatgatcataatacacaatactatacatactctccaaccttgctttctctttcttgggtttcaaaccaactatagtagaatatatataattatggtttgaatatttatatttagattttttttcccttgtattcttttatttgaagttaaatgttatatttattttattagtcttttttttctgtttgtattctattttaaagaatatcatatgaatattatatctttcataataaatacttaattcaattattttcgtttgaaaaaattaagatcaattttatatgggaatgcatatacactgcaacaattttatcaatttaccgaataatgttagtattaacagcagatctcagtatttatttagccatgtgtctaacctttaaaagaaaaatataaaattaaaagaacaatgatgtgttggcattttaatggttacaatgaataaaataacactcccacatataattgttcaaaaaaaaaaaaaaatataagaagtacctaacagatgattaattagaattgtcattttaactcatcaaaaaatcagcatgctattaattgtttatgtaagtaaggtaaatttgtaacaattttgatctatgacactaaaagttcatacttctatccacaagagaagaaacattatcattccact

SEQ ID NO: 84202 - DNA, 526 bp, Cannabis sativa
aattagtgaggtggaatcttacaagtggtaattataattaaattaaaatatatagaacttgatattgaattgcattagtaatgatataaaaacatcactactacaaaaagatccatttgcgtcaatcagcacatcagtttacccgaaaaaccgactcaattggttacctttaaaattttgcgtatgtttttaattgatgggattttataaccaacacaacaattttctctctctctctatatatatatatatatatatctatctctctctctacaatgaaccattttaaggggtagaccgatgcaaatctatcttgttactttcagcatccataagaatttcttaatctatttttttttcatagtcatacatatccttttaaagaatgcattgtacgtataaaaaagtatttattcattatcatcatgtttaagataataccttgatatggagacgtggacggttaataatcttatggtggtaggagaacgggcttgggatttagaggtggtttcagatatattca

SEQ ID NO: 84203 - DNA, 784 bp, Cannabis sativa
gaacattttcagtcggtcgctcagtaagtaatctggagcttccttccaaatccgattccaaatctgatcagactcaccccaacgacccttgataatagacttatacgctaccctcggggagaacaacccatttgtagcatctttccacacaaggaggtcttcctgcgatcttggcaaacgccttaccaggttcaaagaactagccacacttgggacgaaccacctgtgaaccgatcgaggtatccactccccatcctcaccaagcagggtggaaaccttaattgaattctgaacacacaatggattgaaggcagctctagacatattccagtctagccaaggtatccaaggggaatgccacaggtcaaccttgctcccgtccgctataagccagcaagtttcattcctaatcaagtctctcgtcgccatgatacctttagcaccaaaggaggcattcttaggcaccttcgaggtccaaaaggtttgatccctattcccccaatacttggctttaaaaatcttgcaccataaagagtcttcctcatttgcgagtttccatccgagcttcgctaccagagcaagattaatgtccccaaacttcttgaaatttagcccacctctatccagaggcaagcataaggaggtccaatcacagagagccaaaaatctgtctttcgtctcactacccatccaccaaaacttccggaccgcctgatccgtctcaagacacggggttttggggataaggaaagtagccatagaatacaccggggaactctgggcc

SEQ ID NO: 84204 - DNA, 661 bp, Cannabis sativa
aataacccaaataaaaagtctaacaaatttattatttatgctgtattagataagattattattatataaaagctttttggttttgtgaggttttaggattagttgcctgaattgtttaggttagtgtggggtttctgtgtttgttttgtagtcttgtgtgagtgggtgactttgggaatccaacgaccaagtgactctaaaatttaatgagggtaggaactaggaacaccaatttgggatccaatttaaattccaagtgttttccatgttaatgttatgtggacattttggccatgaacaaaatgattgcaaggatgatgttgttttgggctaagcatactttgagacaatactaaacctttctgtgcaaaaaacctgtttacctaaactaaataaccatcagtccatagcttgtgtggggtccggaaggaatgacaaaagtcgctaattctaattttagtcgtgtttctaacggaagaaaagtctaaattggattatatgctattattttatgtagttgctgttaataaaattacatttaaaaaattatagataattaaggtatcatgagtaaccaaatagtttaaatcaccttaaaaatttaaaaaaaaaaaaaaaaagatattggcggctaaatcatctgaactttacggtttgtaac

SEQ ID NO: 84205 - DNA, 543 bp, Cannabis sativa
cttattgcatgattcaatatgtacactttccaaagatggatatgcaacatcaatatcagtactactggatggaaatacagtcaccaattcatcacaatcattaagcttgatcacttccaaggatggaaaattaaccataggtaatgccacatttagcttcccacacccaaataaatcaaatttcttcaaacaagggaaaatatcaaccttttcatcatttgtactgataaaagaccaatcaaatgtagttatacttgcgagatgtatctcttctaaaactcgaaatgaattatgcgaagaattattacaaaattcatgaggtatatcgattgccataaggtcaatatcaagctctttcagtgaactcaggtgctgaaatgacaataaagacaaacaacaattttgaccctctagagaaataacttccaaattagagtacaatggatctactacccactccggcaattttgtacctttataaccgaatatgtggaggctcttcaaatttgcatgtggttggagtgcagtaagtacttctctttc

SEQ ID NO: 84206 - DNA, 949 bp, Cannabis sativa
attcaagcgatgacttttctttaatagactagagggtgaaatatcacttggtgtgtgacagactatatgcaatcctttccttccgagaaggagggttgaagacgtatcatatccctagtgatctttaatgtacaaaaaaactacatgcatgtgagagtcatgttgaatttttacgtggtagacttcggtttaagcgaggataggctaaagttgcataaatattcaagcgatgacttcgctttaaaagactaaaggttgaaacatcactgggcgtgtgatagacttcaataagtccttctcttctgggaaggatggttgaacattatcatacccccagtgatctttcatgcttgaaaaaattacgtgcatgcacgagtcatgatgagttattacttggcagacttcagcttttgggaggaaatactaaagttgcataaaacttcaagagataactttgctttaagagaccaaagggttaaacatcaatgggtgtgtgacaaacttcaagcagtccttctcttttgataaggaggtttgaagacgtatcataccctagtgatctttcactcacagaaaaactacatgcatgcaccatccatgctccgtgaaggtttatgggatgcgtataaataagtttgctctaggatctttgggtagtcattcactcagggggactccaaggaacctggtagttgtcaaggcaaagactcggacttccagcaaggcgagcgttactccggtagagatttcctaattggattataatgtcttgagttactttctttgatgtagctttaggggttaaactttcatcaaaatgataggaatccctgttagaaaccttcaccagaagtgattttcctgaacaacactgtaaaggccgcttagtttaatttggaaattagcagttaattaagtttaattatggaaattatttatagctatttaa

SEQ ID NO: 84207 - DNA, 792 bp, Cannabis sativa
  modified_base (198)..(217): a, c, t, g, unknown or other
agatccggttgggagtaattgctggcagacctcgtcttactcacagatcgcgttctactcatggactttgtctttgagtgactcgcagatttactagttaccatactttctcgatctttagctcgttgaatactttcccctttttgagttgatcaactatgggttcttgagttggattatgttttaccaagatctagnnnnnnnnnnnnnnnnnnnntttaacatcctaaatatgattttctaaaataatgtaatttaagcacatataaagtttgagaaatcttacattgggtgcagtgaaattaaataactccttccgctcagatctctaactcttgtatcctttccgtagcagattatcaccaagatctgagccatattctccttctcttgaatttgattcttcacagccttacacactatgattgagtactagttgatgtgtgtgggcacttactctatcactatagggttcaaaatattgaagagaaaaagagagaagaagggttcgaataggatagagaggatggctcaaattttttactgaaggaaagtgtgttcatcatcttttaatttaaagtcaccactatctatctagaggattccaactaggtttaggtttgaattattttgcattaaaaaattgataaaataaatggtaaaatagcctataagtggccggctatggatgtgggcccccgctttgcaattttgctattttttcaactatttatcttattttctcaaaatgccatttttccaattcagccacttaaatgccaaaactattta

SEQ ID NO: 84208 - DNA, 695 bp, Cannabis sativa
tagcatctgtgtgtaaagtctaggtgaatcagaagtgtgagcttttctagttagctgaagcctttgatgagtaggcccagtccagctagggctatgtaactaagtcccctccctaactctataagtacatattgtctcatcacaatcatatacttttgataattagataaataaactgtttctaatttagagatatagggaggaagatttagttgatagtattgcactttcaaattgcaataattactatggatcaatcaggtacgcatatacctaattattatatattgttattgtgctctatattatatacaaatagatcttgggtttattaattaatttatctaacaagagggacatgagacacgacctaatcgcattgtttattacatcagtctcttctaccgtcgtagatccaaagtcttcaagaaacctcttcaccgtccgccgcctgagctcttttgcatcgatctcagccatgaacaggcaattcccgtcagatctcgcaactgtgagagagcctaaaaaccatcgacctaggggaagaggagttgtcaatacaatcatcctgtggatgcttccacaggacacccttagcgtgaagcctctggaaatggtgtctctactggtcttcaaggccaagaaccttatcccaagcagtagaacagatcaccgtaacaggataatgttgttgg

SEQ ID NO: 84209 - DNA, 610 bp, Cannabis sativa
  modified_base (347)..(349): a, c, t, g, unknown or other
  modified_base (577)..(578): a, c, t, g, unknown or other
gaaaaaccggtcgaccggtttttcttgggagctgaagaaaaatcctcaaggtgggctggttttggcttgcatgaaggagaagaagagaaggagaagctttttggtttttccttgctttgtaagttatctttctcttaaaaaggttttcttctttctttcttttttttaattaattaatatccagcccacaaaacaattaaaatataaagcctattttaaagaatgactaatttacccctcccccaaaaattaaactttaaagtaacctaggggcatttttgtaattttttgctaatccaccaaaccgacattctaaaaattttaaactagtccggaatatcctcaannnaattctcccattaatgtcgtgacatttctaaccacattgctaaatttccctagtcattgggcccgataaaatatttttatttcaaaaatagtatcctcgatacccgcatatcccaatataatccccgtaattaataaattacgctatatatatcttacaataaatttttagtagttaccctaagtaagatcataatcttactagttaccaaaataattacatatttannaaaatatgtctatttaaatattattttatttt

SEQ ID NO: 84210 - DNA, 739 bp, Cannabis sativa
attctttttcttccaccattcaaccaaaaaaaaatatatatatatatatatatcatttattatttaaaataaaaagaaaattatggcacccaaaattacatttttatgttatcatcccaatcctgacattagtaataaaagatagcctatcaattagagcatctccaatccgatggagtagcactccagaaaaattattaatccaatgaaattctaaagtgtattaaatttatcatatttttaaagttgtatcaaatttaatctataataaatactattttttatttattataatactactaattattatgattcattcacttttattaacttttacattctttattaacttatttgcatagtaataaaataatacatgtttcggtaagttcctaaattttattttttagcaaattatataagttatgacaagttatgtaaaacaagtgaacttatctatgcaattctaagaggacacaattggagaaattgaatcacaagactttgcaaaagttgcaagtcttgaaatgagaaatggtatttatagggagatgtttacagagttattacaagaagtaaaaacagagtaattaacagaaaacaataacagtaaaaataataaccatttgactgttacaacaaacaagttctaattgtcaataactaactctgacacttgtttatcatcctccctcaagcgaaatggtgatggacacactttgagcttgtctttgaggta

SEQ ID NO: 84211 - DNA, 510 bp, Cannabis sativa
gtacaattcatttattgatttatagaagaaagttctttagggtatgcatttggaagcaaccgtttaattactatgcggtgtaattatattgtatagttttatattgtattttaaaatataaggtatgtttgaaaagtgaatttttttattgtcagtgagacagttggtaattatacaataaattaatattaaatatgtaatataataattattatgtaacaaaatttaaaaatgaaatttatctattaataatatttaaaataaataaaaatttctttataaaataaaattaaattttataacaattttgtaataaatatttaaaatatttttatctattaagactattgaattgtttttgagttctatatatcttgagctattctatctagtatatggttttccaactttaaaagtttgagtatttatcatttctatgttaactaaaaattaataataaaataaattgtacttttggtgtcagttttaaactgagacttatacttttag

SEQ ID NO: 84212 - DNA, 1019 bp, Cannabis sativa
  modified_base (69)..(69): a, c, t, g, unknown or other
atccctcaaaaggttgacaaaccatgaccaagtgtccttgttttctatctctactacagcaaaagcaanatggtacatttggttatttccatcaataccaactgttgtcaataattgtcctggatgtaccccttttatatggcaaccatccaacccaactactggcctgcatccttcattgaacccctgtttcaatccaccatagcatatgtacatcttcttgaaccgaggcttgccatcttctgttgtgtcagttaggatttcaactgttgaacccttattagtccacttgatctcctcggcataatcccagagagcattatattgttcttcataactcccttctatagtcttacttgcaaacgtcctagctcggtatgctttatgatcccttgatattttcaatgtgtgatctttacccacttttagttggaatgaagaaatgccccacttgtcatgcattttgaactcatctaagtacttcttaccaagccattttcctgtggcaaatctattggtgttgattcttgggcattggtgtgtttcattgaaggttttcactacaaatgttggtgtatcatctattttagatgcatacagctcccatggacaattgacaccaccacatttagccctaaccttagttggctcattcttcttgaagaagatgtccttcccattttgaatagcatactctctcatagcatctttgaattgtgaccctgattgaaatgccaatcctttctcaaacttcactttcaccatgtcaacatcaggtctgaactcaagtaaatggggcattcgagctcttttggacttccttttccttgtatgaaactcattagtctcctcaatttctgattcaatgtcagatgaacttgattcaaaaacaattttttctccatcagattcaacaaccaccacctcatccacatcaaagtctacatgccttttcccttctctttgtctgttgtcatcattagtctcctcctcctcctcctcctcatccattatgtaat

SEQ ID NO: 84213 - DNA, 1021 bp, Cannabis sativa
tttaattaggtaatgtatttttatgttttaatttttaaaataggatttgagattttgatttttaaaatttttgtttttactatttgagctacattggtgtatgctctttagatgtgattatatatacgtatttatatatacaattaaagaataaattttattattatacgtattttatgaatatttatactaatctctttatatataaatattatattagaaaatattttgacaaaatttgagtttgatgattagagtatattaattacttttaaaatatattttatatattatgtctaaatatatatttttaaaaaataataatagtgatagatacaatattcttaatttgtagttaaggaagtgttgttataataaagtattatccgaaacatatgtatatatcattaattattttgaaaacaaaatgttgttgtaaaattaaagtttaaatatatgtattttatatataaaggtgattttatatagatgtaatttttatttttaaatatatataattaaattaatttttttacatatgtacagaatttttatttttaattaaatatatataataatattataaaaattataaaaaatattttgttaagtaattggatattttatttaagttaatgtagaaaaacaaaaaactcggttacactcaaaattttgttgcataaccaactttatataaaatagatatataccttaatatttttttaaatatataatcttaaaagcttgaatgaaatgaaaacataaataaataataaggtgtcctccatgcattggacgagactaataattttgtttaaaaagaaaaaggaaattgagggaatataaaataacttatttatgtcaacatcattgctattgaaaatcaaatattatgaatcccatttgtcaactctcgaggctctatatatattgtatagatcagatgatatattatgtgaataagagaaatatatatgagggtgataataaggatttgagtatggatcaatttcttcgttct

SEQ ID NO: 84214 - DNA, 779 bp, Cannabis sativa
gcttgtaacttaaaactttggtacttagtgttatgggatttgaacccatgacattggacattatgcatgtccatccacctcaaccaactaagatatgaatatttgttgcttatataatacacttaaatattatttaaataaaagcctaattattttttttttatttttttattttgagcccccgaaaagtgtggaccctaaatacgggcctagcccgcctagggccggccctggatacttcatattgctcttgagttcagttgagggccataggacaacatttaataggtttttcttttttttttggggaagaattatcgtacgtcctttcatctctaatatatagtaaacaatattaataatatcacaattatctctccaatcctccatctttataaaattcctcttacgatgaaattttttgaagtttgaccaatgtgaatttgaatgacaattgacaaaactagattacattcttaaatcttaattactatattgatcacatacatagtgaaaaaaacagtagtgaaactttcaaatcagtacatatatgacgatattaatagtcaaattccatattaattgtcagactaattgacggatcaggataaattttgtcccacagatattagttaaatttgttctcaatatccttaagtcaaaattcaaggtttcaaatcaaaagttttatcactttcacaaattacgtaaagggtacgtaataatactatattatatatatagtctacttgtttgtccaaaagtacaaatgtatttat

SEQ ID NO: 84215 - DNA, 4020 bp, Cannabis sativa
tgacttggtattggggaatctaaatctcgaaatggggtttgtatattgaaattgggttcgaatggttacggtggatgaagataatgattttggaattggattgaagggagtaagagtgaagcgagagaggagtggttgaatagacgagtagcgagaggaatgaagaatctgtttccggatcccaattccaatgggtgtcatcattgtattctgagagaagatagagaatcagaaaacccccaatgaaaatgagacccgacctttgtcttcttgtgacagagacccaaagaaaattcaaaaacctttgttttggtttaaagaacagatgagaatgagatccctcagagttttagtttgaggtcagtcttcagttgcgggtaaatctatgactatggaatactgcaatgggttgttgaacaacaactatggctatgcctttattcgagccaaataataatgaatggtaagtgaggatacctttataaaagtcttgcttttgatattttaattcatttctacctcctttttttctgtctctcatgaccatgcagttgttctctatctacatcagtgcatggaaatgggaaattgcagatggggcttagtttactggtgctatgttctcttatttgatctgtatatatacaatatccaagatttatgctttatcctatcgttagtgaatgagtgattaccacattcaatcactttgttgaggttgattatttgaacaatgatcaaataaattcatctacgacagaaatgaattaaaagaaaagaacagaaaataagtatcgttgtaagttgccaaatgattcagtgaaactccaatgtcatttctttctatgtttgaatatttacattatatacatgtgtgtatgtatagggagactggtagagaggagagtaatgaagggcatataaagtgtcatgtgaagctggagcggtgagctgggaatggtccccttgcattctttgcagctattactttgcttaccaacactttccacttggcttcgtccttcttgcactgatgcacaactttctccttgaaatggcttttagaaaagaaaaagaaaaaccatgaattatgccaactaattgaaaagctgaaacaaagcattttatactatgaatgaggggttgttttacctgcaaagtgggactttgcatgtaagagggtcgttacacaaacgagaatgcaggtcaagaagctgccacatgcgcttgcagtgtagacaaccacctgggacacgagttttgcaaatggagaaatggcggactaaggtttcgaggcctttgcaagcagggaaaccacaagcaacttggctccctttaaggactttgtcgcgtggccctattgttctgcaaccatccctgcatatgtgaactatggcttccattgcctcattcagttgtaagtacactttcttctcttccattctctttaatctctcttcttttgtctgaaatcaaaacacatcattttatcataaacaacataacataatcatcatcatcatcataagaaaagtgggaaagtggggtggatggtttattacagtatctgcttctactactgcttctagtaattcctgttcaagagcaggattaaccctcttcataactttccaaccttgtgttgaagaaatggccttgaaatgtttgacaatccaacggatacaaaccaaggagaggcgaggtgcatcgcagttccttgccaactgcagcacatccaccacgttttcgttggtcaaccaaccctcctcaatcaactctacacaaatccttttcaatgatgaaactgagtaggagtgtgatagaagtaacaggtgcagaacaaacttgttcaattcctccttttcatagctgagcttgtttacaaacaaacaaacaaaccattcttaattacccgacacaatatgattatgacttgtagggtataggatataaggatcattagattgaatagacataccaggatgagtaaagaaaacgtataaagatatggagggcattgtagggtaccccaggaatgttaatgtatctcataccattcttaatttttgcttgctctaataaatctgccaatactggtgatgcagcaccctgccaatttgcaaaacccaattcaacaatcttgaattataacataattaaattgattgaagtgggttggttacagggatcgtgactcaccagaataaaggaatgagctagaacataggagggggaggaggaggaggcttggtcctggccctgggtactgataacatacacatctgcaccgtgtccttccttgaacactttgtcccatgtttccaatgtttcttttgggacagagcaacatgagtagtacttgttgttgttgttgttgtttttaggagaaggaagaggaggaggaggaggaggaatggtggaattataggaggtggttgtggaagtagatggtgaagtttgctgtgattcgtctaaacgaatttccaagtctaaggaataagcagtggatgaggatgaggatgatgttgaaggaggtggtattggccaggctgagtaaatatcaggggaagccattgttaattaagtgagaagaagaaaaactaagaagattatgtatatataaataaataaataaataaataggaggaaaggaatgtttaaggaaagaaaatagatggaataggaaaagaatcagaaagagaaaaccccacaaattgaaattggtaagctatggtaaatgggattatctcatctcatttaattaacatttaagtaagtcagaaaggaaggaagaccaaagccagaaactttctctcttaattatcatcagaaggaagcaatgaaattgaaaaggaagaaagaagaaaataggtgtgtgtgtgtgtgtgtggctaaaaaggcagttacttatttggaaaacttgtcaaattagtataaagtcagaaaactcaacacaacagcacagcaagagaacaagagaacaatagatgaggtgttgtaattgttcagtcttgattttcacccaactcttttttttttttaacttaattacacaaccactctcagtctcatgcactcaccactcaccactattattattattattattgttgtttgttgcaacatttaataatatcatgtcagattcattcatgccacaatacaaacacaacacaattaaaattaaattaatctttattgaaattatatggttattattattattattataaatagagagagggaggtaggattggataatataatatcattaaagtatgagttatgagttatgagcatgaagatgaacgatgaaagataaataaaatctcaaaaagaagccaaaaacaacatatggaggtgggtgggaccatgactcgtgccagtgtatccaatgggagaaggacacgtggagataaagtgtgttggggcggctgaagaaacaaaaaagatgtgatcatgtctcgtgggctccacctcaccaccccaccgtccattcctttttcaaaaaccaaattttgttttggattactaccaccattttttattttcaactaaatatccttctttttttttctcatttcaacaaataataatttcaactaaatatccttctttctcatttcaacaaataataataatgaaagtaaaaattccttcttttctttctgctcataaatttaaagcacgaccaattatgtcatatcctaaaaacttaattagaaaaatgccatatttctaaaaaaaattatgataaaggacagaccaagtcaattgaggcttcgaaatgtggaaattagactttatacctttttttatattatcctcttttatttttactgtcttttttaaaatttatcatttttacctctttttctaaacactttaccgattttacctctgtcacctcaatatactctttttgttactctcttatgtcagggtattttagatacaatacatataaaaagaggtatgtttcaattaaatataaagttagaggtagatttggttaattga

SEQ ID NO: 84216 - DNA, 736 bp, Cannabis sativa
ctaggtcatttgtagtcatttaataatgagcttatcttgatttagttagtttatagtttatctagagcttcatgttcttttttagagtgagttttcagtagaagtaattttcttactgagtttatatttatgttgttagacgatttatctctttattaattaagttctatttcctttctaaagtttttctttatttatttaatagaaaatatagtcaactgcactatttcctctaattgacatatacctacatttattttcttaaaaattatacggctacaatacaaaaacttaatattactctcacacaaatacgcttaattaaaagctataataaaatattaaaggactcatattatcttagtaacggacccagaaatttttctttgtgggaattttttattattaaaaaatatttatacatatattataatcactcttactagatttatttaattttatgaggcactattttaatctataattattaaatttaattttttaaaaaacaatatttttattagtgagagctatatagcccccccacattaacacaagtgagtccatccctgatgtctagcactcttataatatataatatcgctattaatacaattcaatatcgaatctcacttattttaatttaataagagtaatagattaccgttaactaatataagacatcatgtgtactaagtaccttaattgcccataacaactcttgtttttttttttt

SEQ ID NO: 84217 - DNA, 884 bp, Cannabis sativa
cagtgttaagggggcttattggatcgaccaaaaagagaggtttggagaaaaaagatgagttatggagctggatttggaactctaaggttcatccacggatgagtttgatgttatggagagtatgttcgagtgtgttgcctacgggtgataaatttcttccattggaagcaaacacttgccccgtatgtcatatggcccctgaatcggctatccatctttttgctaaatgcagttttgctactgctttatggttctctagtcctatgcccataaggatcgacagggtggcgggtgccaatatgcaggaggtcatccacaatctatgcagttcttttgacttctctctccggcccaaacttctcaactgcattggggtgattttggattgcatttggaacacaaggaataaagtgtacgattccgtggattatatgcctaatgtgaatttgatcagaggggaagttttcagcagagtgtctgaattatgccaggttgttgaggccaatttaagtctgtcgaacaaccatgaaggggagacctcgccgaggatatccacaaacacttttatcatggtggacggttctttcaaggctggtacctacgggtgtgctatggtggccctggataaaggttatatggagtggtggcaatgcacctcctctggtgagggagagtccgctcttgaagctgagatgcaagcaattctggtgagtctgcagtgggcgtttctgcaacagtgggataattttacaattatctcggactcaaaggtgctggtggaggctattcgtgctaaaaaagctccggcttggaagtgctctgcgcttttttccctcattttacttaaactatctcaattttctgtttgttactttgttttttgc

SEQ ID NO: 84218 - DNA, 1268 bp, Cannabis sativa
ataaaaattaaaaaataagatctgacacgacactagtatctacaaatttactctttatctttttcaattacatatctagaaaataccattgtagctgtagttttcctaattttatattatatcaataattttaacacaaatattaataacctaaaaagttacaattactataaaaaaaaaaaacgttcaaaacaagaattagttgcctagttataaataatacaactatttcttaaagttttctaaatgagcattgctattaagtatcttaaggtgctcaatactatattgatatggcgtattataagtggttagcaattttttatattatttattagataaaaaagtatgaaacgcaatattaaattatattaatagtggtaagccatctcttatagtgcttggtacattaagttgttccaaaacatttctctttcttaatatgtccataaattccaagttagttttgattgaaataaattttccaaatatatcatagaaaataattaaaataaaaagaataatgtgtttgaaacacaccccaaaaacacacaccacccgaaaattttgaaacaccattggtttataatactaggacccatggtcatatggtagggtgtagcacataaaatatttcatttttatgaataaaaaagcgaactggtcaaaaattggaattttaggagtgttgaagagaggcctagtcattttgagcgtagcttgatgtgtgcgattgtgactaagacatcaagaggagttttgggaaggaaaccaacgatgttttatataccaattgctgaaaacagaccaaaccttcatatataaaaacagagaataactgaacggttcaaaaaaacacaaaacaaaaagaacccataacagttccaaaaaccatcaatacaaccaaattaggttcaaaatacaataaaactaacaagaatcaaatcaatggaattcaaagagcaactaaaaagatctcgcacccctccttaataccaaatacattacttgatatgaagtacgaactctctcgtcaaaatgttgttgaggtaaaaaatttaataaatatcatctcctttttactctatactacatgtgttccgatttttatcaggcacaccgatacaccccacatttaacacgggtgtaatccagtacaatacaaccatcataaataacacttgcacacaaaaacttttggaaaattctacaatgcgcccccttaaaatgatacattgatgtacccttatctgttttagcacccgaaa

SEQ ID NO: 84219 - DNA, 654 bp, Cannabis sativa
  modified_base (586)..(586): a, c, t, g, unknown or other
tggttttttaattttttttttttagtgtaactctatttagttataaccttccaattagaatataatttacttgatcccaagtgtattcttggatagagattctactgtatttacaaagttgtatacacctaaaaatttcaaccaaagaaaaaatagtcaaatctatataacaaaatcataatactaatacttgtaaaactaaaaatattctttagttatagaaaaatccaactcttaatctggagcacaaatcattttatagatctaataatcttagtaaagaaaaatctcccatattagattgagaatgtagtaagatgaaaaaagtagaagagtagagaacaaaatgtagccctatatgaaccacatcataagagaagagttatattggtggagatgaagaacaaactagataaattatttttagaaaaaaaaaaagctaaaaaattcagtctttttgtaagaaaccttttacatttctaagagctaacatatgtccttaatttaatgtatgcaatcacataatagttaaaataaaacttgaaggactcgtttggaacatcatattaggtcgtattgtattgtnttatattaaattagattatatatacagtagaacctctatccaagaatacacttgggatcaagtaaatt

SEQ ID NO: 84220 - DNA, 784 bp, Cannabis sativa
ggaagttccagagtagtgacggaaggtatttttaccgccaaaaataggacttaggtatttatctgctactcgacataaaacttaagtatttatgccgcaaattactctatttaaaaaaaaaatccacttctttctttcttcctatttataccaaacaaaatatcaaatccatcctctctctcttcttacttatcctccctcctacataatcaatctctttccatttccatcctttcctaccaaacaaagccttaaatctaactaagactcaaacactctctctcttctcttatcactcccaaattgaatcaaacccaatttcttcctctcacagggctctaatggcttcactttcaactcttcaatggtttcaggtaagctcaatattattattaacacaaagggtcgttcccaaaatctctcattgatattgttttggcttttcaatgtagccctcgatttctggttcaaacttttatctagtggtgttcagacctgaatttaggtcaagtaatgctcgaatcacctgcaactcatctccatctttctcacccaagtttgtattgagagccattgatggctcagcaacctctgccagtgctccccgagatgaggtggtgaagaagaacaagattttcaccaacaccattgccaaattcccaattttggtaaaaaagaagccttttttttttttcttgtttttgtttctctttcttatttttaattttgtgaaagaaaagttttgtgcttttggttggggtttatgtgtagatgagacaacaac

SEQ ID NO: 84221 - DNA, 1031 bp, Cannabis sativa
gaaggtgctaggcaccattggtgtctaatagcaatgctctaaaataaaattaagttgttgtaatctttctccattcccataataaaattcttcttcatttattttaaaagtttcgatcccttttatattttcgactgtaattttaccacaacatcctaacacactacaatctcagagcgatacatctggtactgaatctgatgctggttatcaatacgacgttctggaaacagttctaggcgaaagatctgactatcaaagaggcgtgggtaaaagactcaaaggcaaaggaaagaagtcatttactcaaagtcagtcaacggtgcctcctccgccatctgctgaaatgatgaacactgtggcagaaaacttctcaactatgtgtgccacatggggggtaatttgacgcctgaacaacgtgctcatttatataacccacgatttgagaactttattcaaacatatagtcaatcgcagtcgtctggtggttcgtcttctcagagttatgccgctcctccacaacatcaacaacaacctccttcacaatcacaatttcagtcttcttcgcaacaacaatttcaaaaaatttcggagcagcaacatcaatcttttcctcaacagcaacaacagtctcgtccactattgggaaatcagttcttatatagaacaccatcagagtttcctatgctcggctcaaactttgctgattttggattatttgggagttcgtcacaggagcaacaatttttttcaactcctattttttaccaagctgaactggagaatctaacactaggtttatcatcagatcaagcatatgttccttctttgccacgggcttcgggaactcgtaacgataataatccggatcaagacgttataattcgagaccttaatgaagatgttatggaataatttgcttgtgttttttaataatttagtttaattttgagacaatattgtaatagaattaacgttaaagtaatttattttgagataattttaaattattaataaattttattggattt

SEQ ID NO: 84222 - DNA, 1217 bp, Cannabis sativa
  modified_base (1156)..(1176): a, c, t, g, unknown or other
gggtttttcatcaccttacagatgttcatgtggcacactatttattcgcaacaataccgcattaccatgtaaatgaagccaccaaagctatcaagcctatattgggagagtactactattttgatgacactccaataattaaagctctgtggagagaggctaaggagtgtgcttatgttgagccaaattatgaatcttctcctaacaataacaaaggtgttttttggtacaacaacaagttttgatgattatcaagtcaaattatatatcaaaatctattatacatgttttattgtaagtgcatgtcttattattgataaaagaataaaatattaaagttgagataaaaaggtgcctctttgaaaaatggacagaaaattaaggcaatttggtaaactctctagtttattatttttcatcacagagaaattaatttttttttagaattttttgcggctaaactctctcaacttctattttatttacacttattaatcttttaagctcaaattttagtgtgaaaatttgccaaactattatattctatttgtattttaaggtgtcgttctataaattccgctagtttattatttttctgacatggctagtgacacatcaccattagggtccaacgtcgctcgctgcctttacctatttctaaagaggaaaatattaaattgtaaggctattagcctaataatgtttggagtatttttagtattttcttcttaaatgctagttttttcttaacacaattatactcgttgttgactcaaaaatttagactagacttttatgccacacctgctcgctagattgagcagaaaaaagttttaaagtaattaatgaggacacaataatttatagtagttcaaccctatgtcttaataatattagggctatgtctacttcgtgtttttattctcacgagatggtgattacaataattgtttaagaattagaaacttcaagttctacagaaagaaagtctagagagagaagctctaactttgtgagcacactacaaaaaactactacttttagtgacaattttttagtcacaacataatttgtttgtgactaaatgtgacttttagtcacaacaaagtattacctgtgactaatttacagtatttagttacaagttgtcactaannnnnnnnnnnnnnnnnnnnntattgtgactaaaaatacattatttagtcacaacaaattgt

SEQ ID NO: 84223 - DNA, 625 bp, Cannabis sativa
ttaactgaaagtatatatacatattaagagaggagtattattttgataaaaggaaagatgacaaactttggtctatggattgtatagccatctgagcatagtttgcaacacctcctgaaaaatctagtaaaatattgccaatactaaatccatctgtgctcttcctgttgaagttcatgaatgcctacaatacatttcatagagtaattttgtcatacatggaaacaaagttggcgttcgccataaaagattcatcgaatttcagaaaagcaagcgagaaaatgtctttgagttgagaagattaagcaagtggttttacagtcacaagtatagactaaacagaaaattaataccctttccctttatcatgactgatacaagattgagctgatatacaaaagtaaataagctgtttctcaaaatgattgggagaactataaccggaaaattgagtcctgttttatgaagtttgtcccaagtaatattttcatttcatgttttctatatgaaaagatatatgcaattatgcaaggatgtctataattaatggcataaagcctacgaatgggactataaaaaattcagaagcaccaaatctcttatgacaagaataaaacaatcaaaa

SEQ ID NO: 84224 - DNA, 921 bp, Cannabis sativa
taataaaccagaaacatcactcaaagctagacaaagattaatattaactacaaccaattaatgttaagataatgctcgaagtttattcttgaaaacccagctgatacacttggaccaatgtaggaccagatatctctaccgtattctacttggaaaactaacaaatatatagaaaccaaaaagcgtgcaacttaaagtagaattaaaccacgtttttggaatatattgtgactcaaagtttaagacctcgtacttcccagaactttgattcttcgctaacctaaatctaaatgttacttatttggattcaaaaacataagactatgtatagatattcacttaacaaacttatataataaataactttcttggctatatcacttcaattatatctatagtttttggctcatcaagtacttgtactatagataatagataccacaacaaacaatatgcaactgaaaattcatgttcgtggacaacttaaataatacgtttctacttaatgatttcatacagtcaaacataacaaaataccatattatataatctatactataataacagctcaatttagacatcattgtcatctttggcacataatataaaataacttcttttaaggagaggtaaggtagattggtagagttttccatgaaaatagctataaccatacaaagatagtaattcatgttttataactttgtgagtttgtgagtgtacaatggcaaagcattacaacagaggagtttaaagttgggataaatatataatacttatttaattttttgagatgaatcctcaagaagctatatcatacttcacatgcatgttagtctatgtatacacatataacactataaaaaactgctacttttagtgataacattttagtcacaacataatttttttgtgattaaa

SEQ ID NO: 84225 - DNA, 948 bp, Cannabis sativa
  modified_base (468)..(473): a, c, t, g, unknown or other
  modified_base (885)..(908): a, c, t, g, unknown or other
tcctgactaacactgaagtagttgccaaaaagtatagaatctagtatcccaagaggagtagacatattgaaaggaatttcacaatatcaaaggattttcgattaaggatatgtaatggtggaggaaaggttgtattgtatacaacttgtcagatcctattactgagagattactacatactacacttgatcttgatatcaaggtgctaagatcaattaaaatgcactttttattttacattagtgcaagtggaagtttgttgggttttgtaccttaaataaaacccatttcaatataatcagattactaattaataaagatcaaaactcattctatgttgcatggttcacatgatttacttcatgattatatttaatgcatattttctataaagtacagaacatatgtaaatatatacatattatttgttcatgattatagtgtcgtcagcacagtagaatataatcnnnnnnatatgttcaaaagtttaattcccgtgtttattgattcactggatttagactgacatgataatcaacaataaggtatacttacatcttggatgagtgttatgtactttctagggtattgacaaagtttaccagtatcggatgtatgaagtatacatgggaagggactgatattgatcttggataagatgtcgtacacttaccgttatatctttctaagtcaatatcagggttgatcttaggtttatgaatcttaattctgatattgttaggttcaacttagttgtattatttatgtttttcaagttgttcgtggatgctaactgatagttctggaggatattatatctagggaacatggtagttcaattgactgggagcgctaaatacagatatagaatctatagcttctatnnnnnnnnnnnnnnnnnnnnnnnntttccttcgagcttggctgaataagatcggaagagcggtt

SEQ ID NO: 84226 - DNA, 1041 bp, Cannabis sativa
cagtgtttccctgtaaaggatgttaactaaactcccgttgtctaccgacaccccttttatcctcttgttggcgagctggatggtgatcaccaatgggtcgacgtgagggtacctcacgttcttttcatcttcctttaaaaatatgatcagaggctcttcagtttttactttcttggaaagttctggagcaaatgcagactgctcgttcttcacttccttcacatacctcttttgggcattattgctctctcctacaatatgtggcccttccgagataacaaggatatcctctccttcaataggaggaggttgtaatccctagttgccagggttgttgggcgatttagctggttatgtccattgccctgcctctccacatattgtttgaagtggccttgcgcgatgagactctctatctcatctttcaactgtcgacactagtttgttgtgtgcctgatgtcttagtggtacttataatatctatttggatctcttttatgctttgcgtgcctcatgggctcaagtttactgaatgcaaccttgtgctcatgcacgaggtagatattctcccaagtttcattaagctcgatataaatggtgtaaactggcacgtacttatcgtgcttcttttgtttcttcttatctttagatgaccccttagagtcgtctttcctttttgagccagaggcccctaggttatcagctttagtcgagacagtacttgttgaagcaatgctggttttgcttcctgagcaagtttttagcaagttcatctctttctgagcttcttcctttcgaacaaacacctgagcccttttgttgaactcagtgatgtttttcaccggacgaccctgtaggcgtgctacagtttgcctccagcagtggagagatcagtagtgatccccgcctgaagggtagtaagctaggtactatcatccaaatttcttactctcgcagcagccttgctaaaattactaaagtacgctttaagcgtctcgctaggtttttgctttatgttggtgagtgaggacgcttcaggtc

SEQ ID NO: 84227 - DNA, 1039 bp, Cannabis sativa
tgtcgtccaggtatatgtgtacggagccttagtccccttttaacttttttttaagaaattactatatattatttttttaactgttttttataactagatactctataaatatatatattataaataaatttaaaattagattatattttatacatttgaaataagggccggccctgaaaatatatgggcccaagacgaattaaattttgaggccctaaaaaatatcaaaaagagagtgttatgtgatttgaaccatgaccttagacattatcctcaacgaactaagctatgaatatttgttgcttataatacacttaaattttacttaaataaaagtctaataattttttttttatttttttattttgggcccccgcaaaatgtgggccctaggcacgagcctagcccgcttatgcctagggccgacactgtttaaaatacaattgaactgtattgaatttaattttattattatttttttaattaataattaggtaataataactccaatacacaactctaagcaacattattgtatctcttatattaaatatgactatttaagagaaattgttagtttatttttttaaaattttccattaaaaatattgatagttaaaactaacaccgttaagtcaatcaattaattattttttttttaaaaaaaataactttaaacacttaaatttaatttaaaagtatcaataaaaattagttaattatttatatatatatatatggatcttaatttaaatctctcttatattaaatgtggttatctaacggatattgttggtttaacatttttttttcgttaaagttaaccggttaaactaacaccgttaaatcaatcaattaatttttttgttgaaaaaaaattagtttgaaatatatttaaatttaatttaaaagtattaacaaagttaaagaattattattttatataaatcttaatttaaattagacattaattcaattaattaattatattttataacaaatttattagttatattattcaattaatcaattataattt

SEQ ID NO: 84228 - DNA, 1901 bp, Cannabis sativa
tgatttatatatttcttaagtgttttataaaccctaacactatcaagctatgtcttacattcaatcataattctaaagttattgactcgaaattgagttacaaatttaagttacagcttactcgaagtgggtcctgcagatgtgactcaagctctgaaaattgaggccgacctctaaaatttcaccattaaatcatcatctacgatcaaaaatagcttaaatatatttttccatattttttggatttattattattattttaataggacatccttccctataaaaggagagttccattagctcattttgaaagttcaaaaatgtacctataagctcaaagtatctctctctggtttctctctctaaaaatttgagtttccagacttagtcattttttaatctatttcgtgagaataaaaacttgaagtagacgtagctctattagtgtcgcgatacagggagtaaactattgtaaatcattgtgtctctcttatttacatttaactcatactacatgctcgccaatataataaacgggtgtggccaaatatctgtgtctagatttctacgtcaacaaaatctaggaacagacacactgctaaagttgagggggcttaagccccactagaaaaaaaaatagtttaaaactatataaatttaattattcaaatttttaaatattcattcaattatttgtaaatctaaatagaagtccccatacacattctatacaaaaatcaagctccacatatttcaaaatttttatttgtaagaaataagtgggtcagcccaaacaaaaacccaactttacaatatttactttattttataaaaagaaatgaaataataaataaaaacagtttccatgttgtaggaagttaaaaaactaaaaaaaattacttgacttgttgcagagaaacaaagggaacagaacgaggaggatctttttccaaaaaaaaaaattgaaattctacaattacatcaataaaaaattagggattgaagctacaataattttacaaacatcaaactttaagatttgtataatacaaatatatatattaatttcacattgtttataataatctatttggattagggttaataatttaaggataaattcttttccttgttattgtgttttaagtttttttatttcttaatcttcttaatttattatttataaatatttagtttatttgaagaaatagaaatttgaaaagttagaatttaaagaatttcaactatttggagaactgaaatttggggccaccacactatgaaattgcaattttttttttttgtcaatcatataagtatatatttcacaaactgttaaacctcttagacatagcagaacagaagaagagaaaacaaagagaagaaaagagagaaaggcagagaaagaaaaggatgaagattgaaagagtaatcttcttattatgaacaatagttcagattatatacaagtgaacaagaaatagaatacaacaaccaaaatcagttacaaccgaaaagagaatgattgagctgatgtacagctggagtaacaaactaacagaaacagttagaatcagttggtaactgaagttggttgatcacttgtcttgacagcccccctcaaacttagaattgaaaggtcctcaattctaagtttgtctctgaatgaatagaatctcttgcttgaaatggctttagtaagaccatctgcaatttgatcaattgtaggcacatgtttaacctgaaccattttactctgaattttctcacgaacaaagtagagatcaagctctatatgtttcgtccttgcatgaagaactggattggctgtaagcaaaatcgtgcttagattatcacaccagatggtaagaacacggggcagtgatatctttagctctaag

SEQ ID NO: 84229 - DNA, 642 bp, Cannabis sativa
agactattatttgatttattttacatacggagtaatagaaagaatattaatgataactaagtgatatacggtgatgatatcaactttaaatatagtggtaactacaagtaagatacgatgataacacttattttaaaattatatgatgattttcgatataaatttattattttctttttattttacatctatattttgtgtgagtattatttaatttttaatagttcgtcgcttaatatacatttgaatatattttttatgtgtttttattttttatatgagaaattgtatggagaatttttttaaaattctttagtgttttttatataaatttatttattttttaaaataaatatatactttttaaattacacaattttattatttaattaatatatatacatataatttttaaaaaaaattataaataagcagcctttttcttaattaataaataaaactattaaacaaaaaatcagatatgagcctctcctcgtagctttgtgtagttatagtttcaaccctttgaagacatcatcaatgactcagaatttgtccttacccattgggcaaaaatggaggccatctctaggcggcatcgccatcgtgatatgtgtgtccaaacaatataaatttgactta

SEQ ID NO: 84230 - DNA, 834 bp, Cannabis sativa
ttcttgaactatcatagcaaagactcgagagaggttcggcagtggttcatttaacaagatttgggctcgaaccgaggcatatgactcgttcaagccagtgagaaattgcaagacttggtttcgattgtaatagtcaagaaatatcttcattgcaccacaagaacatgtagtattaggctgaaattctttcagctcatcccatatggatttgagtttcgtaaaataagaggtgacggaattgtcaccttgttggagacgagttagctgggtttggagctggagaacacggggtccattgccctcattgaacctttcagctatatcttgccacatatcggtggcttgatcaaagtacataatactttgagcgatttcaggtgaaacagaattgactaaccggacatcaccatattgttacaacgcaaccaagatgggagaagagtgttaccagattcaggtcgtgggattgagccatcaatgaacgcaattttgttcttcgcagcaagcgccatcatgatgccacgcttccaggattggtagttgactccagtgagaacggtggacacgaggaccagcccaggatgatcaccggagctgaggaagaaagggcttgaggcgtcgtcaatggtggtgcgatcagaggacctgcgattagggattggtatcgcttcgtttcttggagattgatgatcagaggcatcaacgttgttgtcggtgatgttgtgagatctggatcttgaatcgatctgaggaggattagcaacgggaccagttgcaggggcggaagtgacatcgggattgtccgatgaggggtgatctgtagtaggtggtgga

SEQ ID NO: 84231 - DNA, 570 bp, Cannabis sativa
tagttttcttgttgtttttatgaaaaaccgtaaaaatgtaaaaaaaattattttaatgtaataatgtaattttttaaaaaaaaataatattttatgtaattattcttaatttttatggttaacatgtgtatttaagtataagttaactattatatttcttaaaaaaaaaaaaagtataaccattatataaacttaccctaaactttttggtacgtaatggaaaaacaaaaaaactaatgattacaataaaaattaaatatcaggtatttaaaacttgtattttcagggccaatattccactagcttatcaatattaatatgagctgacttatcaatattaacatgagctgcaagacttttgctaacaatgaaggacaatggcagtggtgaaactcaaattaaaacattgccatcaaacactaatgatattcaaacatcactaaaatgtgaactgacattaaattgcatcatataatagtgttggacacataattggtgcccttagagaagagtggttaaaatactactcaatttacatttattttatataatatataaataaaatagcgt

SEQ ID NO: 84232 - DNA, 865 bp, Cannabis sativa
tttcaagtcttatggtatttttgacaagtgttgctcaagctttattgtatttgtgatagtttaattattagtgatagtccaaacagtaaaaaccacaccacactattagtgtaatgaattcttattattattgaatgagaagaagtacagtatttatacaaaagatgtaacaagattattgttacaaaacaaataagtgggaagctgaaaactaactaacagaatgtctaactaacaataacagaaatatgttatcctaatagcccccctcaagatgagcagtatatgttgatggtgctcatcttgctcataagaaatttgtgttgagtaggaaacagagctttggtcattatgtctgcaacattatgccgagaaggaacatggatgagcttgatgcgattgttggtgacttggtctcgaacaatatggcagtctatgtcgatgtgtttggtgcgctcatgaaagacagcgttctcggagatgtggagtgcagcttggttgtcacagtatattgttgcaggggttgaatgtgaaatgccaaagtctttgaggatgttgaagagccataggatttcgcaagttgtgttagctagggagcggtattcagcttcagcaggtgatttggagacagtggcccgcttcttcgatttccatgatatcaaagagttgccaaggtagatacaataccctgtgatggaacgcctggtatcagggaaagtgccccagtcagcatctgtgaaggcgtggagttcgaatttgttgttatgttgtggaatactcgagctgaaaaataagccttgaccaggtgtgcccttaaggtattgaagaattcgcatggcaactttcatgtgaggttgtctcggat

SEQ ID NO: 84233 - DNA, 869 bp, Cannabis sativa
catctattgttctattaattaagataattaataaactcaatagattccatggataatcaagtcagacgtatagaatgaaccttttcatttcatatccttatcaatcattgatcacttgtcataactaattgattctcttatttaagattatataattaataagaatatttatttctcatttctcaaacgatactacaatattttcttcaaattaattatctcttacaattttaaattctagcaaccctttcagaatggattcacctcttaaatggtcttttaaatacactctcagcatacttaatacttccactcaattagacagtttcttatgaatagtcttttaaatatagttttagtatacttaatgctcccactcaattagacaattacttatttatccatcgtctatgatcattttaattaagattgttcttaattttaatttgaaatttattacttgtttaatctcattatacaagtatcccttaatttcaatagttaaacaattatgatattcaaaacttgtatctctttgactatttatttcaaattgtttatccaatactttataacattcctatttcctattgtattattaaatccatatttaatactatttttattagtaattattaattagagatatctatcactatattctccaagaatatttgatatctaataattaataatttattatattatttgaattcaatctcatcaaaatttaaatctgaatataataacttagatttctatcttatgaagtcaatgaccaagtcatccttcttatcatagatatttaatagaactttctcatataccattttattgattattgtaatcaatataattttagtaaggtt

SEQ ID NO: 84234 - DNA, 610 bp, Cannabis sativa
ttttaaagttaagaagaaaaaatacttttggaaaaaaataaataaataaataaagtagataaaaaaaataataatatattttttttctagaagaaaatgaataatattcgtataatttagacttttggcatatataactaaaaacataaatatcaataaaaaaaaggtatagtagagactaataattttttaaatttcggtatgcttaccttctgtatggataattaatttaatgtttgttttctatgtattattttcacatttaggtatatatttgaaaaaagccctttctaataatattacaaaagagatgatgtattatgataatttcttccacaatagtgttggtgcatgccttttgacaattctcgttatcttataccactcccatttgtgtactgtgtagctaaacttttacgtacaaaatcaaaaaattaagtaaatgtacagaatgatcgacttaataacatgcttcattcagtctttaaatgtaaatgaataatagctatgtacaaaaagttaggtggcgtaattggttgaaggtaggggtgttcacaaagtatccgatccaattcaatccaatccgcaaaatgcggatatttgtacttgt

SEQ ID NO: 84235 - DNA, 590 bp, Cannabis sativa
ttatttatgtttttgttgctctgaaatgcaccaataatttatccatggaaacatttaatgatgcaattttgtttttcttgtagaataaatttttaattttagtattggtcaggaaatttgtatgttgtgtcatgctcatccaagtttattatttatttatttatttttgtagggatgataggctgagtagctccaagatcaaaactgtgatgctgtagtcataataatgagccaaaactatataaagtatgcttaaacataaatgttaagcaatgcaatgctctttttgttgagagtgactcgaaactagttatcaatgtcctcaatgggaaggagccccattcccattggacccttgagaactatgtctacttttgtttgaaatccactccctcttttactagttgtaattttttatgtgttagtaaacattgtaactttgcaacccataatgtgactaagtggacgttttcccaccagatgtatggatgtattctggtccccgctttgccggagaacctactttgtaataacttagtttcttaatgaagattcacgctttttttcaaaaaaaaaaaaaaaaaaaaaaa

SEQ ID NO: 84236 - DNA, 677 bp, Cannabis sativa
tatataagtaggccaatattgaaacagtggccacccaacaacattaatctcatattccccatcaaaacccaaaagagtttttcttcattgaaacacattgagactcagcacacaatagttaccatattagtacatttaggaaatatatgatcaacagtacacacaactgtcacaattcaatcattcaccataaccattttatttacatagcacaacgcaaattatccaaaattatagcaagacaaatatagaatagacgagcgtaagcaaagtaccaaattgagtgagggcttaatatttatatttatagtaaacaaaaacttaaataaaactaattaacatatgaccaaccagttataatccttatccacacagatggccatccgacatccaccaacttcccgctcgcaccaactgaggtcgaccacccagttagaagcattgccgaatacatactagccagagagaaaatgaggtggaaaaatgaatacgagtatgatactggcttagacttctctttctcttcatgctcacctgccttgtccagtggaagcagaggcttctcagcaccttttctcacatggaaaaccacaagtcaaatttcaacagaaaagcaaatatacataaagaatgaagttcatatttgataatcttaattagaacagtgggaaaaacaa

SEQ ID NO: 84237 - DNA, 1105 bp, Cannabis sativa
aacattcattttctaattaaatttcagaaaagaattaagggggaaatttgtagaaatgtatattatatatgctgataatcataacaaccttgcttttacaattgcatccactgttttctgttcttgaggactgaatctgtccttccttgtgtctacgcttcttgtcacctaattaatttgcaagagtcctatatataaatatttttaaatatataacatatatgtatatttacatacacagcgataatatgtatagctttaagtaattacctgaccatcagcaatgatcacaagaacatgatattgaccacctttgctatccacaatactaatagcattctcaatgatcggagcaaaggatgtcggcccttaaatacaataataatgtataaatacatatatgatctatgcatatccatatgtttatatgtaataagaacaaaaaattctaataattaattaaagtacgtaccagataaatttatccgaggaactaattctctgtaacgagagagcaattcctcaaagccacggcatggcttatcttcaggaaagaagctaaaaacatctttatcatgagtcgatgctgtatatatataagatgatagaaattaacgatggagtactatatatacatgatacgtaataatatatttataaatactacgtagtactcacaatcaccaaagccgtaacaaggaataaggttgtcctcgtcgaatgtggaaagtgtcctgccaatgattgagatggcttgttcataaggattaaggtcttgtccaagaaaatgaaggttctttctcccgaaacaccttgctccagtccactcgttgctctttgtgaaatcaatcccaactatcagatttgaagactccaacccagcttgctgaagtgcttcagccacctaattaatccaaatatacgttaaaatgtagaagtgtgaggttaaggtccatcaaattctcacgaccaactcacaataaaaaaaatagtcgatgtatattgatattacacgtattatatatagctattattacctcttcaagagaattgtagttgtcaccaattattgagtaattctctgatgagcgcgttggtagtactc

SEQ ID NO: 84238 - DNA, 625 bp, Cannabis sativa
aaaaaaaaaggacgaaagattatgaggaaaaaagccctagaactgtatcagaaatctaataaaattgacttgtggactatgcagaatttttaactgtaaaactacataaaaaaacccttgtgttcttcttatttttctttactgcttttattttctgtgcaaatccatcacgatttaggcttaaatatagttaaccaaaatttgtattaacaatactatatatttcttatcagtttctaaaatcgttggctagtgtcataaaagtgcaaaacattaaaagacgatttataactgttggtaaaaattactttaaatgacagtttataacagcgaaaaaaaattactttcaatgactatttataattgttgacaaaaatattatatagattaaaaaatatgctagtttattatatattaattattatctaataacaataataatataaataaatttatataaaaaaaataatataaataaaaattaaaaaaattaacaatcataaaatttagcagacaaaatcttaattcacaacaacaaattcttaattcacaaacaactaatttttaattcttatattcaactcaaataattacactgaatagcaaataaattatacccaaataa

SEQ ID NO: 84239 - DNA, 967 bp, Cannabis sativa
aaacacaattacataatatagacattaatttctccacaattcacattaaaattcaagcttaaagatataaaaataactctaaatcttagagttatcagtcatcctaataggaattaaaccagggaacaaggaactactattttttgggaaaagaaagagaattatacgtattattcattttgtaaaataatttattgtattctgtatacaatttatcaacccagaataagtggactcgtggacgataaaaacttaacttcaaaaccatgtaaaaaaaaccctcttgtcatttattgctattattattaacttattacttaattaatttcggtactaaaaggcttatttaatagttaatgaaaatctgcgttaataggtttgactgatactttctcactactcccattgcgtagcagatgtttgttctagtacacaacatttcatagatcaaacttcttactgcaggtgcataagaaattcttctcataacctctatctattctaaaatagttgaatactactccttgtatataagaactcaatgtttggtaggcaaacgacatcctgatttaaccgtagaaaatcactctagcaccttatcaatgtaagttgattgtaagagagctaggaatttgttcttgtggtatcttattccaagaacataagttaattcactcaaatctttcattttgaattgagtactcatccattcccttacagttaataatttcttaatgagatatcatctacataaagtatgaggaataccattgcttggtttgtcctttgttgataaacaaagagttcatcaatattttattcgaagctataggttttgacgagatctcattaaaatataagttccaagaacgagaatcttgtttaagtccacaaatagacctattaaatttacaaaaattttcttcttgtccattgaaaatgatctaagaaatggttttaagttgtg

SEQ ID NO: 84240 - DNA, 614 bp, Cannabis sativa
tacatgttacaaccaaaaggttttaaagacccaactaagcctaatcatgtctgtcacttgcataaggctatctacggtcttaaataggcaccacgggcgtggaatgacaaactcaaagctacacttcttgactggggattcactgcctctagagctgattcctccctcttcatctatctggacataacttgcttgtgtttttagtttacgttgatgatattcttattaccgggcctaataccactctcattgacaagttaattactgatctaaatcgctcattcgagttaaaagatctcggggccattcactattttcttggtgttgaagttcatcgcacctctgtaggaatgtatttgtctcaaagcgaatacattactgacttacttgtcaaagttcaactcgagggagcaaagccatgttctaatccaacaggcagtgctcacaaactatcacttcatgaagggacaccattcgaaggtcactccctgtatcgcagtaccctgcgagctttacagtatttaactcttacacggccagatgtggcctttatcattaacaaactgtctcaattcattcatgccccaactagtgtgcactgggaggcatgcaaa

SEQ ID NO: 84241 - DNA, 907 bp, Cannabis sativa
  modified_base (529)..(534): a, c, t, g, unknown or other
agaaatctggagtcagatctacgggccttggggctagtagtggcggcggggtgctggggtggattcatctccaatcgtagatcagcgaaacacatttttcaagcgaatgagtcgaactaactccggacttgaaagagtagtagaagaaagaagcagaagaagaagttgtagaagtctttggtaaatcaccaatttgaaacctctgcactcagcgactgaaatcgtaatttttgattggaaagtagcgattgagaacccaaatcgttctttatgccttcaatcgtcgactccaacccagcgaaaaaaatcgattgacctctgagacttcttcatcacaaagctcaccttatagtcattcagattgggattgggagagtgaaatggaagagtcgattggttttttaaatgagtaaagtgtcgcacgttgtaaatgagttagggttttgagggtttagttttatttatatatttttgaaagttaacgggaggatcaaacctacgttgaatttaacagaatattttttatttnnnnnntatattatgttaaaccaagaaatgtcgttagataggtacttttaatgtataaagatacctcatttattaataaaatttttaaaaatgattataaaaaagagagaagaaactgacccaaaaatattggtttcctcttgatttcctttgttgcagtgctctagcattccaaaacagagaaaatgactaaaaaagagagaaagagaggccaatttttaaatatatataattagatatttctcaagtaaataatcacaaaaaagaaaaaaaaaactcagaaaacatactcacccataaaattatcattaaggtggtgatatgtaggggtagatttaaagaagcaagaggagatggattgatggtggtaggggcggag

SEQ ID NO: 84242 - DNA, 614 bp, Cannabis sativa
atttatgaatgatttgcatataattgatgtcttgttatttttctatttatttatagttatctttttgttattttatagttattatgtgtattattatggtgtatatttttagtttattctacacaattttttttgttgtatatatgcgcatttgttttgtaattttttagttgttttaagtgatttcgagaatattttttgttcaacaattattttttatttgtttttttatttatgtgtatttttttatggtgtatatttttagttttctctagataatattttttggttttatgtgtgttgctttatagtttatttagttaatttttttgacatactttattaaaatataatgataagattttttattttagttggtaccatgtgcaacagtagttattaacatattaattatatattacccattatattgtataccacattttgaaatcatgagattttgttatttctattactagtgtaattatttatttaatttttaaaaaataaattattattaaatcaagttgtcaaaactaagtaaaaaaattcgtaatacaaaaacatattgaggagttgatatgaatttacatattgcaattaggtcattattt

SEQ ID NO: 84243 - DNA, 749 bp, Cannabis sativa
actgttcaatgccaagtattacaaggagacagttagaagtgctaaaagaaaagaattcacccagttgactcagaaagagattatgaatgttattgaatatacgactcagtttgatcgcttgggaaggttgacctcgggaatcattacaaccaatttcagtaagaaagagaaatacctggatgggttgaatgcgtagatcagacacgacttaatgatcactactgatgacagcacgacctatgctgaaacggtggataaggcactgcgagctgagggtgcagtggagtgcaccttagagtctcgtgggactccggttgttgatggggctcctacccctcctacatcaggctttagcaggggaggtagttgctcggccactgatcagaaaagaaaggcatctactacaactagtggctcaggttagaataagaggttctaggggaacgagggttgaggcaatcgccagggtggcaccgaaacccgatacacttacccagagtgccccaattgtagaaagcaccatctggggcgtgtaaagggcaggggtgctttcagtgtggtatgttagggcattacaaaacagattgttcccaacttaggaccgaagcaccgaagactgcagcgaaacccactcctgcaagggtgtttacgataacttaggctgatgcaaaagccaacccctcagtggtcacaggtcagctctcggtcaacaactcttatttctttgtgttgtttgactctggggccac

SEQ ID NO: 84244 - DNA, 836 bp, Cannabis sativa
gttacccaagagtgagatgtgttggtggtctcaatcaacaacgaaaagtctattagcttattgtgatcagattttaaattttaagcttaagattaaaaatgttgttttattatatcgtatttatatttatatatatataatattgttatttgttttttttaattacaattatttaattcatgttgtgtgaaaatattttgaaatttttaaaagtacgataatttttaattaatattttgaacattaatttttagtttatttttgaattaacttgagaacaatttgcagttagataatcaagatttcttaaacactgatatattgtattcaatatttaattttaatttgcaataccattatatacattaaaaataatttcaaataatacctaataatattttttctttaattatttattgtattattatttttaaataaagtaaaaagtatctagcataaaactaattatacgtgcctcgcacgtaactttcttctagtataataataagtgccaataacagtaagattctaacacattagtttatgcatgcgatatgctacttgatgatggtcgagaagtttgcttggagaggcgtttgtctattcgcttttgttgtttcttagaagactcctggcataaggaggcaagtcgaaaaatgggtattgaaactaccacatcttctgtaggtatgatcgcggggttggtaaaagaaaggtgcgctctttgggtaggccgaggacgtaaggaggcaagtcgcagaaggtttaacctcgtgaaagtggtaagatctgatttggtgacccgcgagactaagtcctcgcacgaaaagggttca

SEQ ID NO: 84245 - DNA, 1139 bp, Cannabis sativa
atagttggacttgtttgtgcaactactgaaagaggacctggatgtacaagacacaagattgttcacattcatttcagacaggcagaaggggctggaaagggctgtagcagaaatttatgaaggttctgaaatacgtttttgtgttaggcatctttatgccaacttcaagaaggagttccctggattgttgttgaagcaacaattatgggcttgtgctagagctacaacagtgaaagatttcaaaaggagaatggatgaactgaaggagactaatgcagcagcttttgaatggttgtccaaaaagtcaccatctgaatggaccaagtcccactttaggactttcagtaagtgtgatatgttgctaaataatctctgtgagagtttcaactcagccatactagatggaagagacaaggcaatcataactctgttagagtatgtaagatactggctgatggatagaatgagaaagcaaagagaaagtgttagtaagtggacaaaaccagttgggaagagaatctttgatatcctgcagaagaataggaagttagcaatgaaatgtcagtgtacaaaatctgttggaggcttgttccaagtgacagtgtctactggccaggtggaagcaacaaatttggagaccaaaacatgctcttgcagaacttatgacctcacaggtattccctgtggtcatgcattagcttgcatatggtattccaatctcagtgagtatgattttcttgctgaatgttacaagaaagaagccttcttagcaacttatgaagggtcaattgcacctatgcctggtcctgaacattggcctaataaaggcctgaatccaatccttccaccagcagaaactgttctacctggcaggcctaagaaatcaaggagaagagaagtagatgaacctccacctggtgcaactaaaatgaggagattcgggcagtctaacaactgttctaattgcaaaaaaccaggccatacaaagaccacttgcaaacaaccagtacaggagaaggtatattatttcattaatgtcaattaactttgtattgatttttccatggtatacatataacctaacatttatcatggtatcaggaacctcctcagaagaaaaagatgggtcgtcctcccaa

SEQ ID NO: 84246 - DNA, 1502 bp, Cannabis sativa
taattgacttatgcataaatagaacccctcttattatatttcgcaagcttgatgtattctaccttctcaaatgaatcttgctaaaacttcaagtgtttgaactccattcgatatgcttgaagagtgcttgcttccacctgaggcaagacttgaaatactttctcccgaaagctcgaattgccaccttcttcatcttttatcgcctgaaaaattggcctattaaaactcctcatgaaattaactttttttgtgacttaaaaagaagtccaacttgaaaagaagaatgtttctatcacttccatttgttgagcccatacatataaatattaccaaaagtaactacggcctttaccaccagtaatatttctacacccgaattcttccatcgagacgcataactttttaaaaggtggccccttttagaagacatgctcctctaattgacatgaagaggagggctaatgctatgctgatttatattgatgcatggtagagatatgggagaactctattcaatactgagaatcttcaaaagaattggctgataaagtctttccagcgagtgtatgctagcattagcttctcagatgaatcctggacaatgctactcgagcaggatgatgaggattctcaaagtacaattgtcatcttgtctcagacaatgtcagaagatgtgacctcagttcaaaatgacacagagtatttgaggagaatatctatgttcttagaccagggtgatggagaagttacctccaatcaaactgctctgaagaaggatagggaatcaacaggtggttgatgctccatgctgtgaagtttaaactttgttgttttgcttttcttatgatatactaaccaattgtcttttttctttgcaaacaacatgtgcctcctggctgctatggaatcttgtttaaactcaaagtgaaaattctggtgccgaaggaattttaacctccagtcaaggaagttgtttagggtatccttgatgcttctattgctttaaagaataaagttagaaagaggagtagacttattaatgtcgatctccctgcccaagactctagtagggagaagtttggtgttgttggtgctaataagagatctccaattgatatatctctggatgagattgagaatggtgtttggaactcgggtttagatttggttaagtagctgcgtgggtagggctcctagcttctttcacatggaaatgccttgattggttccaaggctaagaatatctcacttcgttgtcctacaaaaagtgcctcatactcagtttcgttgtttgttgcagtgaactcgaaccaaaatgcactatgagttcgaaatccctttggagtaactaagatgagtccagcactagaatcatgctcattggaggatccaacttcatatagtttttaggaaggtccagtgtccttctgagctattgtctcatgcgtgtggacctggtcttcacagatcatgggattatcttctttgaggccagtgcattt

SEQ ID NO: 84247 - DNA, 734 bp, Cannabis sativa
gtagccatcctaaaaatataacaaataaaaaaatttatcaaattttatttttaagaaaaaattgtatcattttgaatttgaatttgaataattaatgccaattaaagacttacacattccttttcaaaaaaaaaaaagaaaaaaaaaaaaagacttacacattgtaccatatttggaactttatatatattatatgccattccaatcacgctttatgtatgggcagtgcaagatgatgaaaatgatcacgtgaatgtgtagtcaagtttgaaatagtaagacagtgtgcgttagattcccattatcccattggtctctaatctctgctatctcattattgccttttcacactctttacccagcactctcaattgcccaacactttatcttcttttaaaatatatagggaaccctaaatttctcaattttagcaatcaacaacaatttattttaattaattaattaattaaaaatattcatatacaattcaaaaaatcaaatctacaacaaaaaaatatctaagaattaacatagaaagaaaaaaattaactattcggacgttacaaaaaattattaaatttatcggataatataattttgttaaaaattggtgaactgtaaataaatattactggtttctaatattcaatattatatattttttttttgaaagcaacaagcattcaatattatatatattaattaatgtccatagaaaactaaatgcatgaaaa

SEQ ID NO: 84248 - DNA, 1560 bp, Cannabis sativa
attttggaagactgctagactaaaaccatcgggtcccggtgctttattgccttcacaatcaaaaacaactctccttatttcttcctcatcaaatggtcgctctaattctctagctgattcagtagaaatttgtctccaaaaaattccttccacacccatcccctctcttctttcagaggtgtagagtttggtataataaccaatcaattcttcgactatttcatcttccttgtcgaccacatctccgttttctttctcaattctagatattgtgtttctggccttccttgcattcaacagattatggaaaaatctgatatttgcatctccctccttagcccacttgcatttagacttcagccacacattcctttcttcttcaaatgctaacttttgccattccttcttgatctcccttctctcttcattcaaagtttcattccatctgttgcttccttctagtctatctagatcttctaaccttctttctagagcaattttcctcatgcggttatctccaaaagtagatttgctccacacctttatcttctcttgtatcttctttaatttgctcatgaattttgttcctgaccaacttgacaccgatgtctctttccaccatttttcgaagagcttggaaaaagacttgtgttccaaccattggttgtcatatctaaaggggcaagggccccaattcggtggatctgaatcaagtattaccagactgtgatctaaaactactctgactgccatttcctgtctgacatatggataggcgatgttccacttgttagtaaacaagaatctatctagtctgctacagattggattttctcgaaagtttgaccacgtaaatcttccattgttaagtttagggtcaatcaatctcaacacattcactaattcatcaaaaatcttcatactcctcgtacatgaattattgttcagcttttcttgtacgcttctgactacattgaagtcaccccctatacaccaagattccccacaaattgagctaaggcccgccatctcatcccaaaagtcagatcttgctttatatgagcaaggcccgtaaacacccgagaaccaccaaggttctttttcttctgttttaattagcactgatatagagaactctcctatcattgagcccaacactgtgatacttctagtgtcccatatcaacaacgtaccccccaacctcccaatagatgggagaaggatccatgctttaaatcttgatctccatatgcttcccacaaaatttctatctacgacttccttcttgacttcttgtattattctaatatctggattgagtttacataaagttgccttaatagcccttcttttctccttatcaccactgcctctaatgttccatgtaagaatcttcattatacttgtttttccatccttgatttatttatacctttttcatagttgatgtcaaagtccaaatttctcaattccctgcattttcttcttgttgtgtcttctttggactcttttattggcactctttccttatttggaattattttcatccccaaatcagcc

SEQ ID NO: 84249 - DNA, 1261 bp, Cannabis sativa
ccccgaacaacaattaaagggcaaaccttagcagattttgtagttgagtgtacgggcaaagaagagagcactttaaaaaacaacccggagccagtacaagaacctcacttgagcaacagtgaagacgaaccaacctggaagttacatgtagatggtcggccacagatctactatccggtgcagggattgcccttgtcacgcctggggggcaacatctacatggggcagtcaaatttaggtttagagcatccaacaatgaagcagaatatgaagcccttattgccgacctaaaacttgctcgagaattgcatgccgaatacattgagatctgtagtgactcacaattagtggtaaatcatgtgtttggggagtacgaagctcggggagaaaagataatagcctatttaagcaaaatacatgacttgctcgcataattcaaaagctatgccctcaggcgaattccaagagaaaaaaacacaactgctgatgcactagcccaacttgcgagcatcaatttaaatgattaggctaatctaattcccatcatattccttgaaaaaccaagtatcagtggcacggaagagattgaaatgattgacacatctctaaattggatgacgcctatagcagcctacctcaacactggggaactcccaagtaacaagaatgaagctcgaaaaatgaggagaaaggttatacggtacatcatcgtagatggggtcatttatagaagaggattatccatgccattactcagataagttacacaagaagaagctgcacgaattttgtcagaagtacacgatggattctgtggcaaccacgcacctgggcaaagcttatccaagaaaattctaaggcaaagttatttctggccgaccatgattgaagattcaaaggcctacgttaagaattgtgttaaatgccagagattttcaaagatacctcgcgcaccgaccaacgaactaacttagaagcaaagtccttggccttttgccatttggggaattgacctaattggacaattacctaaaggcaaaggtggagaacagtacgcagtggttgcagttgattacttcactaaatggacagaagccgagccattgacaaccatcacatccaagaaagtgcaagacttcgtggtgaaaaatataatttgtccgtttaaattaccgtacaagatagtctcaaacaatggcaaagaatttgacagtcaattcttcactgatttctgtacaaaccatgggatcataaaaagttt

SEQ ID NO: 84250 - DNA, 817 bp, Cannabis sativa
tttccacgactgtttaacaccactcgctcaactattaactatcagcttacatttcaaaaaaggggagtatgaaattatgaattgtaaaatttagccgttcagtttttaaataataataaaattaaataaatattatatatagcactttttaaaagaataattagtagttttgcagctttaattttttttatattataagagatactacttaataatgtaaaaagtcaggagtcaaaaaatattaattatttttttcaaaatacaaaacactatattagtacgtttaaagttaaaataataaaacactatattagtatgtttaaacactatataaagtcccacactgtatggcacgtgatacttgttattaatgtctttttttttagagtgatattcttcttgctcttcagtcttttgtattagcggatagttctgtataataaaaattattttcattcaaaaaaaagttaaaataataaagataataaaatgtctgttagtagccaatttgttagcatcaatattaaaacataattgtagtagagaaaaaaaaaatgtcaaggaaaattaaataataaaattttaatatttgaaaaaataaccctaaatttgttgaagtagttcaacatcttcaatatattttaatcccacgaaaagaactactttacagtaatattatttatttatttatttatttatttttctaacaatcacctaggtgtggcaaaacgggttttgacacggcacacgaacacgacacgaattttacgggttatggtcgggaaaattagatgcgggtcgaaaatgggtcgacacg

SEQ ID NO: 84251 - DNA, 542 bp, Cannabis sativa
aaaacttgaaattgaatgataaattgaacatggaattagatttaatgagccgttattcaattcgaacaatcttccggttcatgtatctaaacctgcatatctcatcaaaaaaatcatctgcactgctgtgattgctcttcatctgaagaatctttattgtcattgcctttagatatttcccaaactttagaaacgactctagtgtgctcattttctgctcagcattcaatggcgatcgaattgtgatggccacttcctccaaacatggaattacaaagcccctattaatctgtaataatggaagagaaaacaattctattagtattaggtatcaaatcattgaaaaacaaagttgggagccagacgaaaggaagttttgattacatctactaacccttttcaagctgtttttttgacaaagagctgcgaacatggctccatgaatgtcaaacttttgaagctttggatggttgttgaagaactcaacaaaatcaaactctggaaagggttgaagaacttcaaaatctcccgtgaattcgact

SEQ ID NO: 84252 - DNA, 607 bp, Cannabis sativa
attatctttgttttgttcttctttttattcctttttcttaacagttttttcccttcatatttcgacggcgtcatcctcacgcaagtcatcggcggaaaccggtttgcattttcgtttgtggtgtggattggagttgctataaggtttgttcatattatcttttgattttttttttatgtttttgattagtgggtatcttagtgttgttgttgttgttacaagtttcaaatatggaagtgttatattatttatgttgctttatgggttcgggttatatttgttttttatgggttgttttaaatttctagtgttatatttgaatttatttttgttggtgggtgtgtggttttgtgtttcaatttttgttgtgtttaataaggtggtaagttgatgttgttctcttaatttttcaagcctcataatgatgctgtgaaccaagttttgtgcttttgaataggtgttgtttgtcttgtttttgctgagtttatgtaggtgtgtgtcgagtgttgggggaatgggtgttagagtatcggttgctattttgagttaaaaattttgttatcaaaatgtagagcagaatgagaataagtgggggactgtttattag

SEQ ID NO: 84253 - DNA, 1181 bp, Cannabis sativa
tttcaacacagtctttggttttgagtacttttcaagacatggagttatgtggttatccgtttacttgggagcgttggggggggggtgctagtcattggatagaagtacgtttggatagggggcttgctaatcttgcttggttgaacatgttcacttctgctaagctccataatcttgaaatttcaactttagaccatgctccgattcttatggtcatggttcctgctgtaggtcacagttctgttaagcggtttcggtttgaaaatgcgtggttgagggaacctctttgttatcagattgtaaaggatagctgggagatttgtgagtctaatgatattatgcataaaattaagttttgtagggataagctggcggattggggtaaggaggttacttgcaattttaaagagaggttgaaaaagtgtaaaaacgaagtgcagaagtggaaattgggtcgggatgaggtctctgtagccaattataaacaagcaaagaagaacttggtcgaattttatgtgcaacgggaagttttctggcgtcaaagattgaagcaactgtggttgcaagagggaggtaataatagcaagtattttaatgcttatgcaactacgagacgaaggaataattttgttgcaatacttaaagctcattcgggtgcatgggttgactgggagagttgtttggatgatcttatagtttcttatttccatgagattttttcctcttcccaaaccgtctagagagaagtcacaagtagcgtgcaaactcatgtatcatcccagcagaatgctaagctgctattaccggtttgagatgaagaagttctgaaggctttgttccaaatgcatctggataaatccccagggcttgatggaatgaccccgggtttttttcagaagtgctggccgattgttaaggatgatgtcatcaatttggttaagcagttttttcataatggttgtcttcctacagacattaatgaaaccattttggtcttaatccctaaaaagaggcagcctatggatatgagggatttaagacccattgcgttatgcaatgtgctgtacaagattgtacccaaagtggttgctaatagacttaagagtgttatgccgtctatcatatctgatactcaaagtgcatttttgcaaggccggttgatctcagataacatcatgatt

SEQ ID NO: 84254 - DNA, 622 bp, Cannabis sativa
ggtctctcgtattaagatattaattaattaaaaccaataacatatcttcatacttatatgtccatttggaaatatttattttgcaagttaattaaaaagatgatactttgatctttgttatcttcttaaacttcatattcttattttttttttctaaccctaaatagtatagactttggtcaaattttaatatatataattccaaccttacaaacccatcaatgtatttcccagtttttatttatttgtgaaattaatatgacgaaacgattggttgtttgagctaaataatagtactggttacattatcgtcgctagagaaattgattgaaatcaaaattagtttttaatttcttttatattttgttaaccaaaaaaaagtaaccaaattttacacaaacaaaaattcaatataacgtcaaattaacttcatattttaaatttaaaagttatgagatgatattctaaaaaaatgaaattacaaaattttgatagatttctataaaaaaaaaaatctaatatggtaactaaatgatatgtcttaaacttatatgactatgctattttgctaataaaaataatagttttttatactttataatgattcattagtttctttaat

SEQ ID NO: 84255 - DNA, 695 bp, Cannabis sativa
ttttactgccaaaaattgagtattggaggttaagtgcaagtaaaataaaagtattgaggattttgccataattaacccttataattatagtaggtatattgtttatttttgaaaaattatgagtaattaggtgctgaaaatgtaattcaaataattagttgcatgtatacctgctttattttatatgtgtgtaattaaatattttgaacattatttttgatatcttaaattatttaaaatttcttgaaaacgtacagggtgcctattataactatagtttatactgacgtcatataaaaaaaattagaatataattactctaggtgccaaaaatataaaatgctcttacaataaaagcgaaggtggtacccgtaattaagaagctccctatatagaaaaattctaatggtataatatacaatcaaaaattctaataatattattataaattgtatttgtacctgaatacgaaggtaatttttcttgtgatgtcgagattggaagatagttgatacaaggaaatcaacaacatcagaactagcattagcaaaaatgtcaatgatgggtgtggttccattgtcaaaaatccatttacggagaccccatcgggaggccattgaagcattgtacttcccttcatgcttaggttcacctgttcccaatgacaacagtagcattttagttccttccatgcc

SEQ ID NO: 84256 - DNA, 604 bp, Cannabis sativa
  modified_base (49)..(49): a, c, t, g, unknown or other
atcctgattaggggattagggttccataagtattttgggtagcgtgccnaattatttagggcgttacactacccgacttcaccaaaaaatgacatctctgagaattggtgaacgactttaccaaaactaaaaaaatggctaagtgatgtcaacatatcacctagaaatcaaaaaagacaagtttgagacattttttttcacttacacaacgtccaagttgatgccaggatgtcaacctgaacctaggatgtcaacctaggcactacatttcaacttgggcattgggtgttgaacaacctttagtaaaacggccataaatccctcaattttaatttgatggatacgatttaacttgtattttagagctctttcaaatctatttcaagtcatgtttaacacccatatcgcaattctgaagatttcaagcccaaaactcgtgcccaagataagtgcaattttttccatatatttcccgttaacgatccgacagacaagattcagactccaaaaatcggcaattttcatcaagattcaattctcaccgttagatcatcattaatggccaagatcagcccaaagggaatttttcatattttttgtatta

SEQ ID NO: 84257 - DNA, 701 bp, Cannabis sativa
atgatgatgatgatgaacatggagagagaaataataagaaatatgataaaaaattgaaatgataacacgttttgggtctcatcttaatcatcattattttgaaccaatcatctttatcatcattaattttaagtaaaaaaaaataaaaactaaataaataaaaaaacttgccacaaggtgacaacatcaatcaatcaaatcaaaactttatgcatattttcaactttgtcattagtaattttaagtaaaaaatgaaaaagatataaataatattaaaaaaagtatttaaaaaataaaaataaaactgccactaaaaataacagctcacgccaccatcaaaaatttatatataaaatggtttaaaaaaaagttatatactgtcgtataaagtattaaaattatacagtataaatgtaatttataccatatggccgtataacagtaaaaaataggcaaaagacagtatagtgtgtaatttttccaaataaaatatcacattgatagttttatttaggacaaattagtattgagctcattcaatgaataacaattatttaagagaaatttacacctaccgacaaaattttgaagaaaatatcataactaacgttgatgtttttatgtgtgaaatatagctatggttctgtattttttttttgataggtgtatacgtggtgcactgctttttttttttttttttt

SEQ ID NO: 84258 - DNA, 1454 bp, Cannabis sativa
ctgtcaaccaaagtgacttgaggtaatggttgagcattagggatatcttcatcactacccaacattgagtgagcacctccttctgtagaagaagggaccccaattattaatgatgaagtcacactttcccaagatcccatctcaccactcaacaagagtatggtcacaaacactagacaaatattagctatttataaaaactcaaaatatatatatgctatgatatccaacgatcatactacgcattatataaaacattacatccatactacatatcatgcttgcattaaaattttagtggatatattatgcatcaagctcatacgaaatcgtacggtcataccatacccaccgtggttataaaaaaattcttgttgcttgtatacaaaatttctatagtcatactatgcctaccatggacaagttcgaacacaaaaatacaactatttgttacaaatttaaatcaaaacatacaaacattacacaactatcttttggacaatacattgttctaaaaatatcaaaatatcaagaacgccaagaacacaataacattttaaacaaaaaaaatgttggaagcacttaccaacaaggagaagacttcctagcctttcaccacccaaagctctcaacaatacctcttgaaaatgagaagaaaaaatagttagctgaaaatggtgtatctatgttctcttataaataagatatcaagtggttccaagaaaggaaatacccaaaattatttatctagcttacaacagtcagccctttggcattgagaaaataggattctcttctttgctcttaaggtcttccaaatgtcaaagtcttatatattgccaacaaaaaaaaaaaataaaataaaacaaagctatttacccactaaaatagacactcacgcctatatacacacacttggatagcttattttgctaatagctcatcctacaagggacaagaccctaaacttcttaaagaagtaaaacatatttattatatacaatacatgtcaaaagcccacgtgaaggtaaaggaaggagattgtaaagaatcaaatggtgtagtcaaatcaaatgtcaaatgtactaaaataacattaataattttatctattccttattatgacaatcaattgtcactcatctcaagtcgaatccatagaaaagttgttctcattttaaggtaacactagtactagaagctcaaactacacaaaggataaaagctagaagagatattcaattatcatctaatattatgtatacatgtagtgtaacacttacaaaagtgttttagtccctcaaagtggcgctcatcctaatgaagtatacatattagaattttacactgaataagatgaggcgccaacaaatcaaagataaacaagatacttgtcttgaaaatcactgatgcaataagccctcatcaagacaaaattacttatagatatattc

SEQ ID NO: 84259 - DNA, 530 bp, Cannabis sativa
attaatttaattctctcttgatatttctgcaattttcctttgaaaagtttatctcttcctcttcttctctctctgtttctctgcaactattatgtacaattgggaaataacgaacacaaaaaatgggaacatccattagatcaatgaaaagaggagacttacgacggcggccacaaccaccaccgagttcataacggcgctcaatattcttgacatgctgacctccactaggtatgtttattgatttcactatctcaaatttttttacccttctttctctccatccgtatataaaaatgtaaaatccctaattttttttatttgtatttttcaattttttttttcaaatccctaatttctttacctctttttctctctatctgtatatataaatgtcacatatgatgaaatttatctgcttttacacatattttaatttcagatttttattttcgaatttcttggattgatgcatgtttgataattttgcccttaaaagaaaaagctaaaaaaaatatagataatttttg

SEQ ID NO: 84260 - DNA, 1537 bp, Cannabis sativa
  modified_base (632)..(645): a, c, t, g, unknown or other
acctttttcatagtgaccaatgcttcttgcatccttctacttttctctctttactctgccaaattggcatcatgctcagcgactcgttgccttaatgtgattggttgtgtatagtcatcttctttgtatgcttcgtagtcatcatggtcttttgtatactcagtgttgttggtatctccttctccttcaacatccactcgagaggcccatctattgggattttataccctaaataaaaccaaattcaatgtaattgtatttactttcaataaagatcaaaaatcataccatgaccgagtcatatgctttgttcacatgttttaaacatgattataggttcaatatataagttctattaaatccagaatatataattattcacaattacagtgatgtcatcatagtgtaaagtaattgtgattatatgcttcaaaatgatttatcagtgcactagatttacactgacgtgataatcaacgataaggtttacttaaatttgggtgagtggaatgttttttccaaggcattagtaaaataaactagtatcggatgtattgactatacatcatactagaccaatattgacagtagaaaatgtatcataaaattactgttatatcttttctaagtcnnnnnnnnnnnnnngatcatagatcatttgatctcaatcctgagatggttaagctctagcttaaatgtatagcacaggttctttgacttgttcattaccagttgacctaaaggactagtccatacttatatcttgagaactcggtagtctaattgagtgggagtactaatcatagatatggacatttatagcttctatgtctgttagaaatgaaacaatgcttttcttagagttgggcttaacgcgataaatgatagaggtttcatttcagtaattatattagtttcttgaaatatcatttacaagtagctaagtattttaagtattaataaattgaagggtaaaacagtaattatgtccctactcaatgtaaactgtctatagaggatcaatgattgttgttattgaaacaatggataaattcatagtgtatctatacttggtgtatagagcattctatgtaatcaagagtacaatttcgaatctataatggagtcatgaggaattataaagatgaagtatttggtaaattctaaaactttttattgtgagcttgattacataggcccatggtccctacactagctgagataatattgttttgtagtcttaattaattggttttaattaatcaattaggattctaaataagagtatatattatttatgaattttactaaggaatggcatgtttgagaagaaaagagaatttaggatttaattattaattaagagaccttggagagtttaattaataaatatatttaaataataattttatttaataactaattataattattaaatagataaagttagtatttaaataattagaatagataaatgacatttctgaagatagaaaaggctattttatttaaagaaataaaataatgacaaaattca

SEQ ID NO: 84261 - DNA, 844 bp, Cannabis sativa
aatatttttgtctttattgtagaagcatttttgagaaaattatatttcacattttttatatgattgtaaattataattgtagcaggtaccctacacttttttttttttaaatttatgaataatttatggtataaaatataagattcaaaataattaattaccatatttgcaactaattatttatcttgaattatttaataaatttaaaaaaaataataataaaatacctactacaattacaatgtagttcgttataaaatgtaaaataatttataatttctcaaaacatcgaaaatgaaaaatatatagtaaaaatataagagattttcctaaatttttttctcgtcccaaaaatatatagtatacaagccaaataaagaaaagtaaaccatcatttagaacataagtagcttccaattagggaatcacgacaatagatttcatgtaagtaaaaaaataataaaaatttaaatgttttttaattggatggcatgcttttgcaatttattaattgtgttttcttttgttctctatacattaacaacagatttattacagatagaattattggctaataatcattcaacaaatacgtgtacgtatgtaatgactacttcaccataaaaattaactatgtaccatatatgatatatacataataaaaatattatattgatttcaaatatttatgaatgtccttttcaaaaaatatataggaatgtattctaatgggtattacttggtattattagaaaaattgagtttttatgcttaattttttatataagtaaaaaaatatcttatttttacattatgtgagttgatgttataaacaaaaaaaatt

SEQ ID NO: 84262 - DNA, 653 bp, Cannabis sativa
ataagatgaatgaactactcatctcattgccaattattttttagatagaacctcatacactttaaccacaacttatgaaattctaacaatctcaacaaccatggtttaaaatgttgtggtcatatttgataaatgttaaaattaattatttggacttttttttagtgtaattgctatttacccattttgtacattaaaaatagcataataaaacgaccactggtatggtcatagtatatggcatatatgggaatggaatgggagctgtcagagtaataatctcgtgcataaccttattaaagaggtataggtgcagctcaagtgtcttaatatgtgggtttgttgttagatttcacttatttatttatgaaaattagagttcttttatttgaatttgaacagaaattaatgaaggacatatagtaattagtttaatatacaggttatgggtcatacataaaataacaatgaattcaatacatgacatgggattacatattgagacattggtctccatattatgtagtcaattcaatacttaatatgggatgtaactattgtagatatgtcatttttgtaagtagtattagagatattcatgtgtcttccatatttagaataattataactttatttttattttatatgacgat

SEQ ID NO: 84263 - DNA, 670 bp, Cannabis sativa
  modified_base (28)..(47): a, c, t, g, unknown or other
  modified_base (100)..(106): a, c, t, g, unknown or other
aagcaattgataagatgaaccaaaacannnnnnnnnnnnnnnnnnnnacttttgtttctttattgatgttgaataatatagattacattgaaatggagtnnnnnnnagggcataaaacccaacatcttagtcattatgaatagctagatgaacaatcgagacggaatcataatcggataagcagaacctagggcaccaggccatatgtcaacttgggcattgggtgctcatttcggggctcctaggatgtccctttaatacttccaagattctagaacttgaggacgagatctcctatcctgtttttgaccatttcggagagaatgcttggaacaaaattggcatttgaataatcaaaaccagtgcaccaagttggttgtcaacttgggcgctaagccagcaccatgtcaacctgggcaatgggctcagtttccaggctctcgggtttatagttttctccccaagtttttttttatcttttttaattcagatgacagaaaaaatgtctgaaacattgtttagagaaactgattagaactggtctaggttgataatatgtcaacctgggtgttgggtctcacttttggcctcctagaagttctgtttagtccttgaaaatagttgatcttaatctttgttgaaaatggagaatatgccttgaagagttctc

SEQ ID NO: 84264 - DNA, 1149 bp, Cannabis sativa
tggtatataaaatttcatttttttctcttcagtgttattgttgaaattgctactgcaaaaaaaaaaatgcatttatcgaattaaaatttaggttgaatcgcaaactaagttgctctttttataacgtttgtgacactatccaaaattatacaagcaaactatcaatctcgtgttctcagaatacaacagcctagtcgaaccacttatcggagctctattgcacgataaagaaccatcgaaataccacacccaacaaaatactacttctcaaaatacacattgtacgtaatataatcgtatataattatatatagatttttctgtaagaaaaagatgtatttctcccgttagttctcatgctttatattaggaatacacaaaagatagtaacgaaaagaaatacgtttttgatcgtgggaacgttagaacacgggatcgatgctaaaaatcaagacgagaaaatgtctctgtttactaattaattaaccacgttaaaaaactattttaattaatactataaattttctctaaaaaatatggtgcacacaacaccagtttagttggtggtggcacgcgtgtggtgtgtaggtgagcctttgtgtgactcctccttcttccacaaaagtgggtaccctttgggacccgatccaattgttcatatgtacaatatatatacacttatacataaatgttcccaagcaatgtgggactagtcctctaagcacttcaaaaatgctcatttccaatctttaataattcacaaatatgctctaacaatttcctacttgaatttttaaaaaatattttcttcgagcagtaatctaaacaataaagttgagtatagacaaaggtattttgtcgatttgaacatttgtgtagtgaatgcaacttataatacactagagggattcgtaatcttgaactctatctctaccatgtaccacgcacaatctttctagggtgtactcagttctcgctttaatggtcgtgcacgtctatctcactatagaacactctagaaatttgtccaaaacttcataggaagcggccccactcccacattcacgcaagtaagttattctatcaagaatactcttgtagctcggtactccatccaacatagactatagatctcattaagagtttcta

SEQ ID NO: 84265 - DNA, 1181 bp, Cannabis sativa
tttttttttgttaataattttttcaagtttggggataatttattatgtatcattttttacctttctagctcttaaagatttaatttacataatatttgaatgagttattgatagaattttttataaaatggtaaaaattttcgctatgagaaaataaacatttatatatatacttagttggaacttttgagttatagtaattttaatagtcttgacaatggaatggtaattaaaatagctaagaatgtaatgtaatgagttatataattttagttagaaacttttaatgcttagtaagaaacattcatgaactaaaattattaattagatgtttggttcattgtatgtttaattagattttctgaggaatgtggatcagattagctgaacagtgcagatcttttactagtaagattattaagtttttgaggctaattttttttttttaaaaaaatcactgtcatctgaattaacattaggtcccttatatatgtcaattttaatagtacattgatatacttttcttctttctaattgtaactgagcaattggagattttcatttgactcatgaatgccgcaaaataatactccacttctcgttggaacgataagtcagcaattcaaaagaaacatgcatgagacatatccagagaaaactcaaaagctcaaggatgagtaagtttgctttgcaaagcatttacttgttactattctcacttaattttaatttaaactttttttgtattgcatttaatattgtaggttgtagattgttattagtaaataaatcaacatatcggtgatcattgattgctagctaaaggtacattattgacaaataaatttttactaattatagagctattagaggagtttgaatatattagatattcatccgtagtgaaataggttctgggatataaatgtattgcggtcagattggtggcacttattatattgttaaattcttttctgattattttttcttgttatctgatttacttgtgtgcattgttagatagttattaaattgggaaatgttgtagaaataggagaaactctagccaacttttttaggattcttaaatgaacatattttttaatatttaattactaagtgtgcttaggatttttctagcaacttttaagttttttttttcaatcttgtttgttaggaat

SEQ ID NO: 84266 - DNA, 573 bp, Cannabis sativa
gctagaatcgaatatgaaggtgtggcatcacagacttgggcatatcatgaacaaggccttaaagaattgcacaaacagggtataaattgaaaatttaaattcttgtgccttaccattttgtgaagcttgtgtgttaggataacaacataagttgaggttcactctggcaacacacacaactaaaaggatacttaattatgtgcacgctgatctttggggaccatacaaggtgcctactaactccggtaaggaatactttctttcaatagttgatgattatagtcgatgtgtttggattacttgttaaccactaaggatgagtttctggaatagtttagaatttggaaaattcaggtggaaaaccaaaccaatcttaaaattaagaaccttaggaccaataatgggttggagttcgttaactccgaatttgacaatatgtgtcaagaatttggaatcacttggcgtaaaactgtagtgaagacccctgtgcaaaatggtattgttgaaaggattaactgaaccttgttgaacaaagttaggtgtttactgtttagttttgggttagaaaaacca

SEQ ID NO: 84267 - DNA, 673 bp, Cannabis sativa
  modified_base (63)..(82): a, c, t, g, unknown or other
taaatttaacaatcccaatagtttagggggaatttttaacggcaaaaaaagttcagggggcannnnnnnnnnnnnnnnnnnnttcaggggaaaaaattactaattaaccaaaatatatccaataacaatgcgtgctatgtatgtgtttacatgtacacttgttgaaatagaaggaacacgtacacaatggccatatatagtgtacgagaagggaaaattaagctcttgtacgtacccatcaaatcaaatcaaatccatacatgcagagccggctctgagagtaggcgagttaggcgtgcgtcttgggcccctaactgctcagggcttcgaaattgtgaaaaaaaatattatatagataaaatattaaataagatataacaaatattatttggtgtagtagtgaaaggttttactttaagccaagaggtcaagggatgaatccctaatctctattttaaaaaaatatttattgtgtagctatggagaattgaaccttgagctcttatgagttttttaaagctttaccattacactaaaatattagaactatcattttgattataattaaactatatatagtggtcccgaaatttgattttgccttaggccccatataccttaggaccggccctgcatacaagcatgctctcacacgcaatatacgcaattttta

SEQ ID NO: 84268 - DNA, 986 bp, Cannabis sativa
tacccataacataattggtcacttaattttgtatcacactttataatagcatatacattatacatatgtgcccacataggatttttaatccaacattagactcaaaaaaaaaaatagtgttaaaaaaaatcacgaaaattaggggtacactcaaactataaatataacaagtgttattattaaaaatagaaaataacaacgacacgtcggaaaccatgcatttaattataaatcttatgtacaactctttaagattaaataataattaaaaaaatcattattatatttatcatgtgtaattaagtttttggttgtttcaatacattgtattgatctagctatatctacccttttatatcttggcaactagttcaagttctaattctaatttttttagtatatctattatattttatgtttgtagaatttccccaaattttctgatgatatagggaaagagaaatgcattaatattatagatattttaattatatttaatgcaatttacgttaactttttaatgttaccaaatcttattttgttttcagaatcttatgtgtgccctctacaataattattgtctcttaataacatacattagcactaataatcatgtctattttaacaacacgtactaatttaataatgttaataaacagtaatattagtaatatttttcttaaaaggaaaatagaaatatccaatattgattggtaaatcagactaactttattacatagtatatgatatggctcatagagcggactaaacaataatagattaaccaactcgtttacaaaataataaagaaagaaaccctaacaaaattatcaacaaaagaacaactaaaatgccaattatgaatctatattgtttggtattaaaaatgaaattggaaggcactgtggccgctaaacttctctactgtggccgctccaattgggtcctctggcctgcccacttcgccggttcccttcctctcatct

SEQ ID NO: 84269 - DNA, 687 bp, Cannabis sativa
  modified_base (43)..(44): a, c, t, g, unknown or other
aataaagaacaactatacattgataatatatttacaaactttnnaaccattgtgtatctctctttgaaactttttttggccaaaacatctcaattctaagtttcaaattagcttttaactccttgagtagggctgggattaattgctcctctttggtccataaaaccttgtttctgagctgccatatgctgtaaaccagaccggctacagcagttgtgtacactagcagcttggactttgactcctttgatcttcctagccatttgatgatgttagtgagacctgtgtgtattgttctccaacccagccacctcttgatttcctgtaaacattccttagttctcagacaatcaaagaaaaggtgctctggagtttcagccttgtcacagcaaagcaagcaaattggatcggtgatgatcttcattttgcataatcggtctctggtcttgagtatttggtgcattgcaagccagagaataaaacaatattttggagcattaaaacggctcctaacttgccttgtccattgaagtttagatggggtttgtaccaaaatcttgtaccctgcagagatgttgtattgttgtagtacaatggactgattatttgctttgaataggtccttgagcctcactaaacacctccaatacaagctggtttggcttggtgtttcataggcccaccaat

SEQ ID NO: 84270 - DNA, 793 bp, Cannabis sativa
ttaccatgctcatctcgcagcgtacttatcatattgttgctcttccttgtactcgctgccttatgaaaataattactattttgatcaccttcctttagccagaattgctttgcacgctgcttccaatagcactccctctgatcaagagccttgaaaagattttcctttgctgccttatagttttggattgaagcttcgtccctaccatgattaagtctcttcagatccgctttgagtctctttattcgatgattaagagttccagtgatctctttaccccaactactcaacttttcagcacacaacaaaagcttctcactaaagcttcggtcatgtccttcttcccaacagtccctcactatctctacacaaagtggttcctttaaccatgaattctcgaaacgaaaccgacgaataggtgtaacattagtctgcggtttgggctcaagaaagatgggcgtatgatctgaggttgagtaatccaaattggtgagagaagcagttggaaaaatctggtgccacgtcgaagaagcaagcgctctgtctagtcggacttcaacccaattattcgatcccctccctttttcccaggtaaatggatgcccatgaatttcgatgtccaccaaatcacattgttgcagagcagtattgaaccccgtaataagaccttgagggtacggcctaccccctcttttatcctcttgtcttaccacattgttgacgtctccaataacacaccacggtagatcggattgtcttgctaaagtacgcaacaaagcccacgtttcatgcc

SEQ ID NO: 84271 - DNA, 1616 bp, Cannabis sativa
caattcttactaacgaaaagggttcaacccgtcctgtcacacccattgtcacaggtggaatcgatcgcacattttgatagggttgtttgtttcatagacctctctgctcgttcagtcgcatcgattgttgcagctgtaatcgaacctttttatcgggcttctgggattggaatcgatggcaaatttagagaagaatgttaaggttttggacgtagccatggctatgtttcctctctacagcagattcacatcaagaattaatggagctttcaatcgtgttggactttgaaaacgttttagggtttaggcttcatcactaaatcgctttaccaaaaaatcgcaaaactcaacagattagtttggattttgaaactaacaaacaaacgaggagcagggagagatggctaacgtcccgttaatgttcttttattaaaaaaaaaaaaaactccgttaaaaataatcgttaaactaagaattgccgttagataagcacttttaatatataaaaatattagattgaaattacatgcattgcacctatatttaatttatttttataacatattatatttttttatttgttttagatttgctcattctaattttcatgtaaatatattcaaaggttttccttttgtataagggacactatttttgtaattaaagcaaataaaaaatatataatcataaaatagaaaattaaaaaatgctttgagagcatagggtcattttcaccaaaaatgacaagtttggaattcattagcaatataaaatacattcaactcgttcgggatgattatagcaaaacttgcaaagtatataactaaaatataatagaaaatcaatcaaactaataaaaactaaatatggtgattgagaaatggtaaatattgcgttaaaaattaataataataaactaatggtaaaaaagcttacctgaaaactaaacatggtgattgagctatataagaaatttagatgaacaataagtacacataaacttatggcaaactctttttttattttttattttgaaaacctaaactttacagcaaaagaacaaaagcacagaaggttcagactaaaatggaaggtagagaacaattccatataagctcattgtttaatcctaaacttatggaagacttattatgaagaaaaaaaaatgataatctattgacttatatcaaccaaattaatgaaaaataaacatggtaattgagaaatgataatttcttttgtagtgctataaaatatcccatatcgtattgcactgcagtaaaataaatcattaggcaagggtctattattgataattataccactaaggaaataaatgattgcttccacaaaatttctccaaccaaataatatagaaaaaaaaaaagatttcatctaataactcagcaacaatatataaaactagtggtacaaaagattacatcttaaaattacccccaactataataaatcaatgtaaacaatgtaaaagaagtggctaaaattttctttgagtcattttatcaaatatatggtatgcataattatagataaactgtctgaacaatgcatactatctaaattactcaattcatgcataattacccaaatattac

SEQ ID NO: 84272 - DNA, 587 bp, Cannabis sativa
atctgtatgttattttttgttattattttgatgttattttcatgttacttttatgtagttttcttgttaattttatgttgttttcatgttaatttttggaataccgtaaaaacataaaaaaacattctttgaacgtaaaaatataaatcttttacaaaaaaaatggtgtcttatataattattccttaaactatatttagtatgagttttattaagaatttattaaaatatatatatatatttaagtaattattttcattatcacttttttatttttaagtttggtgttatgtagtacaaatttggtatatattaaatataaatttgagagattgtatttttttgataaaaagaaaaaaaaaattatataggagctttaaaatatttgaaaaaagaaattcattttgttgtttaggtttaattagaattattatgacattttgtataatgataggataataggtgcaacttccaaaaagagaaaacttctgatttttcttacatgataccctgattttttaaaatgtcatgaaaacttgcatgaagtcatataataaataattaggatcaacatgttcatacttcat

SEQ ID NO: 84273 - DNA, 703 bp, Cannabis sativa
  modified_base (665)..(668): a, c, t, g, unknown or other
aaaaaaaaaaaaaaatttaagtgttaaaaataaaaataaaaaataaaaaataaaatatatttagagtatgtttggaagttgaatttcggtgaggaaacaaaaaagtaaagtaaatgtttggaaaaaaagtgtgaaaaataagaaaaaacaatcaaattttcatattaggtaaaaaaaattgttgaatgaaatttttttcaatacaatttttcattccataccaaatataagatttttatttatttatttatttattacttttagttttcctacaatggtaacataccaacttaaacaagtgaaattatagcaaatgaccacaaatcatagcactatataagtaaatatcctcatttcaaaacttgttgagaaatgagcattttatactatttattatttatattgtcttttgcgggataaaaaaatcaatatttttttcatatattttttagaattagaaggaaattacttaaagaaaatgttatatacttatatctatattaattctgttaaaatccttttttatttgcagttatgtcgattttttaatttgtaacgggttgttgtgggttgttggtatatatattttgttgtacaatatatttctgttttgttgtatgatattttattatagggtaaatgccattttagaccctgtgttttgnnnnagttaccaattggaccctctgtttgttaaatgaca

SEQ ID NO: 84274 - DNA, 1426 bp, Cannabis sativa
  modified_base (1365)..(1381): a, c, t, g, unknown or other
tttgggtatacactgaccaaccattacgccaagtattacaaaaacatgacacttctggatggttactcaaatgggtagtagagttgggttagtgagaaataatccttcaaccctgaatagcagtcaaaggacaggctttggcaaactttgtagttgagtgcacgggcaaataaaaaagtagtccaaaggacaacccaaagccagtacaagaattctagagaaacaataatgaagacagacctacttggaaattatacgtggactggtcactgacaaatcaactatctggtgcaggaattgcccttgtcacacctaaggggcaacacctgcatgtggcagtcaaattatgattcaaagcttccaacaatgaagcagagtacgaagccctcattgctggcctaaaacttgcttgggagttgcacgctgaacacatcgagatctgtagtgattcacagtttgtagtaaatcatatgtccggagagtacgaggcctgagggaaaaatgatagcctatttaagcaaaatacatgatctgctcgcacaatttaagaagaaaacacaactgttgatgccttagcccgacttgcgagcagaaacatagctgataaggctaatttagtcccaattcgcttcctagaagagcctagcatcacctgtgtggaagaaattgaaatgattgacacagctctgaactaaatgacaccaatagaaacctacctatacactggagaacttccaaatgatagaaataaagctcgaaaaatgagaaggaaggttaaacgtgttacatacgaagaatttgcatgacttcggtctgaagtacatgatggattacgtggcaaccacgcaatcgggcaaagcctatcaaagaaaatactatggcaaggatatttatggccgaccatgatggaatatgcaagggcttacttaaagaaatgttataaatgccaaagattttcatagataccccgtgcacgtccaaatgacctaactcagatgcaaagtccttggccttttgctatttggggaattgacctaatcggaaaattgcctaaaggtaaaggaggaatacaatatgcagtggtcgcagtggataatttcaaaaatataatatgtcggtttggactcttggaaaaaatagtcttggacaatggcacgcaatttgacagccaattgttcactgatttctacatgaaccatggaatagtaaaaagtttctctgctgtagcacattcttaagcaaatggtcaagttgaagcagtaaataagacacttaaagatactttgaaaaaatgagttgaagaagctaaggggaactggccggaggaacagccaaaagtactatgtgttggaattattttaccannnnnnnnnnnnnnnnncaagtatgttattaacatcctaaacatgaacttccaaaatgatat

SEQ ID NO: 84275 - DNA, 1796 bp, Cannabis sativa
taaaatagtacaaataggatcatgtgctcaatttttgacaatttttttaatataactaacttgaagataattcttaacacgaacagatgtagaaaatttaaccattttgtcataacacctctaggtttgattattattaagtttcattttgacaaaaaattagttttgtaccgttttggaaaatactagatctattttgtcatttaacaaaacaaaattttgtaactttgcaaaatagaaggttcaaaatgatatttaccctataatatattcaaaagaaataaacatattcctaaattaattgcataatattcatattattattcaaaattaagaataattgaagctaattatttgattatattaaacagatatttgtattttttttaagtaatttttaaaccaagtaataataaatataaatgtttattatttttcaaataaatgtaattttattaaaaattaatttataaaaaaattatgtagataaatttataaaatatgtatgtttaataaacaatgtcaatatatgtattattttattttttttataattatatcaatatatgtttattatttaaaaatataaacaccttaatcttataataaccttactataacatgtttattaaaattaaacacttttaaataaaaatatacaaattaaactacaaaatatatgcatattataaacaatatcattgtgttgattatttaaaaatattatttatttcaattacgttactaaaatataaacattaaaataaaaatacatgaacaattatgtttatattgtgatttattatataaataatttcaatatatatgcttattatttaaaattattgattactatcaatttattaacaagataaatatttaaatttaaataaaaaaacattcatatcatatacttagtataagaaaacaaaactaaatttattttgatctggatgataattttaggatgtataatgtgtgattttctaatgaaaagattcgattttgatcttcattgtgattcttgactctttgagtcatgaagaacatgaagaacatgtttgagttcttgaaaagacacactttgatttgtaacacactgtctggccatagggtcttgttcaagacatggctggtcatggggtcttctcatgggagctggtcagccataggggttcaccataatgtctggtcggccatgcctgggcttggggtccttggttggcccttggctgggtcatggtgttgggatatattttattagaatctagatttacaaacaagtatgtttattaacatcctaaacatgaatttctaaaacaatagaatttaaacacgtataaagtttgagtaactttacattgattatagcggaatataatgactcctcccactcagatttttaactcttattcctttctatcgcagagtattatcaacatatgagcccaattcttcttcagttgtttggattcttcacagtcttacacaatatgattgagtactaacttgctatgggtgggcatgcactcaatcactaaggctcaaaaatttatgtgaagaacactctaagaattcgaaattacaagaaagaaaatgaagaagtctcaagaactctctagttgtctgacaagttgtaaactaggtttagagtcattagttttggattatgataccatcctattatttttatactaattcacttagggttaggattgaattatatggaataaagaatgataaaaaaatagccaaataatccctatagtggtcgaccatgagagtgggccccacta

SEQ ID NO: 84276 - DNA, 777 bp, Cannabis sativa
tgtttataattgtactcttctccctgtgtatacctcacaatgtttgagagggataaaataacaaaatcaaaccccatatacctcgtaggagacgcttttaagcctgacgactatatctcatcaaattcattttgacacagtaatttaatcatatgtttttcaaagaatcattatctcacttgctacagaacttaaataaagggtttttcttctgttggagtttgactcaaattatttctttatgtatatatgtaaagttgcaatttttttgggtaattattaattatgggaaaaggaaagtcttggttgccaagttttgaaaagtcttcttaaggaagctttggaatgtcttggcctccaagttgccttgattcccaagttttgtaacttcataaatatgtgttttgcgtgagatgtatgtgaagaaaaatagtgagttgtgaaaagaaaagtgtgtgtgagtttgttgtgtggtaagagtgaggaagaagcaaagggtatattggtatttgggtggagagattgagatagagagtatatgcaattttgaagtgataagtgaaatatatctctctttgtaggtttggttgttttaccaaactgagtgaattgctttgcttcgtttctttattattttgttgcgcttgaagtttatcgttttccccaacaagtgttatcaaaatcaaggttcagatcaacacagaaaatgtcaaagatggtgtcttctatgaaatttgagatcgagctttttgatgggaagaataatttcagtttatg

SEQ ID NO: 84277 - DNA, 669 bp, Cannabis sativa
tgtcccaaaaccacactagacgtggtaaaacaatacataagagagtgatcaaagttttataaatgcagtcatcccatttttgtagctcctgtattccaatgattcaataatattatgcctttgtgggcaactttttcgtttttctttttattcccctttatttggggttccaaattcttttgttcctttaaattatactgttgagtatgatatagtttataccatgtagaaatatagtttaatagttctcatgactattaagggcttttcccgaccatttatgggttacacaataagaaactttatttctttccacctcacaattcccaaaagaaaagggcatgatttagtttcgatgtattgcgttacagaccaattccaacttattaaggcctccttatgtgttaaaacatatgaaaggtggggtatgccttaatagctttggggctttctatttagctcaacaactgttggtactaatctcacaattgaaaacctcaaccctaagtttttgtttgaggcacgtaaaagaaactatgttctgcatatataaatatatattttatacatatatagataaaaaaaaaaaaaagaaattgaaaaaacaaaaataaaataatgggttatagtgcttaagcctccatgtatatgtcggtgaaatcttgaaga

SEQ ID NO: 84278 - DNA, 745 bp, Cannabis sativa
caagtgttggtagtgcaactaaaccataagcatgcatatacacttaacacatatatacattcagatattcatattacacattatacacatttcttatcttctttctagattcaagcgtgctggccaacctgaacggaaagtgtcgcgctagatggatgccctaatcacataataaaactgggtaaatcacatggtcgaaaccctaatccgagaaacccaaacccaaaaccctaggttctgttatactctcatgagattcatctaactccaaaaacagggaaacacccaactacggtactgaaatgcacgagaattgagaaaatggaacattcagggaatcctacaaaaattggttaaccggttttactgagactggtaaaaccggttacccagtttgcaccagttaacccaaaaaattccatttctttctcaaaaccccaccaaatgccaccaaaccttccagagtgccttattagggtaaacacaatattttccaaccagtaattcacataaaaaaccaatgtatcacaatatgacattaaagatcaaagctcaaacttgcacaaaacctaattcaaacatcaaaaccagctgctagaaactaaattcaactcaaactaagcttagtattcgaattgtaacaaaacctaaccctaacagcccccgtttcacaaaatcacatactcaaactaaagaaaaggcttcaaaatacatattcaagggctctaggggtttacctttgctt

SEQ ID NO: 84279 - DNA, 1204 bp, Cannabis sativa
agggcataaaacccaacaactcctccaacaaccctcaacaagctgctcacacaagggttcccggagccaagcattctcaaaacgaaaagaacgaaaagaaacgagaggagtgttacctttaaaggttagcaacaaagggcaatggtcacttgttgagaactccaagttgagtaatgatgattgtggaaacgttgatagccaagaattggtgacgagagctttgtcgagtctttcttcaatccactcgatactatttcttcctttctcccaagtgaacgggtagccaagaagaggcatgtcaatcagattgcaatcgtccaaggccttaagaaatccctcaataagtcgatcaggatacttccttcctcctttcttctctaaatgagaccccaaattattcatatctcccaacagacaccatggaagaaggctatcatttttgagtgaccgaaaaaggtcccaagtttgagaccgaagttctctttttggctccccataaatgccagtgaaacgccaaggaggcagccccaccatttgaaccgtggcatctatatgatgaaaagagaaaccttgaatgacaacttcacttgcttctttccaaagaagagcaagcccaccgctgtgaccgcgagcttccaccacaaaacaaccttcgaagcccagttgggctcttaaactttccaaactagacttattacataatgtttcacaaagaaatagcaaatttggcttcttttgagacacaaggtctcttaagaattgtgaggctcgcaggttcccaagcccgcggcaattccagcttaaacaactcattgctcttggcgggcctaaaaactagagcccaccaacccattttttgaaagtctcgaaccatcttgctccatatcatcttctgtagccgaaactccactcatacgtggacccccaaagtttcctaaagtggaatcgggccttcttctctttgagtcaatcattgtggtaatagtagaatcaaaaaagtttccattactattgacatttaaagtcaaatcttcctcaattattccttgtgtcatcttgctgatattacgcccatcttttggcacagtatcattaaatttatcattgccatgattcttgcctatcaactccccaataatctccactgatctaggaccagaattaacaccctgtgcagagctgcttccctgagtttcacgcaccg

SEQ ID NO: 84280 - DNA, 1165 bp, Cannabis sativa
aatctagatagataatatttttgcatgaagtattttttttgtaaagattattttttaagtatttcgaaaattgtataattttatattttaatttttcgtaatacaatatatacattcatatagaaaatttaaatttgagttacaaattaatttaaattaatacaacttaaattatatatatattttttaatatttattggaaaattaatactaagatgtaggggtgcaagatcccaaattggttttgtcaagatgtggttacattctcagagcgcaaaaaccgaccaatcaaaagtataactataggcgtagttgtttctctcaaccttgaaaatcaagatgacatgatacacaagcttcctaaaatagttgacatacaagcaagaatcctcaagcaagacttgcccatattcaccacaacgttgatcttgggaggagtaccgaaaaggagtgaagatcaacttcacttgtgtcgtttttcaaaagataattcgttggttacacaattgaaaactggctttaagattcatgtaactgttagagatcgaccattcatgaaaggagttaagctaaaaaagtgggggatttgtttttcttatgaagatgatgatgattatgagggaaatgaagaatatttgagtagaattggtcgagaatccatttctgagaagttagccaagttcttcaacacctatgaagaagatgatattgttactgaatttgacataagtgaagttcaaaatacttgcacaacaccacaaataatgtcttcatctaacacaaactattttcttcttattgctctttcttttttatttgttgggatcggttggttttatatgctcataaaatgaacctaatggttttatatgctcataaaatgaacctacagtacttctagtttgtcaacttttcacatggtttagatgtctttgttaattgtttctttaggctttctagagaagaatgctgtactgttaatatatttatatgagcatagtttaacaataatcactaatttgttttgacatagaggtttatgcttctttctaccattccttctacaataagggctcgtttggagccatgtataagtaccctgtattgtattaaattgtaatattacaatgtttggtgggaccatgtattgtaataaatattacaa

SEQ ID NO: 84281 - DNA, 1241 bp, Cannabis sativa
aatatttatttttagcgacataagtacccaatatttataaaactgtaatttttcttcagttttgtccgtacagactttgttttaaatttattgaaataacatttagaaataactgatactacatgtttctgtctagacccaatgattaaaaatctagaccttgtcgtatgtttaagaaaataacaacacgtttgtatggacgaaattagagaaaatttacaattttacaaatattgagtacttatgccgctaaaaataaatattgggttatgccgcctacaaacttaaaattttagatacttataccgctatttacttaaataatataaagaaaatgccaatgtcaaaaccaaacatgagtacacttaaaacagcatgtcgttttggagaatatattacatcatcaaccagtcaatatagatgtagatatatatcagccaaaaagagtggactcatataattatatattgaaggacatcatagatgtatttaactgttatatattaatttcaagctagcgactcctctgaaaacaaacaatactgttcaggattatatctctactaaagataaagtcctgagatgacaatattaaatttaagaaataattggaccctatgcaaaatgaactttattttaagtttaccaagtaatataataatatgaggtgcaacttcatgattttaatatatgaattgctgcactttcatttattttttctatgatgatgtttattgtatagttagtttattaagatattttataaaattttgaaaaatttaaaataatttataatacagaaaaaaaaagttcaaacaatttatttaacacatttataaaataatgtaacaaactaagtgtaaatattattttgaatgtaaattttttttaactacatgacacactgttatattatttgaatatcgaaaatacgaaaaaatatacattagtgcattagggagtgttatactaatataaaaaggtagagtaacattataaatctatgtatatatatatatatatatatatgcttaatgggtactactcatgaataggtaaaattagaaaattttgagtttttatggttaatttctctatctaattaaaaaaatctctcttttttaattatctcatatgagctgagattgtgccatcggtaaaaaaaaaattaaaaaaagttttttagcaagaaaaataagaaaagaaaaagttgagtttgagttaaatatttttgtatgaac

SEQ ID NO: 84282 - DNA, 751 bp, Cannabis sativa
aaaaaagtgacatttcttgtagtgatatcaatacactagctaattaatgtttctcccgttgcattaactttattttctatattttcaatggtggattttgttagtgccttaattagatataaaatatatatgaatcttaaactcatgttagaatatcaaagttactctatatgaatcaataagatggaagacatacatgattctatgatattggatatgggatgagatagtgggtacgtatatgatctcttacaactaatcttctttctatgggttcttacttaattgatggaaatagagtagaagagtagtcgagattagccttgaggaccactcttatgttctttatatagcaaactaattagagctccataaaccctaatgtaggatttttgttcccaacttgtccctacacacaacacaagattaatcaaaaagccaaggtcaaaactgacctttacccagtcaaagccctcctttttgacctttgctcattaaaccgaacgacatccctttttcaattgtaatacaggtcgtttaatacatatgtcaagaaaccctaatatcaatcatatatatatcttttctttatctctcacactcaaactagaacctagcagccaccttcaacgttcttctctgaacaacacaaaagcaacagccacaactaaatacccagaaaattaaaacccagcaacacatataccccaagccgaatcctccttcgtcaatgttcttctatgaagaacat

SEQ ID NO: 84283 - DNA, 875 bp, Cannabis sativa
  modified_base (813)..(814): a, c, t, g, unknown or other
aaattagctcacctactaactgatctgttgccatcccacactaatggaaacacattttagaatattttctaattttaagaaatgagacaatttttcttcccattatatatttaataaaggggtatctttttgtttgataaaatattattaaaagaaaatgagtatagttacttttgacactcttttcctacaaaggttcgtagagtagaaattcataaagtgtaatattggagatttatgtaatgtaattggaataataaataagatttgtccttctcaattatgacattatttttttctttttttgcaaatttttgtataactataaataatatatacgattatattttgctaaatatttgttaatgttgtactataaggtgatgctaatttatcacaatttaagagtttagataaaaaataaatatacacaaatattataatctaatgaggaattatggaactatgtactatgaattttaagagctaattagtaccatctccaactaaagatataaaatttatgctaaatttagttcaaaaaataattcaatattatatttggctcaagttttataattgtgtctccatatattaggagtaaaattaactttattttttattgcatatatataaaaaaaaaatcaacaacaacattagattttaactgtaaatgtattaaaattttattaaatatatacacagacccgaccctaggcgtatgcgggctaggcgcgtacttagggcccactcattttgggggcccaaataaaaaaataccttttaaataatatatattttttttaataattnntaaaaatatcatttatctttatagttaggacccaaaattttttttacctataattcattcc

SEQ ID NO: 84284 - DNA, 840 bp, Cannabis sativa
  modified_base (752)..(758): a, c, t, g, unknown or other
ccatttgcatctcgaaatacttgcggtgggataagggatcttccttcccagtttatatcttccaagttggcatcttaaacttgtggggcagttctaggatattaatctcgggggaaaagggggttccacattctcagtccaactcgaggtcgttgttcctctgatccatcaggccttggaacatattttttagttcgtccaactgtgcctacacagttggactaacctgttccgcctcttggccgacctgagtcacatcatcatctctttgagcgggattttgagcgcgggttctgggctgtatgactggtgtgtcgtgctgatcatccacccctctccttctattcagatcatctcggagatcatgaactgtccccaaacgattaaatatagaaatctccggctgtctgagggattggttggtttggctcatcaactgcccaccaccgttaactttgttggaattattgggtatgacttctcctgatgaattactagacaaggtctgcccgcctaccgcttggcccacaggcggaacttatgaccggggattaggcggctgaccatttatagtctgagaggcgttcatcattgcattattgtcggtctcgcctagggggatgacggttacaggctgttgtccagttttctgataggccttttgtattaacacagtggcctaccaactacggtcatcaatgactgcttgttgaccccttaacgtttccatgtccttgttgggttttatgccnnnnnnnaaactccatttcaatgtaatctctattcttttaaatatcaataaagaaacagaagtatttatcactcatttgtgtgtcattt

SEQ ID NO: 84285 - DNA, 567 bp, Cannabis sativa
gggaagaaggcaatacaaggctccctgaagaatgcttgggcatccatctcaggctggagctggaaggaacgtgacgacggacttcttcagttctctttcagaactatttttgatgctgaaaatgtcctactgcggaggccatggctggtgtgtggatacttactggttcttatgccatggccttcatggctcacacatgaggaggtctcatttgaccataccccaatctgggttcgtctgaagagtattcccccattttactggaacaaaacaaacctccaagagttggctggaaaagtttcatcggtttatgagcttccccggtttattgaaaaaaactttgaaagaggatccttcggtatgggcactctacgattcagagccacggtagatttatccaaacctctattctcgggattcttcctaagacgtccaggcatcaaagatctgtggttacaataccaatacgaaaagctacccaaaatttgttacaagtgtggtctcatgacacatgaacataggttttgttttaagaaaccaacagtgataaaagatgataaaggaagc

SEQ ID NO: 84286 - DNA, 1256 bp, Cannabis sativa
atgatgatgatgagctaattactgatccttttttggttccaccacatgaattctaccaatttaagtgctcacagaaagttgatgcatggtacaataatgagtggtgggagggtcaaatttcaaaggttttaccttcttctttcagttttaatgtctacttcaaacacaccaatcaacacatcacattcaaatattcttatctccgccctcactggattgaagaaactgcttccaactaactaattaataccatatatattattcttttgtatgtaaaacaaacctttttttcatttaattaatttataatatatatatatatatgtagacaaaaatgcatgcatgcatgaacgaatgaggatcagcatatgatatgtgtattttgcctctttacatatctgcatttacaataattataatgtatttatttagtgtatacgaggatcagcctttttaatgggacaattgttggttttctttttctcaattttacaatgtgatttattaattcaaatattcaccattattaattctatttattaaagtactgatccaatccaaacatttcttttacactctacaattgtatgaatcataaaacaattacaactcagctatacaatccaaagagatatataaagcttcgacacaatttattaattacaatttcaattcaaattttactctaacaataaatacgaattttatctgataataaaagtttgagtgcttatactgtccactcccaataataaatgttatacattataatttataatattaatttttcttatatatgatggtgtgtgaatgagaattgttaaaaggtaccattgatgtctagtgcctttctcggtgtcatactattatttgtataattaagtattgattcacatataacttaaaaaaaatagattttaaggtgccatgcctctcaagacacccttgatctatttgggccgaggtgatcatcttcctatattttggttgaagtgatcaccttggcataacactccccttactcatgttaattttctcacctcccctatttgtctttacaaatgtattttggtgactattagagcgatgacaaccatataaacgaggaaatctagctctcatttttccttggcgttggccttgagtaacacttcttttcattttgagctatgtacctccaatatggagtttaaaacataaggtggagactcctgacttccctagctatacatgtttcgagttacctatctcatccc

SEQ ID NO: 84287 - DNA, 546 bp, Cannabis sativa
cctattatgtatttgatttaaattaccatgattatcttatagatggatccaatgatctaaattaatcatagttaattttcaataaaccaaaaaataatttgtaacaagtaattttgcaaatttttttcatctttgttataaacctagttacatgatagtccatccaaatcaatatttatgtgagcctatatgtttgttattgggtttagatgcatatagaagcccatttaattatgatatttaaatagactaggttgttaaaaataaaatgatcaacttggtaattttatttaagcccaattagtataaggcttattcaattaataacaattatttatttaaaggttaaattcctctcttttgggccttgtttgagatctaggggaccatagtaatgggtacgacatactaaacccagccctctctcacatgaactaccccgactgtgaagctttatttgtcttatttaaataattgtattaggctaattatattagtttagcctaattaaaaattaattaacaacataattaattttaaaataaa

SEQ ID NO: 84288 - DNA, 1329 bp, Cannabis sativa
  modified_base (1276)..(1284): a, c, t, g, unknown or other
tatataaaccacattggagtttccccattctagctgactcccatctcctacaggattctcgctagtttgaaagttctgtacaaaattttgaattgggagtgtctgacaccaatagaaattgagtatctctactcagtctaggcaattccatcgagaaagaacgctgttgtgggctttatctatctcgatactcaccttggcgagcctaaaattattgtagacttccaaaataaagtgtctttcaaggacagcttcttctagacgtctagtctttcccccatcagcacaaccacgtttcgcaaactttgtaagtgattgctctcttcttacttgtttacatcagtcttccttttttaactttttttttactaatgttttgtttgttctggcagctctattgacgagacctactcctacccccgagaggcttagtaggcaaaggcgcttgttaactcttccctacggttttcggtcatgcaacttccttttgagcaaagttaacttgcgatcggtgggacttctccctgataaagaatattcttgtgattagaagattcccaagtattcttcttggcagtagataattgttccacctgaggaccaggcctgggatcgcttggcccaagcataataccttcaaagcactgcccctcgggaatctggtgaaagagcatcctgaggtaattaatgttgctggtctcctactgtacttagggctgagcgtatcttaatttttatacttggaattcaattcttatggaccgcattgctcagaagtttgacagttggcatcctagattcgacgtccagattaactatcatgagtcactttatggtatagccgagcaagacggtactattgaagatagggcaggtcacatatatgcgagctgcgatttagagcccatcgagccttttgatatattcagaattacaggctgtagggattttagtgcatattattgtccttctaccccttcatctagtgatagctcgccttctaaagatttttgtaaatcccttaggtggaaaataattctcctctctctttttaatcggcctttataatgattgtaatgccttgtcttgttttgcagacatgggttatgaagatatcattgactagaaagggaagaaaagggcaaccaaccctagggcccctacagctgctgaagtagttctcccaaagaaataaaggaaacccactgcccataagaagaaatcactggccgagaccattgatcaggaggtctctgttggaattaattttaccagnnnnnnnnntctactcacaagtatgttgattgaacaacctaaatatgaacttct

SEQ ID NO: 84289 - DNA, 694 bp, Cannabis sativa
ctcaacaacctgtgtgagtctttcaacaatgcaatacttgaggctagagacaagcccataataaccctgctggagaagttaagatattggctcatgtgtaggtttcaaaagaaaagagagagtgtgaagaaatggaaagaggaatatgggagaaacatatggaaaatcatggagcaaaacaagaaaattgcttcaaattgtctagtaacacagtcaacagaagtaattttccaagtggactgtcctggtacagttagctatgctgtgaacttaattgaaaaaacctgcagctgcagaaggtaccaacttagtggaataccatgtggtcatgcattagcaaccatatggcaagcagggcatcaagtgaaagattatgtctcacacttttacaagaaagagatgatggtgaaggcctatgaaggtgtcatacacccaatgccaggaccacagttttggccaagatcggtctcaatccaattcaaccaccagctgagacaaacctaccaggaaggccaaaaaagaagagaaggagagatgtggatgaaccaccagcagcaaattcaaccactttaagaagatttggacaagttcacaaatgcagtaggtgtggtgttcgtggccataatgcaaaaaagtgtcaagctgatccaactacacaggttattttttctcatttaacaactacactggttga

SEQ ID NO: 84290 - DNA, 624 bp, Cannabis sativa
  modified_base (527)..(529): a, c, t, g, unknown or other
tgttgtgtaagggtgacagtagtatggaaaaatatataggaaggggagatacttttgtggacaagtattttagtgatataactgttaactatgctgctgttaaacaaagattcttgaatagtatttcaaagatgatgtatttgcttttagaatggctgtgctttattttgttacgaatttcttgcttagtaagcctggtcgcaagaaagtagatagtgggttacttcatttaataagacttggtgagtttaacagttttccatggggtaaggttgcgtatgatactactttgtatagtttgaggactttttttgaaggaaaaaacaagaagaaagttgttaataagacgaagggtacagttgcttcgaaggcaaaagggaagaataataagggtaaagaaaatgattacaatagtaagacgtacaaattgtgtggtttcccttttgcgttccaggtttggctctatgaggttattcctctttttaagaagcaaggtttctgcacatatgattcttctccagattatnnnatgtgtaggtggagtagtgtgggtaatcctttctcaggtgaagtggagaagaaaatatatatgtcaactaaggtatgtttttgtgatatataatt

SEQ ID NO: 84291 - DNA, 719 bp, Cannabis sativa
  modified_base (657)..(662): a, c, t, g, unknown or other
tttttatgtgtaaaagtgaataagcccctaaaataatatgaaaaatgacaaaaaatgtaactataaaaaaaatataacttaaaaattgaaatggaaaataattaaaaaagtatatttttatttgttaaaacttttatttgaataaactaaaaattataatttaaaaatcaaaatttaataaattatttatcaagaaaatttttaagttttggcaaaaattgaaaaaatacaggaatttacattcatctaaaaatacaaaaatatatgttgcattcatttaattttttaacacccatagaaaaatagaaaataatgtaacactaattttaggacaagctaaagtgaaataaataataaattatatattggatatactataatacttataatagtttctaaaccatgtgagatttttgttttaaaataaatttactgatgattaaataattcaaaaatgagaaaaataaaggaaatagaaactatgagaaaaagctcatatgtgattctacatcaactctccataattctcttttatatataaatatagattatttatcttaattattatattcgtgtatatgtgtaaagaccgcttagtttaatttgaaaattagcggttaattaagatttgattatggaaattatttatagatattnnnnnnattatttatgttgttatatttgaattctgaatgcattttatgtcatatagtgaaatt

SEQ ID NO: 84292 - DNA, 546 bp, Cannabis sativa
agccttctcggttttagaaaaccgagttttgagggtgtgaaccatgctggaaagcataaagtttagagctgtatcatttgctttctgccaactgattaagactcaaatttgtatattttaagcatttaattgtgtacataaaattagtttaattaaatattttcataattttaattgaaaaaaaaagtattcatttgaaaatatttaattaactttaattatgttcctagatttgagttaaatgatttacagttggcattcttgaagttgaaaagcccaagcaacaaaagaaaaatggtattcctaaaagaaacttcatatacatttggtccaaagtgaaagcccaattcaatggcccaatcacatctcctttattccatggcatataaaggaatataatggtcttggtcaatcacgtgtaaactgcctagaagtgggccaaagcaaggtcaaagcccaacatatttatgcaaatgatcaagagcccactcttcacacaacatctcaatatcatatcatttgaacgtgtgagtggacttcagcaaa

SEQ ID NO: 84293 - DNA, 1732 bp, Cannabis sativa
  modified_base (257)..(270): a, c, t, g, unknown or other
aaataggggtagtatatatcaaaataccactacgacgagtagatcacacccatgctaactgtttgtcaaaacggtacacgatatcaccagaaagttattagaaaggggtggagctacaaaatcatcacctgaaaaagtagtgagttgggcaaaatggttaagtataggttgttctcctcaacgagctgagtctagtggtgaagaggactcgtcaaacggacactggaggtggccggaaaatccgttcaaagtttgannnnnnnnnnnnnnacttgcgatcccgagctaacagcggcgaaagcagcggcgccgcttgggggttgaggtcgtcggcacttggggtttcgattggtccgacgcgtggggccagacggtggctgcagatgggtcaccggagtcacgccagtgatgggatttgtagttttctcttgtgatctgaagatatatatagatagagaaagagagagagagagatgatacagagagagtttgagggaaggagagagaatgtgtttgaattataagggggtatttttggggttttaaaaaaaatatcatagtttttagtttaaaatattttagtttaagaatatatttttttaattttttaagtatataaaatcaaatttccctttacaaaaccctcatacagtgcaaagaatatgttattataattcacaacgctcccatcatatatattctcatacatttttttattagtaaaatcacaccatacacaacattaatgccattaataacagtacatattaactaaacaggtaacagtactaacgcataatgtaattgtaagataagatctaaaatatcattcaacaccacgtcattattagaaacaaacaagtcacaggtctacaccattctggccaagttttcaaaaagaaaacaaaaggtagtttaacttttatttattattttctaaacgaaattaagtatatcttatttttccttagctagttccactgttgtctctatcttccacaatcaataatgtgaaaagactcctgttgaaaattacaaagccacttgtcacgtagctataatagctagccagtactccatgcaatgcatatataagctatacatgttaacaatataataaaaagaaaaacactttgtagagaatttatgataatgatttacctggtaattaatatcgtttttaaatcatgtctcttaaaaatttttacttattacaaaatttactccacaattcctattacagaattatgtatcatgcattgagattttttttttaaatcaaaaatgtatttagctagattgatgtgatatgtttacctatataatataattccccaattatttttaatcattttgattttaatgatattttaattaccaatattataatttaaaattaatttttaattatatgtatgtctaattatttcataaaagtatataaattaattaaataattttattaatttataaatggttctaaagattttatcttaattatttttttttttaaaagaataagcttcaatactaaaagaaaattgatatagacctctacaaatataagaacatattattattgggtatcagtagtgtgtatgacttattagatgaattgtcttacgattaactaataatattctcaaaaaaattattacattaaattatataagatacaatacttaattagacaaataaaaaattaacagataaaatttgctgagcactacaa

SEQ ID NO: 84294 - DNA, 833 bp, Cannabis sativa
cactaaaatttttcactagtaacattttttaaatgtcactaaaattacttatttaatagacattttaaaatgtcactaaatttaatattttgtgtcatttttacaaatgtcactattaatttatttttgtaacatttttaaaatactactaaaattatatattcacaaattagtgacacttttaattaaatgtcactaaaatacatcaatcgttacatttaaaaaaatgtcactaattaaaatgtcacttattcttactatagttacatttttaacaaatgtcattaaaaagttattattgtgacatttttaaaaaaatgtcactaatttagatttttggtgtagtgttagatgcctcataacacgcaacaaattctactgccatagtggatggaactatgagtatttattttgcactcctccacaatatagctccaccacctaacatagatatgtagcccaaagtggatctcctactatcttggcatctcacaaagtcagagtttgaatatccaatgatctcaaagtgatttgacctcctatatgtgagcatataatctcttgttctcttcaaatatctcataacctttttggctgctttccagtgatcaattcctggattgcttaagtatctacctaacagtccaacaatgtacgttatatctggatgcgtacaaacttgagcatacattagactcccaacggctgaagggaatctcttgcattttttgaatttcaaggcttcctttagggtattgtttcagacaaaatttgtctcattaaacggcagtgtattacgtggtctacaatcttgcatgccaaactgtttgagt

SEQ ID NO: 84295 - DNA, 758 bp, Cannabis sativa
tgtgctcacttcccttattgatgtcgccgtcttctgggtctgtgggatcaagatcctcagtttcatcttcttcttctccttcatcaatgggatcaccgtgaagaccttgcttatcgtgttgatcttttcctttccgacgtcttgttgcctcagtgggattctcattgagtcctattttggcattaagatcaacatcgtccatcaaagtgtcgtgataatgaagaccaaatttagtttgggagagagtaccataattatagcgtgtaatcgttgatggtatcactgcctcctttagctcttaatgaaaatactaaaatatttatcgaatttttcaaaagctaataatttaaatgtaagagccaaagaaatataattcaaagaaaataaaatacgaacactcaaggattttacatggttagggcgttaatgagtcttagtccattagtcaatattattgacagaggctagaaaaacctaagggattacaataaagtatgagcattctattttttgcatgagtaagtgagccacgaatttttaaccctttgcatgtagagtttgttgagtatttatagtgtatagaggtcatactagtttgttgagtatttaatcctggtggttgtattttagagcaagatatctggcctaatttaaggaatatcttattttctgaatactcttaatttaatgaagttgatatttcgttcaaaaaaaaaaaattgtattgctaaataaatttttttttctcaaaaaaaaaa

SEQ ID NO: 84296 - DNA, 836 bp, Cannabis sativa
taaaaatattgaaattgaactttgaattcaaaggtaatataggatatatatgtcattacaaataatacaatgttaatttaaagggtaaatgtgtcattaaaagtatcaccttatatattattacaaatacccttaaaatattaaaattggactttgaattcaaagataatacaagatatatatatgtaaataatataatattaatctaaagggtatatatgtcattaaaagtatcacatgattaagacacatttaatatagtaagaaataaagaaatgttaaagggatcagtggtgcctagcaccctcttatgtgtcaatatcgctattagtctaactaagtatcatgtctcatataatttaatataatagcttttaaagagtatcgctagtcaatggcaacgcgacatgttgcaaaagtattaggctaatagcaatgctcaattaaataatataaaatttgtgtttctgtccacgtatttagtgtatagtgttttacaattaaatattaacatgtagtcaacataaaaactagactttccttccttacacaaaatcataaaaattaatttgagtggttggaaagttctggttggtactagaaaatgaaccaattcttactgatgtcttcatgtgaatggaccaatccaattcatttcgtatgctattacatcatcatttacttagcagtgaatatttcccaatatattttttttaatatatacaccaaattcagtcataaaacaaaaattaatgatattttgttaaaaaaaatatatatataatcatatatttattttataaaaattcttaaaaaataaactcaaaacttgatta

SEQ ID NO: 84297 - DNA, 608 bp, Cannabis sativa
agaatgatgagtaaatttgtcaaaccagctacttgcatcttcagttaaggaagtcgggaataagatgcaacacaaattattcgagacattgcttgctcgcattatagtattaatgttattcaagtgagcgactggatccatagttccatcatactatgagacatgcgagtttttgaatccttgagggaattcacaatttaaaatatcaggatgaaacgactcggtttcctcatccgagtcgtaaccaggcaattttccatgttctccatcctgatactttctctccagttcaattattcacatttggatgggatctacctgctgttgatttgcattctgattaagttgatggtacaaattaggtgcattttgatgcactcgctcgtgaagattgggttgtctttgattcaagtgctcacaaagattaggctgtctttgctcgtaattactcacagaccttgtctccgagtaactctcagatttgtagcttcgcatattactcatgatttcttggtcagcataacgtcgaggtctagttccctctcgcatttgcctacccgatcgactatgtcctcgagaccttgagtgtcctgaactagaacttgctt

SEQ ID NO: 84298 - DNA, 1142 bp, Cannabis sativa
ttcttctcattttttaatatttttcatgttttttataatatgagagtatattaaaaaagtctcacatggtttaaaaattattgtgggtggtatacttttacattatatagatcattattctgttgttttggtttgttccaaagttagtattatttattttttatgtgggtgattgataaacttaatcttgtctaattagtaataattttttttaatagtaaatgcaaaatattttttttgttgtttttttcaatatttgtcaagtttaaaataattattaataaaatcatttaattattttttcatataaaagttattttcttataattatttattttaatttttaattacataattaaaactatattaattaatacatgacattttattagaataataagactctttaaatatatattttcatatgtgcttttggtgagatgagactttgtgaatattaaatttataggttatatatattttatttgttccaaaattaataatatttatttttacatattttttcactatttaatctttgtcaaatacataaaaataatatatatttttagattttacattattaattttgttgattatatctttattttcttatttttcaacaatttttatgtttttagtaatatgagagtcatttcacaaaaatcccacctggtttaaaaactactgtggatgatataattttacattaaatagatcaatattattttatttttatttttcacaaagttagcataatttattttctatgtgggtgattgataaacttaattttactcaattagttatatatttttttttcaagtgagtgcaaattatattttggtattttttaatctttatcaagtttaaataatcgcagaacaatcatttaaatatttttttcctattaaaagtattttttttttgatcaagaagaagaaaaaacttcaataatctaccaccaattacaagcaaactcacttcttacaaagaagcaccaccaccaccaccaattataaaagtatttttttataattctatattttattgtctttaaataataaaaactatatgttaaatttataggttatatatattttatttattctaaagttaatattatttattttcacatattt

SEQ ID NO: 84299 - DNA, 1090 bp, Cannabis sativa
aacctttagtaacacaacaattccttcaaccccgaccaccttcttttgccaaacataatcatttcgggcttgccatatagcccaacaaaagcctgaaatcagaccccttttgtttgtatccgcaccagaaaaaatatgaacgcaccagtccaaaaaagtactggtattcgaccagttgtttgtaccaattcctacccggtcccataccattttaatcttggagcaggtcactaaagcatgaagaattgtctcttcgtcaaggttacaaataggacagagagaagacacatttaccttctttgtttgaagttgacagagagtaggaagacaattttttgcagccctccacatgacatttttgatctttgggggaattttgagtttccacagtgaagaccagaacttggagacatcatcttcattgttatcccatctaccattttgttgttggagtagattataggcactttttaccgagtaattacctgaagtttcagcagcccatattaatgtatccgtagctactgtaggttgcaaaggaatacttttaatcagatttacttccctatcatcaaagaagtctctcaagatctctaaatcccagcctgttccatctatgttcatcaagttgtgcacgttggcatgaaccagatttgggtgatacgaagtgacaaaaggattctcagtactaggcaaccacggttcttcaagaacactaatatctttgccattccctacgcaccatcgaacacctttgttaactagctgctttgcttcccaaacactacgccatacaaaactaggattattacctagtgccgaattgagataggaattgtttgggaagtatcttgccttgaaaatttttgcaaccagtgagtcgggttgagatattagtctccagccttgttttccgagaagtgccaagttaaaatctcgcaaatgccgaaagcccatgcctcccttcttcttgtgcttacataatctatcccaagatagccaatgaatacctttactcgacttgtccgatgattgccaccaaaactttgtcataatcttctccatttctcttgtgatgtcaagtggtagt

SEQ ID NO: 84300 - DNA, 583 bp, Cannabis sativa
tatatatatgcaatgccacaagtatatataattaataattataataattaattttctaaacaccaataacaaaagtgacatgtgttcaaaaaaaaaaaaaaaaaacaaaaacaaaaatgacatatactaactgtgattctataatccaccccctaaaagaggtgcactgatgcacctttacttatttcggcatccaaaaaatatttttagtctattttttttttcatattcgtttacgttatagttatttaagatatcttacaaaatttaaaaaaatttggaatagtttacaatatacaaagcagtgttcaaacaatctatttcacatgcgcataaaataaaatagtcacgcgtgcaaaaatttaactaaaaaattatttcggatgctaaaataaataagagtggatcagtacatctacacttttagggcgtaatactataattgttctttttatatatatacatatattatatatataccaattacctgtaagtttccaattaaatacaaaaagagtagcaagccaatgatagaaatagaaatggcaaagcaattctcccaaatatagttacttgtttccag

SEQ ID NO: 84301 - DNA, 1004 bp, Cannabis sativa
aaaagaactttttaaatgattacaagagtattttcatctcaacccatttttgaaaaatttcatgctttgggttttggtagttcagaactttgacgcacatcattagcattaaatgttctgactgttctcttttgcaatttttccatctgttagatcaaatttctcttgatcgaacggttattaaaatttaggtataaaaattgggaataacaatccatttcaccatttttgtatttcaaactttaaaatcttttctgtaaatcctggttgttttctccttaaaatttgcatgccctcattgtccttcacatatttcttgcgtatttcaatcgatatcaatcatcatcccagagattttcaagactcaatctcacgattttcagaaaccattatcaggcttttctctgcccatgaattcccaccataacggcaagtgatacatcctcatcttcttaattgttttcttttctgaactcatattcttgctttcttcattgatatctttttaatagtgctatttgattatttttaggtaattttattttggtagtttgtataattttagggttttaaggataaaatctaggttattcggctcatagattcttgggttaaattgttttagattttccagaaatcgggataatatttgcccataaacatgacccaatttattccagaaaaaacaatcccagaattcttataaactaattgtcctaaaaattttgcctttccctttgaatccaaaacttatgttcctaaaactattcttgagataaacgatgcccagattagatatcatctaataaaaaccaatcaggatgaggtttcaagtcgttatagacaatttttgtaagaaataatcgagaaaaaatgtcgttttatgcgcgaagtagcttggcatgaaccccaaattttatcttctattccttttagtgagacccttctttttacctcgagtcactgttgctttttcaccaggtgactttgttgggttttatgcc

SEQ ID NO: 84302 - DNA, 1449 bp, Cannabis sativa
attgagaaaggagggtactcccccctcctctgtgttagcattgttcatctctacattctccctactgttttccactgtattctcctcactttcaagcacccgaaatgaatttttgatcactgtagctgctatcttccttgcattttccccatattgtccgagcagtagtgaccttagtaaacccatcttcatccacctgctgcttccccctatgatcttttttaacaatccattccttttttccaccattgttcttcctacactcagctgctacatgtctcaaaccagaacagtaagtgcatgtggtcggcttccactcatatttcactccaatggaggtattgaatccatgttcatcctcaaactccaacaagtctggcaacatctggtccatattaacttcaagaaggctttgaggatagctcaattgttccctctctctagttatagcatccaccattattggtttccccatttggccaactattttaaacaaggacttttccccccaatacttaatttctaagccctctaactgaaaccaaattggaacactatgcacatcttctttgctgaaattagtattaggatcccatggtttcataataaccagccttcgattaaagaagataaaacccccattctgcacctgatctctatactccatattgtcaaatctgattatgaatataccataacaaagtatcttaaccttgtctactttatcaccccaaactctctttgcaaacccctcaattatctgcaatttgaacccaacacataccacaattgaaggttgccaaaacaacacctcatcttctatatcctctaatgtaattttcacctttactatatgttcttcactcttaaaagaactatccagattcctcatcactgaaccagatcgaagaacagggggaatggaggacttaccttgcttaacgacactgttacattgctcattcgcccttaagaagtgtgcaaagtcacttcgaatctcatcttgcctctgaatctcctttaatgaagctcccagggacagaggttgaagatcaagaccagagtctttgtcgaacacctcttcctccgaaatctccaattccagaatttcatccttttcagcaatcgaacagtccagcacctcatcagtttcaacacgtccaactttcttcttccctctcttgctagcagatcgagactttccttgaattccagatctcgttttcgccatagccccagcttctcagctgcgagagcaagaacacgagaaaagtcgatttcactgtagttatagtagaataattgttgcaaaattatttttcttacaaaactattttaagtaaaaatatattaaagtaattttcttaaatttttttatagaattaatttattttaaatttttacatatataagtatgcatctttgagcacttaaagcaactcttaacta

SEQ ID NO: 84303 - DNA, 783 bp, Cannabis sativa
  modified_base (742)..(754): a, c, t, g, unknown or other
atgataattctatgtatgtgttttttttttagatttcctattagtaataatatttttctgatttttttttttttttgtatgtttttaggtcttaacaacatccaaatacaaaggctaaatccaaaggcttggaagctccaaattatggatatgtttagttatattgtaatttcttaaattttttgtagtttatacccattttgatttagttaagatttttatttatttcctgtgtaaattaagattatattgtaaaataatttatatttttagtataattcagtgtaaccacataaatacacagaaatttattgttattattgaatctaatatttattattttgcagttttaattttttttaagaaaaacaaatataaaatatataatatacattatttattttgtttttaaaaaaaaatatgatatggagacgttctttgagtgtggttgttatcaagaaaattattaaaaagagaaaagatatagatatagtgacactctgtgagtgtggctattgtctttagagtctgacaatgtgagtttttaaaagtctatagtgacgcgcggtgagagagtctaaaatattttagtgacttgtactaagtgtcactgaaaattacatttcctgacagccacattagtgacgcgcaatgaagtgtcactaaaattatttagagtctctcaaagtgggtcattgaatctcatttttgtagtagtgcaagtgtttaataaccattttcnnnnnnnnnnnnnaaactgtatgttagtatggaatatgagtt

SEQ ID NO: 84304 - DNA, 527 bp, Cannabis sativa
ctcccaagattaacactcaaaggcgtctgtttgatgagctccacatcacgggacacaaacaagtcctcaataagctctacattattaaaataataatttttgaacatgtatacaatatacaaaaataaaatattatctatatattattaaaataagtttagagaatgcattatttttacatgtacaacaagttgtattagtttaaatacatctctattatatatatgtgtgtgtaatttaaaggagctaatgaaggccttttttatcacatttaattaaaaattttaagaaaatatctattataaagagactattaagagcactcacaacatctctaaaatagagaagtgttaaaaaatttaaaggactctactaaataggggtatgtagaaagttatccaatccaattacaaacaaccgatccaatcccaaccgatctaatagaatcggatatccaatcatataattggattggattgggtgtaaattttggaaatctaattgaatcggatcggttgttggatggg

SEQ ID NO: 84305 - DNA, 595 bp, Cannabis sativa
tcaaatgttgggaaggtaataaattaaggacttttatgtaacaaattttaattaactaatgaactgaaatgctaatataatttttcaaacagcacattcagatatacaggagacacacatgagtttcttggcctgtggtaaggaatttcactagcaaattgttcaagacaacctaaaaaccaagaatgttgtttttatattttgaaatacatgactgacatcgtcgcacatgcaaaccccaactgttacatacaagatcaaaaagctgtgatttttaattattgattatagtatttattataataacaaatatataatgtacatatatataaattaatataaattattactttttgtaaatagtttggggataagcggcaatacgatccaaaaactaaattgttgccaatatagcgacagtggatagaacgtttgatggcagtgattcacgttgacgattgaggtttaaaggcccaagaattttttttcgctattttattttttaaggttaacttgtagttagatttattaacttgttaatacttgaactaattttacaatgtttgtgtaatatttaattacttttatgaaatga

SEQ ID NO: 84306 - DNA, 1062 bp, Cannabis sativa
tttactattaccggcggaaagtgtactccgctggtaataacccttattattaggggcggatctattccgccggtaataagtccgcccctaataatagtttttgttgtagtgtaacccttgtcaaaacagcaaataattgaggaatttgccagaaaaattccttgagtgcaactggtcctaggactcgagcaaggagaaagaaagaaggttaagttatgtgctttaattaattattttctaagtttatctcttattatttattaaacttaatttaatataaacttatctaaataacgaaacccccaatttcaaccaaaaattccatataggagaaaattaatacccttcaccaaaaggactcttttgcctttcataaccctaagactaaaatcaactcctaaggataatttagtcatttcgaatcaatcccgcttaactgttaattgaaaattctaaactagtccggtataattccaacataacacaacttaattatcgtgacatttctgatcactccgtcgagttttccagaccgccaaacctgaaaatattttattttaaaagtggtatctactatatccacatattccgataaaatctccgtaatttataaattacactttatttaattatttattagatttactttaatcatcacacaattagcttatgtaataagatcataatcttactccaatatcaatataatcacatatttaataaaatatacccaattaaatattgtaatattttgggatattacaattatcccctccttatagaaatttcgacctcgaaatttagcttaataactcgagatattgctcccgcatctgtgactctaactcccaagtcgcttcttcaaccttgttgttcctccacagcatttcaactagcggaatagtcttgttccacaacactttttctttctgtccaaaatctaaaccgattgttcttcatatgacaaatctgtttgaagctcgatattttcatagcttaggacatgagtcgtatcccacacatactttcgaagcatcgagatgtggaacacgttgtgaactc

SEQ ID NO: 84307 - DNA, 1036 bp, Cannabis sativa
ttctccaatctttaatgaatagaacgagtatatagtacaacattatgcttggactacatataatcctattgttgcaacaatcttggaggagaaaactatttgagttttttttggaagataataatcttggaggaaaaatagacaatcttattatatgcagatccagctagaatgaaaagtgcaaaatacaaacattatactattgtctctaccgaagcaaatgaagattaagctcctatttagagtatctttgtttttcttatctacaacttttagacaagtgttatcttcaattatcaacaatttacgaagtgatttttaattttcttttttattttacacacagttaagttgtgttttctttagcatttgaatattaatttttagtttatttttgtattatcttaagaacatattacagttaaattatcaagctttcttaaatacaaaaatattgcatctaatattcttttaattgtcaaaattataaattacattagtaagatatacataataataatctcgcctaataactaataatattttttttataacgctttattatgaaaaaaaaattcttcaattagtattacttttaaataaagtagaaataactagcataaaatttagtatacgtgcttcgcacgtaattttttactagtatatatatattctaaaccacattaactataaatctaataatttttacaagctctcccttctcatcctttctctattcatttttttctatagcataaagcaatttaaattgttagttaaagcattagacattgaagcgtaaactaccaattcaaaatagtctctatttttctaacacatacacaatatacataattatttattgttatatctgattaatttacttattattaatttatattatatgtagttcaaaaatttcaacacatagaaaacacatacacaatatacataattatttattgttatatctgattaattaattattattaatttatattatatgtagttataaaaatttcaacacatagaaact

SEQ ID NO: 84308 - DNA, 622 bp, Cannabis sativa
ggtcacaagttgaagttgctaagaacttgagtgtgaggataaccttcagttataaataaattagcatacttcgagtgatataagcaaaataccattgaacacaattgctatcaatcaatcaaatgtccacaacaagtttagaaaaatccaaaaaacaaaatcaagaccacaatcgaacacacaccttgcttggttgatgcagcatttttatccgtctagcctcttgaacctccttcatcaactcctccaagtcctaacagtcctcatacaaatgtactttgtcagaaaacatttaaatagtcagataaaaaaagagcatgttcatcaagagataaaaaaagtaatcagaatgcttgaagatgtaacactccatcagcggatataagttgactgcaaatttctcaaaaactgaagactaccaaacctagattccaagataacataaactgtaaaatgataccaactgttgtagtatcatataaaattgtatgaaatatcaatacctgagcataagaatataaaaatgattcattgatcatattttacaaaaagtcctaaggaaattaagaaactgccataagaaaactgaaatgaacaaaagatgtaaacctgcttccctgat

SEQ ID NO: 84309 - DNA, 1077 bp, Cannabis sativa
ttattacacgaaaatatattagtaattacatggttagaaaaaatatgtgaaattgtgtagttaccttaattacacctaaatcgaattttatcatgaattttcaaacataccctgactttcgaaacacaactttgtatcgaacttgttattcgtttttctatgtttttctttttatatttcttaatccaatccaatattatttttcaaatatggcatttctttccatattgaaatttcttatgagtgagacattgttgctcttcacttgtttggttaatacaggagcacaagcatataacaatttgagccttggatgggtgaatgtgaaagatgtagccaatgcccatattcaagctttcgaaatcccttcagctaatggaagatattgtttggttgagagagttgcccactatgccgaagttgtcaaaatgttacgcgagctctacccaagccttgaacttcccgaaaagtaagttcactgagcttcttctgagtacctacataacaattattatggttttattttatagtcctcgacgaggaaagagcctaactttgaaattggattggattggatttggcaggtgtgcagatgagaaacctttagttccgatataccaggtttcgaaggagaaagcgaagagcttgggtattgaatacattccattagagactagtttgaaggagactgtggagagcttgaaggagaagaagtttgttagtttctaagtcatattctatagtacaagtgttgtattgaagccctttaaatgacttgttcttaataaaataggggcatttggcttgaggaactagaaggaaatgaaaaaaaatggcatttttactttttcttttccctctttataataaaaaaaggtagtcatgttttttaactagttgagcaccattaaatatcaaaaaatggtactgtgccaaacactataaaatgcgatatattgttgttgttggtgtaatttattatcaggttccacacaatttaattaaataaataatattagaaatcgttagtcacttataacacactacatcgatattttaaggtgcataatagcaatt

SEQ ID NO: 84310 - DNA, 639 bp, Cannabis sativa
ctaactctcacactctcccccgctccctctcactcacctcaccatcaaaccaccaccatcgaccaccataaaccaccgcacccaccacaatccacaacatccttcttcctcaaactacccctaactgccctcgtctccccctctttcttttttcttcatttgaaacccactaactgcccgaatcctactcacccaccaaaatttgagaagggcttggtgttttagcaagagagttgacgtacattgaaagactcgagaatccaacacagattaaatcccatttttgggtaaggttttgatgtttttgtgatttttcttggattacattttgtaaatagaataatgtgtttggattattttttatccttgagtttaagataacttttttgattttatgttaatgttgcatgatgaggtttaattttggggtttttttgagtttttctgctatttatcgatgcttctagacatattaacgatgtctatcgatatcatcaacctttggttatacagtagtattaacgcagattttcgttaactaaatttgagcctaaaagtgacagtctcaaacagaaaaaataaaagctgtaaaataaaaagatatgaatgcaaaggattttttaagtgattttgcagtta

SEQ ID NO: 84311 - DNA, 502 bp, Cannabis sativa
tgatattttgtgttcttgagttgtttttagtgttcttcaatttagtttgactaattagttgttattgtgtaatattattttgaatctaattatttttgttgtttaaatttgagtttgaaagtttaagtaatttgattttgtgggtaggttaattttagatcggtagtttgaatgatttgtatagtttttgttatacaatctagtttagatagaaaacaatgaaatttcactttttatttttttttatcaaagaagaaagaatatggttcttgaaaaaaaaaatatgatcttgtggtttaattttgattaagtatcatagtttgatttaaaaaacttataaacatatttttaagtttttttttatttggctaaattagtgagatttatatattgcatctaaatacatttacaaattagtagtaccaaattaatggcctaatcatgattaatctatctttaataacctgttgtatgttatttatacttgcatggaagattttta

SEQ ID NO: 84312 - DNA, 1143 bp, Cannabis sativa
  modified_base (669)..(677): a, c, t, g, unknown or other
acctagtttgttcaaattaaaaaaatattgacaatattgacggaagaatgcagccatcatggttggtgtttccaaaaatctcagtttactagcttttgagattgatcaagtccaaccagtgcttgattttttttactggcaggaccttagtcccaacgttagtaagattatcttctgttctgaccttctctaaattaaccaggccttctttaatgttctctctaatccggtagagtcttatgtctatatgtttgctcttttcatgataaaatagactcttgcaaaggtggattgaagactggctatctgagtacacaatcattccaccatttatttgcttcaatacaaaaaaaaaaaaaaataccctaaatccataaagcacccttgaatgcttctatggtggccataaattctgttttcgtggtgaaaagggcaaccatagactctaagtaggccttctctagcatatatatagttctagtttttcatgaaaacgtaggaagtggttgatttctttaattctttattcgaagcatagtcagcatccacgaatcttttgaactccagttctctttttgctttctcataggttagaccataatccttggtggaatttagacaaccttacattgattgcagtggaataatatgactccttccgtttagatnnnnnnnnnttgattcctttctgtcacagagcattataaagatctaaatctagatcaatttttctccttcaggtttggttaccaccgtcttctgcactatgattgaatacttgacttgctatgtgtgggcatggcattctattactataggctcgagtatgaagaacaatgaaggaggcaaaatcactatagaaggaactctcatctattagttgtctgacagagaaaactaggtttggtaggttgaattaggttaagttggatgagatgagagcctcatgttcttttcatagtattttgactagggcttaggtttaaattatatggactgaaaaagaataaaatattgggcaaaaaaatcacataatggatggccacttaagggaccattctctagttacaattttgtcactttatttcaactagttattcttcctttaataataccatatttttcaatttaatcctataaatg

SEQ ID NO: 84313 - DNA, 851 bp, Cannabis sativa
tattatattaaattatatggggtccgatacttagttggaccaatagcgatattgatacgtaggagggtgctaggcaccactaatactctttagcatttcttaaagaatatatactataatagttacatatttaatataaccattcaaacttttttccatgtatattatatttatagagatcgagcatacactatttggtttggttggagagataacctccaataaatgttattgaattaagtttccaatagaaaaataattggagggagtgggccatgaacgttgatatgttctgaagactttcaatgttaacactttgaactttttcagaaagcaatggctcaagaaaaaagtaaatctcactataatataccaatgagaaataggaaaaggtagtagtagtgctaacacttttcaatacgttaatattattattggttcaattaagtatcacgtctcatataatttaatgtaataaattttaaagagtatcgctagctaatcagaagacgatatgtttaaaggtactaagtagtactactgatgcctaataacaatgctctatactaatatatatatatactatacaagtatatactacattgtctggtcatagaaaaaaaattattttcggtctcttatttaaaaaaaaaaaatatgtaattttagaaatagataatttttttttgggctctgggcttggtaaggtctaggtacagacctaacccgcttatgcccaaattgaatttgactatatatttgtatcataatgtaaataatttaagggtaaataccattttggatactgtattttataaaagttaccaattagaccccctgttttgttaaat

SEQ ID NO: 84314 - DNA, 570 bp, Cannabis sativa
tactttcctcaaaaagttttctttctattaataattttgacttaaccacgtatgaactggtttttcacactttcattttctcttttattatagccatattattctcctctttggatatgattatattttataaaaatatatttatatatattgcgtgaaactattagagaattgtatatcaacatcaagattatgtttttacacatgtgacggcactcttttagtctttttgcatacatatatagttgtaacgtgaatctacaatattataaattttatttatttagttttattttatttctttgagcgttatgatatggacaatattatttatggtacgtagggttagaatattagattacctcaacttgttgacttatcacttgtgtaattaaccactttggataaattttacttttgtgacttgtgtacatatttgtatttgtaaatattattttcgactatttattttaataaagttattaattgaactttctattttattaaataacaaaataaattttatattttttaaaattgtacaaatagaaccctgaactaattttttgt

SEQ ID NO: 84315 - DNA, 1135 bp, Cannabis sativa
  modified_base (810)..(813): a, c, t, g, unknown or other
gaaagttgtcatataagaccaattttaataactatacatttaggggaaaaattaaatggtattttaagcatagaatttcaaatttccctatatatatatatatggcagcgattccaacccgcgtggtacggctgcgaaatggctcacgcccaatgtattatatatacagtaataaattctgacaaataatcaataataaaggtttctaggttaggagtccacaaatgaattttaaaattaaattataattttggtagggtcatctatttacctgttataatttttaatacttaaatattaggtcttaatttagatattttaatattttactgcttaatattattttttaattatatacattgtattgtatttttttttttgattcaagcgtttatatattacacaatacataacctgggactcgaacccaggacctccaacacacacgcaccctcctatggccacttgagctaccctcaagtggttatatacattgtattgtattgtaacataatcgtgtatgacataacacattatataggttaaaagacacaattattttaataggatacacattatttttttattgattgaaaatgttggccgatttttgttaattaaaaaaatgagtaaattgtggtataaatacctaatgtttcagaatttatacacttaaatacctttttttatttttggaggcaaaaatactcaatgttacaattctcttacatctgttactaccactttcgttaactcataatatagacacgtggagggcgcaaatgaattatatttatttattttattttnnnntttaatattcttaatataaaaaacgaagtgctacttgtttttttttttaaaaaaaataaaagagatacaaaactaaattatcataactgagtgaaacagtgcaatatatgtgaaaattattatgagaactaattttttttaaaacaagtatcatttagtttctgatattaagaattttaagttttaaaataaaaaaaataaatgtaatgcatttgggcgctttacgtgtccatatttatgagttaagagaagtggtagtaacgagtgtaagataattgtaacattgggtatttttgcctccaaaaataaatataaagtattt

SEQ ID NO: 84316 - DNA, 2570 bp, Cannabis sativa
ccaggtttagatgaggacaagtgggaataatagctgaaatcaatggaataggaggctgagaagtcaaggtgggattcagatcagtcttgtgctcatagggaaaagaaaattcatcaaatatcacatccctagaaatatagagtctcccattagtatcaagacacttataacccttgtgatttagactgtatcctaggaaagtacaaggagcagatctaaattcaagcttatgtttgttataaggtctgacattagggaagcatttacaaccaaaagttttgaatgttgtgtagtcgggtttggtgttaaataacacttccaagggagatctatttttcagtaatggagtagggagtctgttgtgtatgtacacagcagtcctaaaagcctcatcccaaaatttgagaggaagagaggcttgagctaagagagtgaggccattttccacaatatgcctatgcttcctctcagctaagccattttgttgatgtgttgtagggcaaggatgtctatgatgaataccattctcagttaggtaggtagtgaatgacctaaattcccctccccaatctgtttgtaggactttgagagacctaccaagctgaagttcagcctcagatttgaaatgaagaaatgttttgaaagcatctgatttctgttttaagaggtaaatccatgtaaaccgagagtatacatccacaaagtgaatgtagtacttatagccattaaaggagtttacatgggaaggaccccataaatcagacacaacaagctctagaggttcagaaatgactgtagaggatgccttaggaaagggaaacttgtgaatctttccaagacaacaagcagaacatatagaaaaaggtgaaattttattgcttattggcatattacaagattgaaggacactttgtacaattctttcagaaggatgccctaatctattatgccacaaagtaaagtcattttgaacactagagttacatttcatacaatttgaaacactgactgtggaattttgcagggtaacagtataggtgctttttctttcaagctggcagtgagtgttgttggtgtttggggaaggtaaagtcgattcttggacactttgatcatgtgtaggacttgggaaaacaggtccaatgtgagaaacatcaaaagtatataggccattcttgtgtatccccatcaacaaagtagaatgggtcatctcctccttaacaaaacacatatcagcatgaaattcaaaataaacattattatccttagcaaattttgacacactaataaggtttttagtaatttcaggaacatgaaggagattattgagcacaagtgggtgggatgaatgatttggaaagataaaggattgaccaatatgctttatagacaaacctgaaccattgccaacaagcatctgatcttgtccaccataatcatagcaatttgctaagttttgagcctgtggtgtacagtgattggtagcaccagaatctgggtaccaattactgtcatttccagcttctgtagtggtaagattgacctgaggtgattgagtttgctgagatgtttgtgaactactgcttgtaccttgattaggtcctgagaaagctttatcaaatcgaaagaaacagtccaaagcagtatgtccaaatcttagacaaagctggcattgaattctattattcataatcacaccagatctaccacctctgaagttattagtattgcctctacctccaaaattcgaattaaaactttgtgagaagtcattacctcgatttgtatttctgaaaccaaactgacctgcattgtattgagaatttcctctgccaagaaattgctgctgcctgtatcttcgaaaagcaaggttggcctccaataatggatcttgatccttcatagtcagattggcactagcttcaaactcctttccagatttctcaattctggattcagaagctaataacaaagcttcaattttcaccaacggtgtagttctcaacacgagtatttgtggatatgacaaaggtatcatattcactcggaaggcctttaaagattgcagccacatgatctcgatcgcttatgacttcacctacagatgcaagatgatcgacagcctgtttgaccttcaacagatagtcattaagacttagatttcctttctttagattctgtagctttgttcgaaactcaaggatcttggaagaaacttgcagcgtgaagtgtttttccagggattcccaaatctgtcgagctgaattacagccaaccatacgcgtaagaagactttcagtcatcgatgatagaagccaagaaaccagcaactgatcttgaacttcccaatcgccatagatcggattaactctgttctgctgtcgatcgtcattgtttaggtactcctcaggtggtggctccttgatgaatctgatcaatctatttcctttgattgctgctaggacctgctgcttccaaagaaggaagttatgatcattaagacgaactgaaatgctgtggttgaagaagactggttcttgattcgagcgtgctctgttttcagcttgagt

SEQ ID NO: 84317 - DNA, 972 bp, Cannabis sativa
tcaacaaataattttatattgtattttttttggttgttgcaaatgaggagaaagacaaatttaagaacattattagataataaaactttaatattagaaagaacaaacagaataaatatttatttatataaagaagcaacttcataaatcaaacaaaaagaaattggtagcaacaagaggtggtacctccccaacactaaataaaataaaattagttaattttcgcagcctaatctgtcattcttttcttgtgatttacaattcgggatttttctatctttaagtccagactgaaggattcgacaatcactcgaccaagccctcgactaacaaagagtcatcgattgcatgtaggtaggcgagttaggcctgtgcttatgacccatctagactaggggtttaaaaaaaatcctttaaaaatgcatattttttttattgattttgaaaaatattatattttttcttatggctcgattttaaggccgattctaagagaggagagaaggatcatgttggtacactatgatatccataattaaaaataagtattctataaagtttgaaatgaagaatctactcattgttctaccaattaaaaaaaagaaaagaatctactaattgacatgtagtttatactttaatacttttacctttggactaatattattcttattcctctcttattgacactaaaaatagaaaaatacagttgggttattgatagatacttatattgatatttgatgatgacaaacttttctttctttctttcttttatttatttatttattatttttttttttttgtaaggcatacaatgaaatttcaaaccctagtgaaatacactatagattcttgatgattccaaggaaaattaatcatattttctgataccattaattggtgaaagagtaatatataaagaaatttctatgtgcatcataattatattttagaaaaattaatataaat

SEQ ID NO: 84318 - DNA, 505 bp, Cannabis sativa
ccttctttttaattctaactgttgctctcttgctttgcttgctatccgattagattatttgttgtccttattgcgtagtggttttccaattttgcttttttatgggctacttcagatatatcttattttatcaagatgaatttttttttttgcaagtttaaaaatcacactctcaaattcattcacttatggtgatgaacttatgcggcttagtgtttagaattataaaattatgctattttggttatagtgacaaagtacaagttttcaatttacatatagagaaaaatatccaaaaaataatagatcttttagtaaagtttattattgttattttttacatgaagatgtaacaaaaggatcatgcctttggaggaaggcaaggaccctggagctggtggtataactagtagagcaagtcaatataatgcccttcacttgtttgtatggtttatagctttgtgtattacctttgctgtataaattcataattgtgtggttctct

SEQ ID NO: 84319 - DNA, 1025 bp, Cannabis sativa
agtattgttaattcacatgtcaaaatatacaaaaaactggtgagaagaagaagagaccaggggtcatcacttcaatcatggattccatcatctttacattcttttctgcatcacgaatttgtgcaggagtaacctgtttgcatgcatgtctaaaagttacgactacagatatgaatacaactgaaacatggggtgactttccaatcaatatggaaaatgtggagaaaagttttcataccttccccattccaggaatcatcccaataacacgactcatggatcccatacgtgcaacagcgcgtgtttgcttgaggaaatcattgaagtcgaactttgcactcattatcttcttttgcagatcttcagcatcttcttgtttcatctacacacagaactcaattaataaagtacatgaagtgctttccaatatgtgaatctatgatcggattgttataaaacttacgatttcttgtgccttctcaacaaatgagagaacatctcccattcctaatatgcggcccgccattcgatctgggtaaaaaggttcgaggtcttccatccgctcacctcgcccaactagcttgataggctttcctgatacctgaaatcacagaacttaaatgtgaatttgatacaaactactaaacatatgagcaataaaccaagtgaactttgaacttaaacaccagacaatctgcataacaacactcacaaaataaataagaaaactatgtgatgccaaaaatggagccattataagttattcatccaagaaaaatagtccatactccatatactaggcaatgacaaaacaaacctctttaacactcaaagctgctccacccctggagtctccatctagctttgtcaaaatagctccagtgatcccgatctctacgttgaatgtcgtcactaaggctgtagagaaagttgaagtccacaccttaagaaaataataaaaatagactagaagtgtcataataacttgcaagggaaactaaattaaggctttgttaacaaatact

SEQ ID NO: 84320 - DNA, 829 bp, Cannabis sativa
  modified_base (32)..(35): a, c, t, g, unknown or other
aataatctggattacattgaaatagagttttnnnnagggcataaaacccaacacttgaaagcttatgctctcctcgacagtaaacaatctactggagacttcaaggtcccaaagtattcagactggaaacgagttctagttcctgctgatgaagaagatagagattatgtggctcgtacctactatttgaagagcacaacccctcgagaagctgaagatgatgcctcccgaggtaaaaactttggtactttaggaaggtccccatctatacttagagccgagcatactaccttagttaaatttaaagatattcagtacaacttttacatttggaattgtgtagatcgaattgctcataggtttgacagttggtattctgagcaccatgtccaattaagttataatagttcttacttcaagattgcccaacaatatggtactaacttcgatagggcaagccatccagattaagacatgtctcctctaaacccctttgatcttttcatgaaaactggttctaaggagtttagtaattattttggttcttcatcctcgtctgatgactatggtaattttcttgagtgggagattatctctccacatttttgttgtttatttttctcaagtgttgatattttatcatctgtctcgcagacatggatctagatctcgaagacgtgttacgcagtcctacatgtcccatcaagaaatccaagaagcgcgcgactttaataggagatgccttgggatcaactcaggaacctttaaaaagaatcaagaagactgccaacaagaagcgtgccacgaaacaactcaccattgaacaaga

SEQ ID NO: 84321 - DNA, 778 bp, Cannabis sativa
gtactgctgcgatcaatctccaccattcggttactaattttcgttttgaaaatgcatggctccgtgagccattgtgtcggcaagtaatacttgatagctgggaagtttgcgtggggctgactttaaccgacaaaataaaatattgtggtgagaagttgatggtttggggtcaagactatacgtgcaattttaagaagaggattgctaattgtaaaaaagagatccgaaggcttaaatggtgtaccgatgaggtttctattgctcagtataagcggtctgttgctgctcttggggaagtgtatactcagcgtgaggttttttggcgccagcgttccaaacaactttggcttcatgagggtgatcagaatagcaagttcttccatgcaaaggcaactgctcgtaagaaaaacaactccattaactctcttttgaataattctggtgtgtgggttgattgggaagggggtctttcagatgttattgttgattatttctctgatatatttacttccactagctctaactttgatactgtggtaagtggtattcggccgactattaccagtgttcaaaatgactctctgttacaacaagttacacctgaggagattagaaaagctttgttccaaatgcaccctgataaatcgccgggacctgatgggatgacacctgggttttatcaaaaatattgggatgtggttggtgaagaaacttagaaaacagaattgagagaaaagaaagaagaggaaagaaggagagaaagtgtttattcaattct

SEQ ID NO: 84322 - DNA, 867 bp, Cannabis sativa
actcattttttgagctaaatttagcataaaatttataccatcattagagatatcttaaaattcaaatttaaactcattatacatatatctctctttactactacaaaattagatttttctctattgttttaaacaatctggtaaagtattttcgtgagtctctaagactaacgcttattcgaccattgctaaacttactaaattaggcgacggtgaaaaaatatcgggaaatttttttcccaactatacaaaatcgtcatcaatactgagcaatataggcgactgttagtatatgcgatggttttaaaccatcgcttacagtatatgcgattgtttttaatagtcgcctatacctttaaaaaattacagatttggaaccatatctcaccaccagaaccatatctacactaccaaaactagatctcaccacatttcggtttaatacttatatatattcattacaaatatattaacttttgcacatatcccttgaaagtgaaggaaaatctcgataattgttctatgaagtactctaccatatcattcttcagttatggatttttaagagattagtgggattttcataatagaaatactaatgcaaaatgaaaagatatattaaactctcacttttggttcaccgtgaacgagatgaggaggagaaagagagagtgaggtggagttgagtggcggtggtggtggtggtacgattgggtcgtcagctcgaaggtgggcggtggtggtggtgcgattgggaccgaaaacgagaagaggtgagtaggagagagagagagagagagagagagaggtggagcgagagaaggaggctcggtagaggaggtgtggcggtggcggtggtggttgttg

SEQ ID NO: 84323 - DNA, 1763 bp, Cannabis sativa
atacttaatggttgtcatttcatccaatgtccagcttcgacatttcaccagtgtcatatagtttttctacaacattaaaaaattctttggcatttgcagtgtctcataagccactgaataaatatttaggaattggacttttcatagctttgagactaagatgatttgatttttctcattgtgcatgaagatttttctgggcaaccatactggtatcagtacgatcaacatgtttttcttctcgcaagcataagtctaaattcattatgcctaaagtaatttcaacatctcgtttcaatgccttaaatttagacgtattcagaatttggatggaaacgttattgttgttcatagaaaggaaaccgaaaaattcaaaaaattaaaacttgatcaagctatatgagcaatgcaattagaaaatattgtaaagtcaattggtaattataaacactcatttaagataagaatataatacacacataatctaccatcataaaattatcaatagatagttaatccttgtattataatctctctccatatgatgatcattattcaaaagaagaaaccatcatcatcatcattaaagaaatcatctaattctaattagtaattaactaagttttttggtttgatctcgagtttgcggaatgggaatatttggtagtccaaagaaatgttaaaagtacatgaatctagtttggttgtacattttgaatagagggaagtattttcaaagtatatgaatcgtaattgtattaggggtatttattggaccacatttaatgtttttatatttatttaaattcaattcaattatatattggatgttaaatttatcatccaatccgattcaattaatttcagtcatccaatcgatctaacatctattagatatatgttagattgtatcagttttattggatgtatttcatatatatttattagtttaatttgaatttattcaatattttaaacttaatattttttagatccaatccattcaatatattttaagtccaatatatattatatccattttaataaatacatacatattaaatttacacacaaaaaaaatatcatttttatgaggttaaatctcgagttattttgaattaaaagaaaaagaaatctatatatttataaattatttggtgtttgaatttattgttaatccaaataattgtcaatccccttttattaatttttaccaggtccctattggttgaaaaaaaaattatggttggattagttcttctttttggaccatggagagacttaactaattacaaaattatggttggattagttcttctttttggaccatatggtggtggaggtgatggggaaggagggggtggagacttgtagacataaggaggtggcggtgatggtgaaggtggagggggtgatttgtacacataaggtggtggcggggatggagaaggtgggggaggagacttgtagacataaggaggaggtggcgatggtgatggtggcggtggagagttgtaaacatagggtggcggtggtgatggagaaggaggaagtggtgacttgtaggcatatggtgacttgtagtgatatttaggttgatgtggagagttgtagtgtgatggaggagatgtagtataaggcttataatcatcacttgcagccacatcggtggtagctattataaagcatagtgctaaagcacatactaaatgaggccaaaaattggccattttttagtacttgaaaggaacaccaaaacactt

SEQ ID NO: 84324 - DNA, 624 bp, Cannabis sativa
aatggacattttttaagaaatttttcgcaatagaaaatgatcattcaaaagattctatattttgtaaaatgaaagccctagccaaatttcattcaaacttttttagggttaagatggtattaaaaattgggtcacaatcattattaaagggtgtagaagagaatattttagagtcaaagaagaatcaaaaagttcgaccaaaattaaactcactacaaagactaacaagtactcttacaaaaaaaaaacacagaattcaaaataatattattcatccattgcatataactctaattgaaaaattacttatatatataaatataattttacttaccatgttggcaataacttgcataaacggcattgttgacaacaccatattgatcaagctcataatcacgaactttgagctcaatttcaatgtactcactcatcattattgatcttctattatggctactactaactctcatcatcatattatcatttctactactactcaatttcatattattattattattattattggttgacaataatattgatcggagatgaagatcatgatgagtagctgggaaagacactgatgatgaagacgaacggtgaggatggagacacgtg

SEQ ID NO: 84325 - DNA, 736 bp, Cannabis sativa
  modified_base (379)..(384): a, c, t, g, unknown or other
  modified_base (440)..(453): a, c, t, g, unknown or other
atgagcatatatagttgcactttttggaattttgttggttgccattcgtacgtaattaaaaaataataattaaaaagaaaaaaaaataactatgtgttgaagggaagacaaactaacttttaaaaaccaaaatggtcaaagtcaaccatctaccaattccatgagaagactgttagattgagtttgtgaggaaaaatatatattttgaccaaaatacccctacccttgtgttatgacttttgtctatggtaagagagacattggtacgagttatctaattaagtaggaattagtcacattcatatataaaataataattgcttcaaacaaaatatatatataataattttaggagatttttcatttttacacttcaaannnnnnttttttttttttttgaaattctacatagaaatttctattgcaactagcgctgcaannnnnnnnnnnnnnaaaaatcgtatagaaactcctattgcaactagcattgcaaccaccttaaaaactcaaagtgtaaatttaaaaaaaaaattaaaaaatagtatatagagtaattccccataattttatctatgtgcattaatatgttatgtatatagttttttttaattattatttttacactttaaaataattttttttatataatatttttatggaaattcacacaaaaattcacatgacaaccaacagagcaacttaaataacaactaaaattcacatagaaattaccgaa

SEQ ID NO: 84326 - DNA, 1093 bp, Cannabis sativa
agatttttggtaatacacaactattataccaataatagaaatcttattcatttaataatataaattatttatatatgttacctcataaagtaccatatgcattacatcatattgcctaatcaggaaagtcaatgctttaatctgataatcctgtattgcattgcctaatcaagcaagcatgtgccatagcttggcacccatatattgcataatcgcatcacctaatcaggttatcccatgctgaaacatggcacccatatatcacatatttccatcacctaataaggtgagctcatgcaacaacctggcaccaatgtatcgcatcgcctaatcaggcgagcctgtacctacgctctgtactcacatgtcactgtcgcccgtacctaataaggtatgtcgccaggaagaaatccaacaacagtttcaatctatcccatagccggacattctcatatcactatcgcccataccttataaggtacgccgccaggtatatcgcatcacctagtaaggtgagcctgtatatcacattcacggtatcgtcacattatcattatttaatcaatcaatgtttttattatataacaataatattcatatcttaatcccaataacaatcaattctcaacaatattaattgcattacaacacaacatgctatgcaggacaatatacttttcttatatttggtccagagttgggattgattttaccaggatctagatttattaacatgtatgtttcattaacatcctaaatatgaattctctaatatgatgaaattgaacataagagtttagaaaatcttacattgatgcagcgaaataataatgactccttccgctcaaatctctaatccttgttccttcctgtcgcagagtaataacaagatctgagcctggatctctttctctccttcggattggttaccaccgtctttcgcactatgattgagtacttgagttgctatttgtgggcctgatactctatcactatggctcgaattggtgaagagcaatgaataaggtgcgaaatcagtatgaaaggagtctctcatctactagttgtgtgacagagttagaaaactagattt

SEQ ID NO: 84327 - DNA, 984 bp, Cannabis sativa
gaagagattcgtggaagctaccttctggtactagttcaagtagggattttaaccctattgaccgaaagaggaagccaaatgatccacccgttacgggcccgaacaagaaattttaaggtaatcaaggtttccatcgaggtaaaaaatgagaattggcaaccctattctgagtgcccaaggtgtagaagacgccatttgggcgaatgccaacctcgagcttgcttctaatgtggggtagtatgctatctaaagaggaactacccacagttacaaatactagatacgaagaaagatgatactttggttctttggtgttttctttgacccaaacagatgttaacgttggcccttccactgtcacatgtgagatttctattgatgtcagttgtttactattttgattgattcttatgctatgcattcatatgtgtcaagtagagtaattgatagtttgactaggccatgcgatgacaagtgggtttggtacgttgtcacctattagagaacaattatctctagctggtgggttagatctcttcccgcgtgtgtggaaaatagagaattgtcaatggatctgattgagttaaacttagaagattttgatgtgatcctgtgaatgaattggttagcaaagtataatgttaccgctgattgcaagaagaagatgatgacatttgaaccggaaggtgagaatccgtttgtgcttgtgagaaaagttcatggattccaagtttcaatgatatcagtatttaaggcaagagatttgttacgaggggaatgtatcagttatttagctataatgtagtggatactacaaggaagcagggccgactctgagaatatatgggcctaaggcgaattaaatttaggggccctcagaaatatatattaaaaaaagggaaatttacaaaaaatactggaatttgggttaatttttacaaaaatactgccacacggcaaatttttcaaaaatactgtgttttt

SEQ ID NO: 84328 - DNA, 1334 bp, Cannabis sativa
  modified_base (107)..(112): a, c, t, g, unknown or other
gaacaaaatttcaacataaaaagaacgtattttatttaaataaaatcaaaaaaatcgtaaaaatgtttaaaattccataaaaccgtatttttgttatttttttgttnnnnnngtgcatttgtgaaattaaccttatttttaaattatgtgtaaaattttagcatcttaaaagatgctactattggagatgctcttacactatttggacaaagattattagggacgactctaattctaatcaaattgtataatcattgcatattatttataatcctagaacgggaaattcactgctgcgcatggcattgcaaaatatgctagctttatacgtagttgaaatttacagccattagattatatttgatctatttccctaagagaaaaagtattcaatatccaatctatatataaaaaaacaagcatatctttgttcaattgtgtaagctgaagaatgtgaggtaatattatatatttcatgataccgattctttttttccttctgccaatttaataaatgaatgagggactagtatttaatgataaaagcaacaataaaaaaatatatatcgatctattcttaatctaaacatatctgtactatacattaactgaataaagaatactcattaatagatacattaaattataggagttgtgatgaggcagcaaaaatcgacgtggtcgggcgattcattactctctgtctttttttgtgtgtagatttaatttgtaatcagcggagtagggaatgagaatgcctgagtaattggctgattaaaggctgatttccattgcctttacatagcaccagattctttactctctctgtcatctgtacatacatacatatatattattaatttcagttcatatatatatatatatgcatgttgatcttatatataagaattgatcgtaatgttgcaaacctttcccaaacttgcccttgtgtagggaacaggtcgttgatatccaatattactataagaagttgggggagattttcgactgattgtttcttcttgttctcgttctcgggacaagaattttccatggcttctacttcttgtcattataggactattacactccctacgccagcttccattattcaatacgcttgggaggcttgcctccttaattattaattattcaacaacaaaatccacattgctttctatgtcaaattcatttatttgaacagccaataatttgactagagaaaaaataaataatggtatacagcttttcgtatttatatatattgtatgacgttttttatataataatatagctataatgtgaatgtcaggacttttgattttcataccaga

SEQ ID NO: 84329 - DNA, 1019 bp, Cannabis sativa
cttgaagtgagggcattacaaagttaacgtataatatagaacgtcaaggagagtagtggtatcactaaggtaaataagattacttgaattactgatggtgatagagtagtggtatcctcaagtttatgtgaacaaaactaatgaggaattgtaagatgctaatgaagggagtgatgggaattagatttaattaacgaaagaatgaaggaaagaaatacaattaggaatgaaaaagaagcatctactttttgacaacccaccatgatcttcccttggagttaagcatacttaacttggggtaatctcaagatgggaaagcttccagcgagtcatcttagaaagtgtatgagtgaggaccaagtacgctagaaatattcgtattagggtgcagaacaagtagtcgttccagaaattatcaagaggaagggatgtcttaataagtagagatttatgaggcaccgagaagagtatatattagtggatggaagtaaggaatgctataattgaatatttatcaaaaactaatacttagcttgttaataagctaaattagtacattagtttaggagatcctattggaggaatagaaagacataattatgaattacgtactgtgggatattatagtttcgaccgagtagtaacaggttgacatgccaagttaaatgctgtgtctatcagtgcagataatttatataataaatgaggatatggagttcatacgaaggaatagtctaatcttgtgaaatcctaaagttgatatctttggctacgatgttaagagttaaagaaggttattgagaaccatggatattaaagtaaaaatagtatcatgttttattgtcgatgggtgacttgagaggattaattgaatattagaaatatgctgcgagcatatttgattaaggttagattatcttggaataatcttttccactaacggagtgtttgtctaaataaggatagttaaaagtagcattgtttaggtactttactgagtgtagtacgagggaaatatt

SEQ ID NO: 84330 - DNA, 668 bp, Cannabis sativa
atctgtaaaaggctgtagtaggatttgattcatgtcatctgttacagtagtgggaaccgattgtacaacctgatctaatgctgaagcatctgtacctgatgccgtgaacagttcttcaaaaaaagagcaaataacttctatcatttcatttttcgagctgactgttactcctgcagaattttgcagcactttgattgtgttattcgacttcctagatgaagcataagcatggaaaaacttggtattctcatcaccactttgaagccaattgacccttgatctttgttgccaataaacttcctcctgtgttaataactcgtccaatgtgtcttccatttttttcagcagagtcgtggagtttgaggttcgtacagattggttgttgaaatcttccacttccttatgtgcctttttaatcttttttttcatgttcccatacttgtggttatgccaacgttgtaatgaacttgaacatgcttcaatgttcttgcagaaattgtctatagaagaacctgtcagattttttttccattcgtggtggattatttctgcagcagcgggatcaagtaaccagagcttttcgaacctaaatcttgagtgtcgttgagtgtaatgatgctggccagccaaaggaacaaccgtggcagaaattgctctatggtcagact

SEQ ID NO: 84331 - DNA, 931 bp, Cannabis sativa
ataatttttgtattaattcagattgcaggttctgttttcatcatgatagtgggaatgatttgttcttgtctgggtacacactcagctataacaggactcattcaacagcgagttacttaaaataattctcgatgattataatgagcttggataaagtggctataataacaaagatatggaagcagttgattgaactaagagccttattctaactataaggtgtagtactgttttttttctagtcattttgatcatgtaatagttttagcagtactatatatataatagtttgatcaaaagtttttcattatcttaaattaagtctcttataattacttactactccatattgcttgaaaatattttacttggtacaggttagaaattaactctttcatacctattaatataagagggatttttatttatatacaataaatttattatattacaaaaaaaaataatgttaaatatacataattatataattttataaaattttataaatatttaaaataaacatatatggttacgattttaacatgatttttaattatttttttttttaaaaaaattacataaagctgttaaatatataaatacatcgatcaagatttatattttgatatattactaaatatgtatacttaaatttcatacaaaaatgatgcaaacagcacatagcgtgtaacgctatctaccgaaaaattaaaataatactctatatatattttttgaaatctctctatatatatatatatttatatgtgtacaattagttgttattttttttttcatgtaagtaactatgatcgattttcttctacaatagaactttttgtttctattttttcttttcttctctctcttatctattatttcaaaaccctttccgatcacaccgttgatcattatggtttaaaaataatat

SEQ ID NO: 84332 - DNA, 730 bp, Cannabis sativa
aacaaagtagagatctaactcaatgtgcttagttcgggcatgtaaaacgggattttgagtaagcattatggtactcaaattatcgcaccagactacaggggggtgtgtgagtttaagatgcagctcagaaaacagagattgcaaccaggatatctctgctacaacgctggccaaactcctatactcagcttcagtactagacctggaaaccgtatgctgctttttgctttgccaagtgatgagatttgaccccaaaaatattgcaaaaccagaagtacttcgcctatcatcagaatccgtggcccaatctgcatcacaaaaggctttgagatcaagagaagtcgattgctttagatgcaacccgtgatactgtgtaccactaatatacctcaaaattctcttcactgccaaccagtgagtttgcaaagggttatgcataaactgacagactttattcacgctaaaggcaatctcaggtcttgtgatggttaggtattgcaaagctccaactatagacctgtaaagctgaacatcttcaatcggatcacttccatatgcagagagcctttgtccacttgtcataggggtcgagtttggcttagcttcctgcatttttgccttgcagaggagatctctaatgtatttagtttgagttaacatcattccttggtcagtgtacaacacttcaatgccaaggaagtagtccaacaaacccaaatcctttagagaa

SEQ ID NO: 84333 - DNA, 563 bp, Cannabis sativa
gaatctataaatatgtccccacgcgtttggcgtgtcactatatcataactctattttttttaaaaaaaaaaagtacagctctaattaataagtaaataaaaaaaaataaaaatatatttaataataataaattcctagttattctcgccagtgtttgaaaaaggtgcagtctctagttttgtcattaatgacttaataattaaaaaaaattataaataaaaaaattaagaaaggacatgtaataaaaaatttggtcgtataatatgctcattaatgtatctttcctttttaaattttccaaatcaatttgactaaattaaatgttaatttcattaaaaatttatataaaaatataattctgacaataaaataaataaagtaattttttttatatattcaaaccctaaaactcagctatctcctcaaacctattcatcttctttcctaaataaacatttcagtcgctatgtctctttctctctatttatctttcgtgtgaagtctgggccgagcaaactgcgtacatcctacgaccaaagggccaagttctggtcattggtaag

SEQ ID NO: 84334 - DNA, 700 bp, Cannabis sativa
ttgaatttttgatttgtgggttgtatttgttggttgggtgaatcaggtcctaaggttgtggcagatgcagatgaggctgatgagtgattttcaatgttgttaaagttggtatttttaaggtattcttattattgtgttttaagcttttcaatttaatttatgttgtgagaattgagaataattaagttatggggagtactatgagtgcttgttaccttgatttattccaattgctctaatgaactaaatttagatgggttttaaaagttatgcaattgaatgaactaagtttattaataggaactaagttcatttgaacattagtgttgagtctgtgactctgtgaatagtgttgaaattaaattgtttctttcttgttttagtgctagttttttcatgtaaatgaactttcaattacagttgattatgtattacattaagtttataaaaactgtagtttagttctatggtgtgagaagatagcaaatgtagtttctgtatctgctattttctcataacaaataggtatatatggttgattattttcaagccttaacaatgtatgtattagcagaattttaaaggttatttgagaatcaagagtgaaaaaattactttgctgaattgtactagtaatatgccaatggttgaaagtgattagatttagaagttgagggtcgtcgctactcgctaggtagtt

SEQ ID NO: 84335 - DNA, 718 bp, Cannabis sativa
agcaataagaagctaacacatgtatcaaagctgaaagatgaaccagctttaaccactcattattaaatgcacttaaatgactcgcctcataaaatataattaatagaaatactctaactcgctgccatatagacaatagtgagaggtgaataataactatcaattgatgagatcagcgaggtaaacaggttcatctcgggataaatagaatacacaatggaactgtttggaaagagtagataatgagtttggagctcattgatccacatactcgtatgtatgagcttgcagctcattgatccacatactcatgagtttattcgaggaatgataacaacttcaaccttcactcacctcgctttaaatgcattgaagtaaccacctcgctaatacctctctcaacggttaaggaaggttgcgatatgcatcataactcaacactttaacatttttctataaagatgtttaagaaaaatatcattcaaacggcaagaacaattgcgcacagtcagcataaccatccatagataaaaacaaagagcgattaggtggttattcattattaatctatgtgcacatagatgaaatgtggagaatatccacgtgtcatgagcagttacgaatgattatatcctaaaggaataatggtcaccttatacatctataaatagggacagaacctagggaatagaggatagccaatcttggacaaaataga

SEQ ID NO: 84336 - DNA, 601 bp, Cannabis sativa
attttttttcttagtttttaatatcattgcaaggggataattcacttttttatcttattttattgtgtagatgttttgtggaccattcttgataagttaatgagttcgactgtagttttcagtgttacaagttgaagttttagctcttttgtagtgctatttgaggactttataattttattgtctaaatttttaggggtatttttgttccatattgctcgcttactttagctgtttatagtttggcaaagcatgcccttcagttagacgatgacctatcctagttcaagaaagttcatgcactggttacgaatatctgcattgtaaatttatagtaattctaatcaccacattaaaatatatatctatatattgttgcaatattttttttaatactcatgcgaaaatccttgtattgaactctattaagatcaagacgcaccctcgtgtggtgtttgtatagagatatatagagagagtgtattataattgttttggtaaaataaactctcttatcataaactgtcaataatattattttaaaaaaagtgctataatagaactctgtattacaccctatcttatcattttttatcgatgt

SEQ ID NO: 84337 - DNA, 659 bp, Cannabis sativa
tggcatcaccaagatctccaacaaaaagttgaagctgctgaacaagaggccttggagaatcttaagaatattgaggttgatctctcaaccaaactcaaagaggtagagaaggctttggaggagtctcaaaagtgcgcctacgaggagattcgaaaggcctaagctgatgctatgaagcctaaaaattatgctaaaagcttggaggataaacttgtcatcatgaaggaaaaacatcaagaggaggtgaagaagtctttcgtagtgaccttgttccacatatcataaataaataatgaagtgctaaattatttggatgaggatgataaggaagtgcttattcttcagattttggttgtgcattaatctatattagtggagaataaaaagtattgcaaccttaagaagaccttctgattcttatttgtggattaatctatattagtggagaatagtaagtattgcaagcatatgaaattttgggttagtggattgatgattgtaattggcatgcacaaagtggtctaattattaattaattacattctatggtttcttgagctgaatgaaaaaaagttgaagttttttcaagggtgtaattgatctgaaattctagattatatgtataagtgaaatttttcataatcatgttattgaagcta

SEQ ID NO: 84338 - DNA, 545 bp, Cannabis sativa
cactctttccctacacgacgctcttccgctttcttacagctcattatcataaatatattttaatagttgccgaaaacctcggtcaacaactattatattatgtatgtctaacctataattgtctcgctgattcaaatgtcaaaatatttgttgatttctgatatgttgctgtttattcttttcttaatttttgttgtctttctagacattcaatttttattttggtaggactagacgtttaattattacagtgtatatgtaagtgtatccaaattatagtgtacatagctggtttatgttgagaaaatataatttattaacatgaatggctctaatattgtttgtagatttgcaaatgggattttgattttaccatttatctgacaattggtctttatatttgttataacttgccaatgtctagattattagcttctcaaattccagggtcttaattttctaaaattctctactaataacaacttaaattgaatggtaccgtaaataagaattgaaagtaaggtaataaaggtggtatttagtaa

SEQ ID NO: 84339 - DNA, 798 bp, Cannabis sativa
aaagatctcgaagaccggtagagtgaagcctgtctggcccgccatcaccaagctctttcagatgctcgtctgtcaaaggaagagctctctctatgtacttgtttgttgcttcagcatccctctccccagcaattgaccccgctctgtcgggcctccgagtaccctagtcggcaggccgtatcacaggctgcccaatcggtgtaggccctggcggaggaggaggcagtgatgacccggaagcatgtccaccacgagaagtttcggccaccttggcccccactcgtcctgtgggctcattagaaggtcccctagtaagacctctcaacttggaagacatatctgcaaaaagaaagtagcaaagtcagaaagaaataataaacattcagtacaagaacaaaagcatgatgttatcaactatcaaatacagtcattatcaaaagaggaactattagagtcctcgacaatagccttgcccttgcccctagatgtgggcacagggcgagtaggtctctcagaagcctgacctctgggctcgatatggagggaagcatcacctactggagccccgctggccaggcgtcggtggagagccttctcttttctcttcaaattctgcacaatgcgggataaaggtacctcatcatccaagtgaagagctagcccatctccagggcaggccccatctacaattggtgctcttgtaacttcaggaacaggaggatacaagccatatctctagaaatttaccacactattcaaccggattatatttctctgctctgtcaaaagagagaggat

SEQ ID NO: 84340 - DNA, 685 bp, Cannabis sativa
aacgtatgaatgataatttataattagtcacaacttttatatttttaatcacaaattttattgtaacttaaagtaagattttttatagtgtaacctcacaataccatatcatgccaacgtaacttatacactagcttatataattaattagttactaattttttatatcatttactaattaaatcaaaatatgtgtaatttgatattaaaatgcactttaatttgtttagtacgttgtattacatcgtaaataatattacattaaattgtattctatgtcatatttttatgtaaattctattgacatataaatatataatattttaatgtaaattaaaaattaacataatattatatttataatacaatacactacgatttaatactcatactaagctaacccaatatattacctcatatagattagaacttggtgtcttatagcatttccaacgttttcactactaactcttcttcttcgtacttattacattattttagttgatgagatgaattattgatattgagtacattatatatattgaactaatatcttcatcaatcaacttggtgagtgtatctaataatacgtatacgtacattttctcctatcaagattgtattacgtatatgagatattatactttattcatatatattaattggatattttataaataaataa

SEQ ID NO: 84341 - DNA, 602 bp, Cannabis sativa
tggcatgcaaatgagagaatagatgatgataaattaagacatccagctgacactttgcaatggaagagagttaatatgaagtggccttcttttggaaatgaacctcgtaatattcgtctaggtcttgctactgatgggtttaatccttactcatctcttagcagtaagcatagttcttggccagttatgcttgttatctacaatctaccaccatggttgtgtatgaagagaaaattcacattgttgacattgttgatatcaggacctaaacaacctggtaataacatagatgtctatctagcccccttgatagatgatctaaaaattttgtgggatgaaggtgttaaggtttatgatgcttacaggaaagaagaatttaatcttagagctatattgttatggacaattaatgactttcctgcttatgggaatttatctggttatagtgtgaagggttataaagcttgtcctatttgtgaagaacaaacatgttccgaattcttgaaacattctcggaaagtttgttatatgggacataggagattcttgaaggatactcataaacttcgaacttggactaaggcattcaatggtaaacaaga

SEQ ID NO: 84342 - DNA, 697 bp, Cannabis sativa
ttggtcccctccacctctcaaaaacttaatttgggtcctcctttcttttgctcctatcctagatagaattcctaattttcggcaaagctagtgctgaattgttttttttttcttgaaaggaaagaatgttcattaaacaaagaaattaaatctcgtaatcattacacataatatttttaggaattgacacattaatcatacctgtaagattcttagaaagaactcacctaacaacattgtgagcagcaaaattatatagtctcaaaataaaagtaaaattacaatccaaaaaactacgtgataatttattacaaaaaaatacaaaattatcaatacgctagttagatgaattcccaatcaaagctttgataataattttcgaattgctctcaatgataacaaaattgtgcctccatgcagttgccatctgaagtgctagcacacaggcctctgcttccccaatcaagggattagagtaggcaaaagacttagaagcaacccacaacatagttctcgcatggtcttgagccaacgctacgacacacatcgacccactccccacttttacatcataattaatcttgatctaatcatcaggaggaggggaccaaagtggtgggacatcatccaaagcaaggagaaataaagatgatccataatctacataacaatcagtgatagaatcaatataatattt

SEQ ID NO: 84343 - DNA, 524 bp, Cannabis sativa
attttgtttcatctggtgacgcccatgcaaatttgacgaaactaaaattcgtggagtacttttaaccaaaaagaagattaaacatcaaatagatttcagagatgttgccccttacctgggtgcccaatgcaggcccccatgccactatgggcacctaggttgacgtatttcaacctaaggcactccagtacacctttatggagaagtttcctgggaattttccttattttatcccacaatgaagatacaagtgctttcaagaagcaaacaaagatgcccaacacaccaagggttgatgctttaggtgcccaggttgacatgagcagactattcatggttccccatcaattcaattatgattctgtcttgggatttattcttgtttgctcccaaaacaagatacgtgacttagaatcaggataaaatatcatcccagtggtcgtttagtccgtaggcatcaccatgcataacactaggcgcttaggttgacatttggcctagggctcatcggtcttattttgccc

SEQ ID NO: 84344 - DNA, 1352 bp, Cannabis sativa
aatactatcacaaataaacatatttcaagcaccaatttattgttattcatcgtatttctcaattttcaagtttaaacctaaactagacatttaaactcaaaatctcactactctacatagcagccattagaatcaataaacaaagctccaactttcccaaaaataattctaaaaactcaacctcaatcccaattaaacctacagccacaaaacctcatactctagtctaagaatcaactttaaaatttgaaaattcttaatctacaaaataggtaacttaccccaaatacttcaaggttgacttgtggagcaaaaacaactagaattggataagttttgctgcagaaatcttcaaccttggctggttttcttggtggttcgaaaggaagaagaaggaagggtcacttggccactactttaagttttctccaataatagcaattcatttcagcaatcagaacttaataaacctaagctaagtttatctatagcactacaagacaaaagaaagataacataaccaaaatattaaattacttttctaccctcactcacaaattcaacttgtaaaatcttaagggtaatttggtaatttaactaatccaccaaaccgacaacctaaagttctatcctagtccgatataattcccattcttatccataatgtattttagtgacatatccaaccattctgccaagttcccacgatcgccgaacccaaagatattttatttaaaaaaaatagtatccacgatacccacatattctaatataatctctgtaattaataaattacgctttatttaatcatttaataaattcacaccaattaccttaagtgagatcatcatcgtacttcataccaaaataattacatatttaataaaatatgtctaattaaataatatattaatttccgggatattacaataatatactaatttccggaatattacaactatcacctccttatagaaattttgtcctcgaaatttattcaaacaactcgagacgcagctctcgcaactgcgacttcatctttcaaattgcctttcaatcttattgttctttcacagcattagaactagtgatatagtctttgttcctccacactttctcttttttgtttaaaattccataccaattgttcttcataaaaaaaaatccgattgagactcaatattctcatattttcgtatatggatttctcctacctcatactttgaaacatgggagtatatgttggaaactctagataaaacagggggtatggctagctagtaagctacccaacttaccctttccagaactcaaacggactgattaacctgggacttaacttccctttcttc

SEQ ID NO: 84345 - DNA, 630 bp, Cannabis sativa
tcgtggttttagttcgtgattgacggagtgaatttaaatattttttagtcttttttttcttatgttttgttcataatctagtattgtttgtgttattttttttttttgttaaaatttctgctcaaactcaaatctaatattttgtttaaaattttgtatatttgttattgaataattgatcttatcatgtttgtatttgagatttatttgtaaattcttaattgttgtgtgtgtttaagtttaatctctttttacataatttttggttcgtaaataggatatcgtttcttttcaatgtttctgatacctgatgcttaatcattcaaggcaccagctttatcattttcaattgaagaagaaattaaagaaattcaagtgtgtgtcgccactgtttgtgtatatctagtatagttaagacatgaactgtatgtatagtatagtagtacgtataatgctaattaatataacaaatacaagcatttaactttttttattaaaaaaggaaattagatattccatctaaattaaatataaatatattttatatttagttaatttattattattatatttaattgtatttatatataattaattaaattattgtttataatatataaaatttgaatt

SEQ ID NO: 84346 - DNA, 4047 bp, Cannabis sativa
attttaaattcagatttctttttaatgttttatgtagttttttttagaaaaaaaaatctatgtttttagtttgattggttagataatgccatatttagtggtatttactttttatgccatatttatcataaccttaataattttttccacacttttgaaaatagcccataaaaaaaaggacaaacaacaacaaaaacatgtgactgtataatttagagggcgccactaattatgaaaaagttgaaaactacacaagaaaggcacaaagtttggcatgttcctttgggcatcaccatgattatttttctctctctttttcctcttcacatatttttacttgccttataatggtatacgagccttagacgcataaacccatcgatatagaaataagacgaatacaaagggaagaaaatgactctcccattacactacaagtcatccaccaatatgctcctgtggcctctgcacaccaatttacatcataaacaagtgaaaacgagtcatggtcgttattgacgactaggtaaaacaacaccaacacagaagacgcccacatgaagtcgagcaaacaagctctgcatacaactatcaactaacaatatagcgacagtgaatgccaagaacccatgccaagaaccctaggtattgagatgatttttcataatacttcagcaatccactaaacttctacacaaatgctgctctttaaaatgttgtacttgcagagagggcaagtagcattgataaaaagccacttatcaacgcaggaacaatggaagtgatgaccgcagggaagttgtctcagttctacaccatcatcgtaagaagaaaggcagatgcaacactcctacaaattgccataggcataaaaatttaaaaattaccaagatgaacatataaattgactaatccgacaaaatcaaacttaaaagaaagattttttgccataaataagttaggtccatgtaccgcatcctcttgtgaaagaacatgctcgactggtgggtcagtgccacactcagtcattatgcctccaagagatccttgttcatcgctagaaagtttatcattattgaccatttttttaaacttgaatttagacaactgctcaatgtcttctttggatgctccctcctgctttaacaatgaaccatactacattatcaaaggattccagaaaagagcaatcctccaaaagcataaatgggtggccaaaataatggtggaaatggtcataagtttatttaaataaaaatgagtggaaattgtcgtagtaactaaaagtgaaatagattctttgagaaaatgtcaaaagaaatagaatgaagcagaatgtataggatgaaagtgccaacaaaagcatgtctccgataaacatggaaaatgagccagtttcacatcctaatattagcaccatcacaaatggatctgctactttttgttgatattggacaactcatggatttagcccacaaaaatcagaagacaaacctggtctgccacagcataaagaagagcaataatgcaaggaaggcagcagcaaacagcaatcccaataatacaagccagtgcaacgcagaaaaccacaaagaacacgtcaaatccaaggaaaataatacagagcctgtggaccaaatacaaatatcatacgaagttaagatgtattgcactagtaaatttcattgtttcagaaagaaaagagagaaagagaggagcaataaccagtaaagctgcggagaggcttgtgctaaagtttgaccacccgcagatacccagtagaacccaataatccaccagataaatgaaaacattgtatttgcagattccaggtgctttgctacattgctgagatagaaaatcaggaaacaatgagtgagtaaaatatcactttgagcaatcccacatggtctaaagtatcaactatacctaacaactttagattatcgtgcacagctcatcattatcattgtggtgatcatcatcatcatccttaacaaaacagtaattgtgatgattgatgatgatgattacaacagaactctggacatatcatttgacataaactcaaaccacgtccagctacattatattacaggtttcgcaaatgtacagagctaataatcaaaaaaaaaaaaaaaaaaaaaaaagagtacaaacatcaaaatttaggaaggtttatacacatttgtatttcaagcatagacacatttgtatcgaatggtccataagtattaatttagtgtaatgaaaggaacaagattcaatcttttcaaacaaaacacaaccactccaaattccttctcaccaatccagataccataatttcataagacaatatataattcacaattcgaaactatcaacattaacaagaatgtacctgttaccatcgtcgtctatctgagccaatgacacatactggctagaatcctccctcgacccataactcaaattcccaccactcccttcttccaccgaattagggcggctctgttgcctttgccggcggcgaaactcgacgcagacgcacaccacatgtagaatacactgaaaagcgtacccaataatccacaacctcaagggcacatccggggattcagtccggctaagaaccaaaaccgtggccgccacgactacgaacgcgaaattccaaataatatcgagtatcaccacgggtttcgagtacgcccaatcgctctgcctctcctccaattgctcggctgcggtctcacgcacgagcatcgatggctcacgcatcatcctccggctgctcgcctggcgaaggaaccgcgcagcctgtcgcaaactctgcctctgaacaaatcgacggccggaattgctctcatcggaagagccacccagaaacggcgtcgtatccacaatatcttcagatgatctgttaggagatcttaccgacgccatgatatgatttgacagccaaattgggaaattttatcaattgattcgaaccctaactcgctgagttgatacagtttagcccatcaaactcgggaatcgataaggtcaagcagaaaattggatatgaaaagttgaaatttttgttttctgaaagggagagatgataatgacgatgtattttatcaatttttttttttgaataattagttttataaatctttacataattttattttaaatgaatctttaaataatttttttttttaaaaaaaaattaccattattattatctactatctattcccttaaaaaaaaaaagcatgccagttgcatctctctttttcgatttaattagactttttgtaataaaataattaaatattaataactcacatgcaacataagataaagataggagataagatatctaaaattttgtttctatggattgaaacttgttagaattttctttaatgaattataatatttttctttatttattgatttttttagactaaataactgagaataatttttataaattcttagataaagaaactcgttttggtcgtatttggtgatacagtataagttattacatttttttttgagagaaagttattacattttttattttatgtttttggagaaaacaattattgcatatatatcgagagagacataatatagagaacaatcagataagtgggtcccataattatttcttgattcatccgaattccgaactgaacgtgacctattaaattcagtaaaaagaaaaaaaaaaaaaaatcctctaccttcctttgtactattttgctcaacatttttcattaatttctttttattacagaaacaacttcattaggcaactgctaaaaaaagtcaaaaaaaaaaaaaacttaaattaagtagatacgaccaccatacttgcacaacatctcaagaaagaactaatttagcgaatttatgagcaatatcattaacactatgtttgcaaaacataaacataaacaaagtactattagaattatttgtggactaatataatcatgagtttaatatcataaacacaatcattaactatgtgtccaatatttgttcactaccataatgagatggtta

SEQ ID NO: 84347 - DNA, 503 bp, Cannabis sativa
agagaataccccaacaaagaagcaagtaattgacccttttcaccaagagatcataattgaaggaggagtagggtacagacagactgttgttattaaatcttacgaagttggttctgataaaattgcaaccatggaaagtatccttaattgtcttcaggtgagaagacacaatactaactcttgtcatgttaatatgatcagggtcggaattgggctaaggcggactaagcacaaacctaaggcccacccagtccatgaggaaaaaaaattattttgaaaatacgtaattttttagtaatttttaaaaatactacttttttttttaaaaaaaaatgatccaatgctacctaagatccaattagtttcaaaggcagccctgaatatacttagaggaaattacactctatactctttttatattgtccttttttacttttaccttcttttttaaaatttattatttttacctctttttttaaacattgtaccaattttgctcatgt

SEQ ID NO: 84348 - DNA, 634 bp, Cannabis sativa
attttcttcaaaaaaaaattagtgataatataattactttgcattaattattaatgaattttatgaatgaaattgtcagcggagggattgggagtaaaagagctattaccaccatatgctgatccaaatttaacaccaaaagacctcttaactggggtttgctttgctgttgggggagtaggatatgatgcatacacctccaagcttgctgtacgtacactactttatttatttattttctctacctcataattattaattgggaattataagtaattaattaatataatattatttgttttttaaataaataaaaaaaaaaaaaacaggatgttccagcactaagtgaccaattggaaaagttcaaagagtacatagagaagttgaaaggaatagcaggagaagaaaaaacaaagatgatattgaataacagtatcgtttttgtggttctgagcagtaatgatattgctaatacctattttaattctatcagtattagaagatggcaatacgatgcttcttcttacacagatcttctcgtcaaatatgctactgacttcatcaaggtatatatatataaatatatacaataatataaaagttataagagaaattaatatatacaaaaagatct

SEQ ID NO: 84349 - DNA, 862 bp, Cannabis sativa
ctataagttccattctcttaaaaagttggcagcatcaacattaatcttcaaggtattaacagctggtttgatccatgtttcatctccatctacatctgtaaggaaaacaacaatgagaatcataattgtatctatttatctatatattaatttgtctataaaactcataaccctaacttaaatcacagcttattactacacaaataataaccatataatcataatatcatctctaatattggtttctttgaggttttgctgcaacaaatatttttgtaatggtttctataattgttgttctttttttttttctctattaaagaatttcattttgtttgcatcctataagaacttctattccatagaatgaaatttctttaaggagaagaacagtagacaactcttaaactttcaatttttataaaatatatttgagtgtttaatcaattacaatgtattttttggtatagtgtgtacatgtatcactttatattgaaattatcttactcatatatttcatatatttcttactaattagtgggtataattttataatggttgagttgctaagatgttatactgaattaagtttatttctggagacaaattggcactactgctctcctattcatatcgttccatccaacccaaaagcataaacaccactaatattttttcttaccaatgttgaaccaagtggtgggtatggtgtttgaggtctttccaattgtttttttaattattattatagatttgagtgataattttttttttcataataacctaaatataagataaatatatattttaaataataatataagttatgtacaatgaacacttaaaaaatacaaagtgtata

SEQ ID NO: 84350 - DNA, 979 bp, Cannabis sativa
ctcatacttctgaaacattgaagtacatgttagaaactccagataaagcagagagtatggctagctaataagctacctgacctaccctttccaggataaacctgggacttaattttcctttcttttcaattctcgagttcccttcattgaaaccacctaaaaaaagaaattcccaacttggaatttaatatatttctacaccttggatcaacatagctcttccatccattataatagcaatatacaaacttgaatctttaaactacatcagtacaacaataacagtactctaataactgttattacatgaaaactcattcagtagattatccttgttatagattctctcagcatttagatgtaaactttaaatctcaatctgagataattactttcacagcatcataggattgaactattcctttgacaaatagattagtacactaatctaccacaaacgcatttcactttgataaagaaaccgtactgatcttatatattttagttattcccgaatataaagagtatagcgtagtatgaaactcatttaaaaccttctactcaatatccttatctgactaatacgccaaacttgtttttatattataaaattccttcaaagaaaatcataagtcctttgttaatccgattccaagtctttccttgtacttctaaagttcggagtcactctgctgagccattttatttctttctacagattaaactaccatgtaatattaacaagttgcccaatcatgaactcaatccctattctagttacattcccaacaaacgatggtaagatcttttcgctttacaaacttgtcctagacctcttcggtttaaggtatccactactaatttacttcctagagtggtagaaaatcacaccattaaaaattttcaatcaactttaaccgtcaccactgcctcccatctaaattcttctaacagaaaagtatttgaggctttcgtgatc

SEQ ID NO: 84351 - DNA, 900 bp, Cannabis sativa
aaaaaattacgactaacctaagagagatatgccctaagaaagctagataataaaactttaatgtttgaaaataaaacacctttgacccatcttagtcctaccagtaaagttgaagcttttgcaaaactataaaagatagttgaaattagtaatttctttaaaagatgttaaaataagtaatttagaatttatgtcatgtataagtttcagagagtaaattttaaaaataaattgtaataaaaacttatctcatggaaactccttagatccttgaatagacaagtgagtgaagtagagaaccacctataaaaatatatgaaatttagttaatgtcacactctacttaatgaaaataaaaattttaattcgagtactagaaaaaacattccaaataataattgttgtgaataaaaacttatcttaaaaatctcttgaacttagggtgtctagcacacatcattcttaggatgaaccaaaagtactttaaacgtgaaactaccatatatgacaaaccacccttatgtagtacaaaacaaaaacaaaactaccacaaaacatacaaaacaaacaattatgtagtaaatttgaaataatactagtaaataattgattagactttaaaagcaacaaaactaagtaataataaaataatactaataaattgtcaaaaaaagcaataaaatatgaaaaacattataaaaataaaaataatataataaaaaaaaaagaatatttttcatttttgttttctaaaaattaaaaagggcttgtaaaagctaaatcaacaaggtctatgtattattattaatagactaattaagatttttgtctcctgaactttggcatgtattaaattatgccttctgaacttttaaagtcattaaaaatgtcccatgaact

SEQ ID NO: 84352 - DNA, 1102 bp, Cannabis sativa
tataaattaactcagattacaaaactcataacagtataagaattgtgagtacaaacccagattatagataaagttccataactgtatataaataaaaacaagaaaataatatagtcaaatcccattccaaatattactaagccactccgttcatgaaccaccaactgtcggggactacaaattgccacaaactgccaaccacacgtctacgaactaccactaacaagcatctatctacaaagtcaagatagattaagaatagtttcaacctgtgagaagctttacaatggagaagaatatttcaacaagaaaatcaaaccaaacgaaagtctcgacaaaggcttctaccccatcgagctatatcgaaaagagacaaagagggagttcgtctccactagcacaccatccatctttcgtctttattagcaccactattgtcgttcttctccaccgtcgagatctaggatttctttacagagtgagatatcgagtttatggagagaaaacaaattttttggacagatatggatgtttcaaagggtgtagaactcatatttgatcacctagccgaattcggccatctgcctagtcgtttgcttggtcgtccaccttccttctgcctagaccgagagaggaagaaagagagagggggaggaagctaagaataaaaaataaaaaataaaaataaggatgggctaggatttcttggtttttgagttgtaaagtgtattagttacaaaaataaaaaataaataaataaataagttataaagagtattaaatgtgagctcagtaaatgcacaattttctttctttattattttttttaatttattttgaattcttacagctagcatttatatatttttatataaaaaaaaaaaacaaaagtatattatttatggagtttatttgtcaatttaggattatgatatagtgacgtgtcaagtgggtaaggacacacttacctagtcacgcctgacgcgtcactataggtaaatattttttgttaaaaaaaataataaaaattatgagagttatttttagtgactgttcatatttttagtgacccgaattgtaggatactaacactaaattttta

SEQ ID NO: 84353 - DNA, 560 bp, Cannabis sativa
agttgaacatcatcgtaaataaagcaattgaaaaaaatcttggtagaaattgctagtaaaattttgaagagagagaatgattgctatgaggaatgaggaaaaaatattaagattataaaattaatatattagggttagatttagaaaagtgagtattttttagttgtattgaaataaatagttaaaactcttttaaaataaataaataaatagctgaaaaagctaggcgattttaactataaatatttatatttttaactatacattaatattgatttttttgatgaagacgtgaggttcaaatttaatagtgagagagtgtatataatagaaatattagaaattatagaaaattagtagattaattaattgattaatatttatcaatctaattaaaaatataaaatatgagagaattaaagaaagaatagattaagttatttagagagtaattatagagatgccatgtcaccattttatatttttttttctttaaatagatatatagatagactagatagatggtgtcaagtcatgtatgttaattttattttagtttt

SEQ ID NO: 84354 - DNA, 971 bp, Cannabis sativa
ggcataaaacccaacataaataccatcccagatgtagacttcctatcatcaagataagcttaaaaaatctaagtcggtacaacctatgagatttaaagcaccacccttgtagactaacacataatgccttatagttttcaaatatttcagaacatgcttaattgcagtccaatgttcctcttctgggttggtctaatacctactcacaattcctagttcataacaaatgtcttgtccagtgcataacatagcataccttagactttgaactgctaaagcctaaggaacctttctcttgtctactatctcttgcggatcagtgggacacttttacttagatagaaagataccagttctagaaggcataactgtccctctggtgtttgtcattaagaatttctctagaaccttatcaatgtaagctgcttgcgagggagcaagtgatctattcttttagtttctaataattatttgaataccaggaacacaacaagcttcacccaaatctttcatttttaattgactgttaattccttaatgtcagtcattttcttgatattgttaccaattatcaaaatatcatcaatataaaggaccaggaatactaccacttgattatccttgagttggtaaacacaaggttcatcttcgttttggtgaaagccgtaggtttttattatttcatcaaactttttgttccaagaatgagaagcctacttaagtccataaatggacctattaagcttgcaaactttctcttcttctcttggaagcttataaccttctcgttgctccatatagattgtctcgtcaagaattccattaaggaaagttgtcctgacatccatctgccaaatttcataatcaaaagtgtcagctatagagagaagtattctgatggatttgagcatggcgaccggagtaaaagtatcctcatagtccacaccttctctttaggtataaccctttgc

SEQ ID NO: 84355 - DNA, 754 bp, Cannabis sativa
tcaattaaactataaaaataaattaaattacatatatctatatatatataatatgttatatcatttataatagacttatataacacctaaaataaaacaaattagatgtgtcttgcatataagtttgatctacaataaaactataacctgaaaagtgttagatctcgatttcaaaatataattatacgtgcacatagaataaaactaaatataaaactaagaaacaaaccgcgcttcgcgtgcggttgtatttcatttagtactaattaagtcacaaaactatattaaatttcaaatttttatattttttatgtattttttattagtatgagtaattattttactaaaattttaatttttgtactcgatatataaatatcttctaatgttatagagaaaaaagattagagatctttacacaaaatagagattttttttaattgataaatcttaaaaaaaaaaaaaaaactcattacataatttcaagactgttgtcatcactgtatcttacttatctttgccattacattcaaaatcactattatcatcgtatctattttatagtcacccctacattaataaatattgtcattgtcataatttacacttaaagtaattgttaattttttaatttaatgattgaactaatatagattatattttgctattcggatgtagtctatttggctatatagaaatagatttttgagctttattttatttatttatgtatttgactggttagtagtttatg

SEQ ID NO: 84356 - DNA, 969 bp, Cannabis sativa
  modified_base (767)..(768): a, c, t, g, unknown or other
gggtcttaacatgtcatatatcatattaattcacatataatatattatataataatataattccacaatgatacacaattaactagttaggattttcttatccattttcataatcttagggtattacaactacctcctcataaaaatttcgtcccgaaatttacatgaacaactctagataaatctgctgcatatccgtctcgagttcccaagttgtctcttccacattaatgtttttccataatacatttaccagtacaattatcttgtttctcaagactttctcacttctatcaagtacttgcaccggttgttcctcatatgataaattttgttgtagttctaatgcttcataactcagaatatgggacgaatctgagacatacttctgaagcatcaaaacatggaacacatcatgtacagctgccggcgttgggggcatagcaaccttgtacgctacttgccctatcctcttaaggatttcaaaaggtccaatgaacctcgggctaagctttcctttcttaccgaagtgcttgatgcctttcataggcgatattcggacaaataccatgtccccgatctgagagtcaatatccctttgctttggatcagcataactcttttgtctactttgatccgcgagcattcgcgctcagatcttatccactgcctcacttgttctctgaacagcttcagggcctaagaacttcctttcacccacttcatcccagtgaataggtgatctacattttcttccatatagaagnncataaggggccatcctgattgttgaagcacacatgcctaaagcgtgtcttctaggatctgaatagtcctctcggactttccatccgtctgaggatgaaatgttgtgctaaaattagactgagtacccatagctcgatgtatactctcctagaatcttgatgtaaactttggatctctatccgaaataatggactttgggac

SEQ ID NO: 84357 - DNA, 880 bp, Cannabis sativa
gatactctatttttccgcttaggttggctgaaagaaagaaacttgtaataatattttgtaaatatttttgggatcctaatttctgtaacttttaggttgtaaagtttaacttattacaagttttattttccttccatttattataaaagtttaaattgtgtgcccttttgattaataatcccgtttaggggattagggcttcataagtattttgggtagtgtgcctaattatttagggcattacagttttcttcgtttggcacgaaggctctcatggatgcgagaggtggattctacccgccgccaccaccaccgccatactcacatggcgctcaggtaagttcccttcccttttcttttaatgtcacattggggacaatgtgtcactttagtttggtgggtaaacttaaatttttagttaaaattttcattaatctttagtttctaaaattaattctttttgtgtgaattaatttgcttaatatgagttaatttggaagtaagtagatagcatgatttgaaaagtttatttaaaaaatctgtgtgcatggtgatgttatactcctgactaatgttaattttgtgctttaaaagaacatgtaatcatattaggtcattttctagtagttgaattgatttatgtatgctaaacttgactcatgaaaagttgtttggaaaattttagaacttgcttggttgatatttcaagaaaaattataaattatgcatgactaggaaagtgatttaggcaatttttggatcgattgtacctttcaagtcatccttgtttttatcccaaattttacactctaacgtggcatcacataaatggtgacacgtggaatccacttggaatatctgcccgggaagcatagtctga

SEQ ID NO: 84358 - DNA, 1047 bp, Cannabis sativa
aaaaaaaaaaaaaacctaaagaataattatttaatattataaaaattaataaattaataaataaaaatatattggggattttttatttttaaacttgaaaataatttttttttttgtatttttatagaattttatacaaaaaaaaatttatagcaactaacaggacaacttaaattgcaatcaaaatctgtatatcaactaacatagaaactaccggaaaaatcactggagcaacccaaacgtaaatttaaaaaagaaaataatatattaagtaattcttcaaatatatttctattatttttcttctcgacagtttaatatgaattgtaatttattttaaaataatttaatgatattttaaaaataaaaaataagtaaaccactaatatattcacatgcgttattctattcaaccaaattaatttttaatggaattggtagtaattaatgggtgtaagaaaaatttaatatataaacgtccataaaaaaacaattatataagtgtccgaaactaaaaatatatcactatttaggtcataaatatatatattttaggaaaacgatgaaaaaaaaagtgtctatcatttaattatatgtatatatatatcgtccaaataaaagactgacttatcatttggtttaattgtttttttggatttttatatgaagtgtcacatgaaatcacttgaatcccacgagtataagaatttcgttaatttttcaataaggtcaaataaattttaacttgtatatataataccaaacacaatgattcataacaaaattggtcttcagcccaatacgtagctagattgaacacacgtactatacatctacacaatttttaatgataaattgattgaaaattttggagtatgaagtacgatcgatgacgatgaagatgaagatgatgatcatcaatcatgatatatacattacaagaaatgttactactccgttgataaaagtaacttttaccagcgcattttgtaaactgcactggcaaagaggtcaaaattttatgctagcaaaagttctaataccaac

SEQ ID NO: 84359 - DNA, 724 bp, Cannabis sativa
aaacttgaggctaattagaacaaagtagattggaagcaagaggtatgggagagattgagcatataccaaaacacaagtttatgctctagttgtgtatgttggatcgtttgcaaagaaaaaaagataagttgtacagtctgaatatagctaataatgtggtgggtgggaatgaaactgatattctggaacatctatgctactacaaaaaggagtttttgcatcgaataacgtgcttggtccaacttgcgcaaaagttaacccatacttttttgcttcagttatctactgacgtaaataattattaatcagcgtcagttatttatcggttgttaaaacagaaatcaaagtaaaagatgaaatataaatatatatatatatatatatatgcacactattagcgtcggtacacaaccgacgcaataagccattaaaagaaatcaattatgggctttgacccattttaaaaaagtctaaccctaaaatataaaaccaacttctaaccctaattcccttctcagctgcccctctcttctctctctctctaatctaattccctctctccgcccatcatcaccttcatcttcttcctttcttctctatccaactcaaaagcacgaacctctcaaactctaaatctctatttcttgattttttttttttttgcaggtggcattggagctcatcgtcgaccatcatggagcacgggaccatcttcgccgccctc

SEQ ID NO: 84360 - DNA, 888 bp, Cannabis sativa
tacaagccacaatctcatatatgaataaggaattttctgatatttaatataaattactcaataataaatattaataatttaatattcaagcatatatcaaaatgttcaactctttattaaatgtctttacatgctattcagggcataaaccccaacaatctcccacttaccctaaaagcaaatttggtatctcccttcgtttatatgacccatagaagatttcacttgtagcatctttttgaatggatctactaggttatgttccgatacgatctccgagatcttcaagacaatatttgttgagacaaaagttgtcaggacaaaagacaccatccttgtcctaaagaagacatggtaggtgcttgtctctgtgaagtttgtctttttgggttaattaatttaattaaataaatgtttgaattttaaaagtggttaaagatatttcaaagtggttaagatattatctcaagtagttgagagattccctcataaatattggtaatcaaattcgattatagatatttatttattcaaataattaaatattatttaattaataggatttaactattataaataaaagcttgatttgagaaatcagaagaccttttcacatagtaatttttgaaattacatggagaaaaggaagcagttttctctctctcaaattgttcttgctcatgtgttgagaactcaataagaacaacactatgcactttatcctaatattccacacgattccttgtgtgtggtggatcgatttggaagacattagtgtgagttcaattttatcatcctcatcatctggattaggatacaatatacgagaagtttcaaggataccctgatagtcttcaatgggtatatgttctaaacttattattttat

SEQ ID NO: 84361 - DNA, 854 bp, Cannabis sativa
aaaattatttatgagaaattcatgtatatttttaattctttaattatttttgtggttaagtaacagcaagtttaacgatttttttttttaacttttctgttacataattcgagaagtaagataaaccaatcgttttttcgtcttctaactcttatataatatatacatatacatccaacgaaaaatatttaaatttaacatattaaggataacgggaagatattagtgaacagcagaaacttggatcagcaagctaataataaatttaactctccaaactcctccacttggttgcttctatctccatttccaagaccacactcacttctttctttgactattgggtactatttctcaataccataaccatttatatataatagatatagatataatctttgattggaagattttaaaagtctctatgcaactcggatgcccaatacaggctccaaactaacacaacttctttacttaaatttttattagcttttgttagcttgagccaaaactaatacaagcatcggatatatatatatatatatatatatatatattgtacatgaatatataaatggtgcagtgagactttccaagaaagtgtacatgaatatatatattattagcttgctgatccaagtttttgctgtcaacgattttttagcttcacataaagaaatttgttgaaaatcaaatcaatgggttgatcaagataggtctactccactctcctattctctccaaccatgtcgtcgggtacctctcctctctgcctctctagcatatattcttatgcatgtaaatgtgtcgattaatctacttgtaaaatcgggagctctctctctctctctctc

SEQ ID NO: 84362 - DNA, 549 bp, Cannabis sativa
  modified_base (52)..(53): a, c, t, g, unknown or other
aacaaaagaatggaatgaaaattgtttcctttccattccattccatttcatnncctccaaccaaacgtcaccttagttctttcaatgcaggcatatcagcatatggatatgctatatgcataattattaaaagaatatcttacatgtagattgccagttcatgatccacacatttctatgtatcttgagtattgtattagtatgctggttagataatcatacccaagttttgtacttagaaatgtccgcatgatggttacatgaaaactacaatattacatagattattacctctgcgaaaaagttcaagaccctgtgctaaatgttgtgaatagagatgcgatgacagaaaagaggccaaaagagttcgtagtgctgccagttgcacatttgccaaagtttcagttggtacattaagctgtataatacttcggtcctcgctggcccatccaccttttgaagaatgcttcactatatttattaaaataagattaatatctgggtgctctttcgaagactttggagtaccaccctgcaaaaatagaaaca

SEQ ID NO: 84363 - DNA, 738 bp, Cannabis sativa
attttaattttttaaaataatatataagattcctgtactcaaccaaacagtttaatttaattaacagtaatatgattacatattaacctacacaaccaacagtttacacatttccctataatcatattctctttcataatatttcctataataaaattattttgaatacctcgtaccaaacgcacccttaagaaaatgcttctaataaaaatagtaggtgttaaaagaaagaaatggaaaaagaaattagaaaattatgatatggttaattaacattattataagaataatcagccagtttaatttcaaaaaaaaaaagaaaaacaataatcagccaaaagaaaattttataacgatacttttgtcgaaaaaaaaaacattataacgatccgcgtcacgatttctctcttgtgtttcattcgtaaatgaaatactatcgacggtcaagaaaacgtttcagtcttcacacggatcacaattctcagccgtcgattaaaagtatcatcctacggctaaaattggatcgcgaaatgcttggctccaattctcgcctctatatatacgccacaaaacacaatcccgcttcatctcatcttaaaatattgaacgtactgtttggctgtggagaaaatctctgagaaaatgtcaggaagaggcaagggaggtaaaggcttgggaaagggaggagccaagaggcacaggaaggttctgagggataatatccagggaatcactaag

SEQ ID NO: 84364 - DNA, 5110 bp, Cannabis sativa
  modified_base (338)..(343): a, c, t, g, unknown or other
cttgaaccttttctctcaccaagtggcgatatatctctatgtgcttagttctttcataaaaaactaaattggcagcaatgtgttgggctgatttgtttttgtaattaatgaatgtatcaatttttctcaataaaactaaacaaataattataatcaattctcgtaggaatgttactctactttcgttataaaaaatcttatttttagtcacagtaaaacttgtgattaaaagtaaaaaagttgtgactaaaaagttcgtgattaaaagtattagttacaaaaatcacaatttgttgtaactaaatgtatttttagtattgtgactaaaactaaattannnnnnacttgtatctaaatactatgttaatttaatcacaagtaaattttttgttgtgactaaaagtcacattaatttagtaacaaatttttttgttgcgattaaaaagttatcattaaaaatagtcttttttttttttatagtgtttatcattatattacttgattcaattacttatacttgcgtatcaattttaccgaacaaacattataacctcactctcatgataaatgcctgaacaccactaaatactaacacaaattcctctttacaattgctcacaccaaactctatcatgtatcgttggattttctttgataaaatcattaacaatctgtttttcttatgtcttgaatttatacattatatataactataggtatattattagtcactttttattctcacaaaaccagattatttctaaccttccatatttgatagaccactgcagcaatggtcatggccaaaaacctaattttgaataagaggagacaaaacaaatctatctatccatttcaacaaataattcagttttacatttggagatttccatctcattctttaatgccaagtagacacatttgaataaaaaaattaaaataaattgataataatgtattactctaattaaattaatgattaattacatattattaaatcaaatatatatatatcaagatatgtataagaatatattttataaaatatcttgatatatatgatgatattacatatgtatgtgtgaagcaaaaaataaacatttttttttgaggtggtgggggcattttatctatgtagataattaattaattaattaatggaaaagtacagtagtttaatcaaacaacaaaaaagtcttgaaattgactaattaagtatatatcatcactacacacactaatattactagtactcattattaattttcatagcttcatctacaagttttgatctacaaattaatttttcagtttataaatatacttactgagactatacacacatatatatatatatatatcaagttgatcagaatttatacaagataatcttcataaaacaaaagctaacttagcacaaattccttctaagaatattatctattttataagtacattaataataacatttatatatatagcagccattgtttacttattcaaaattattaaccacaagatatatatattatcaaattaataaccaaaaatttactcattggccattttaattattatcattatgacttgatacattcatcaattggaaaaacaaaaatcacaacattcatatgaatatcaaaattgaaattaaaatcaaataagctaaattaaacattaattataataagtaataatatataattttcctttcaagtactaataactagcactcaaaaacatgatcatgcattgataattataattttaatgtgactattttctcttactaataattatttcttcttatccttgtgatcagaaccaagaagctcttccaaaaccttatcatccaaacactcaaactcgaaaacttgcctttcttggcggtggccagctggaccagaagaaccctgaccagctggaccagaagaagaagaagaagaagaagaaacaccataagaagaattttgagtagtcgaaaatgaaatgtttggaggataaggaggagatcccaaaaccctagaatagtactcattagggaaattgagaatagcaaggtgacctctaaagttaaaggcagccctatcataagccctagcagcctcttcagccgtgtcaaatgtcccgagccaaagcctagctccttgcctcgacggatccctaatctctgcagcaaatttcccccaaggccgccgcctaactccccgatacttcaccggattactatgatgatcttgatcatgaccttgttcttggctcctcttgtagttgttatagtcattagggtcttccatatagttatatgtcttataataagtcttagaagtatactctctttttcgccctagcaaagtaatatttttttattttcttttttgttctcttttcaaagtttggtagggaattgatatatattgatgcatacatgtatatatataataaaataaaataatattaaattataacataacacaaacaaatattatgtggggatatataaagaacgtgggattgactaatataatatatatatatatataaatataaatataacaatatattgctctctttcttggaaggttcttcatttaagtatagaaattcgattcttcgactcattctatgagcaaatataattttatttaattaaaataataatattattataaggatattataaaccttcttttttgttgatcataggcatataatatattttctttttctttttctttttcttttttgtacatgtattagaattttttttgctatatatgtagtgaaaaaaataattaacagataaaataatggattctaactttttatgatttattacaaaaatagaatattttttggggaccaaaagatgataccccatatcaaagataagaaaatatttggatctagatatatatctatatcccatgcttggctgtatatagatttacgtggtttattatatatatattttgattatatggaataagaatatatttttttttgggtgcatggtcaagataacaactagaaattcaaagcaaatagaatgaaaaagaagggtcttgcttacgttttcttaattgatcgtttatattaatataaataattaggatatatataatttgtaaatattatatgattaaaagtttttagtatatatatatttgctttctgatgtatatatatattgatctccatcttaattggagttatgattcgattctaaaatatatatacccaatattaacattttttaatattatatattatctatctatctataatatacagaaataacctatatatgtttttttttttactaaatagggtaaaaaaataaggttttttccccttattccaataatatatatttatgaaaaataatatgtttaaattaaatttatgtagcaaattaaaatttggagaataactatacaacatttttaatttttttttttttgaaaaaatttacggtttgggttgctatggtagtttctatattgattgttattaaaaatgtcacttttgccagcgcagttcgttactgtgctggtaaaaataccagcgcatttcacaaattgcggttgccaaaaattcaaaattttacctatacatttacagtagcaaaaatctaacttttaccagtgcatttacgtgctgaaaaaagttatttttgcaaacgctttttattttgccccgacaaaagtagttctaataccaatattgatttgcaaactcttttcgcctccgttttgtgatcaacgcaatactaaacttttttcagtacaaaattatgctagcaaaagtgacatttcttgtagtgctatgtgaatttcgattgaaatttaggttgcatgcatgctctattaattgttatatagattttcttaaaaatacaaaaaaaaaaatgatgtaaaaataaaaaaaaaatactttaatattctccattatatatgtatatgtaatataagaaaacaaataatattatacatacgaaatattaaaaaaaaaaagtattatatatatattgtctagctacaatctttaacttttctattaattaattaatttatttcttaatcacttttgccttttggtaaggagcaaacgatagatagatcgaaagagactaattaataattaacaaaaattaagtcttactttcggttgtaataataagactaacacaatatacttttttttattagttaattttatttaataataataattacccataattatgatatgtatatgtgaacaatatcattctctcttcgattaaaaaaagatatatgacataataatatatattttatgctatccttaattacttaatttttgtcattatatataattatatattaattaatgcatacatatataagattacactacgtacataatattccagaatatataaaattatctaaattgatctagtttgggaaagttattttttcaaaagctttcatattgaaaggaacataagttttatttaatcattataaatatttttcatgcataaatttgttgggaatgattaattaccaatttttttataattattattaaattaaattaacatatatagaactaatatatttaaacattaatatattacaatatgacactttgtaatagtgttagacttaaaattacaaacgatttaccaatcgagtttctcactttataactagagcgtttcgtttctatgttaatcgtactgattcggaatataatttactttttgatgttgctgacattgttgaattcgagttgatctagttaaatggaattttcatcccaaaactacccttaccataacttaacattaactctctctctttctcctttttttttttcctatcttcaattttgagttaacctaaattcttttccaacttttcttagctaaggcccccacacaaaaaatggttcaagaaaatgtcactcattaatcaataataattaatgtcacaaaatcttttatgatagcatcacaaacattcaaatttcaatcatgaagaaaacaaaatttaattttgaaaacctaacttttaaatggcactacaaaaattaggtacttttagtgacaactttttag

SEQ ID NO: 84365 - DNA, 1502 bp, Cannabis sativa
tctttcaaggtaccttggtgcctcattcataatacatgcctacacaatgcaagtcgttaggtattcacccttgcatgtagcttaatgttatttttatgagttaaatctcatttacaactgctactttgatgttcctttctgacgataaaggttcaattttttgactttacattgtccatagataactttaatcaattatttggaaaaaaaattaaagtggagtgggtttgcaatatatcatgtatttctatataaatttcagttaatcatacacatatatatgcccttcaagtaatttttaagaaaaactttgtaattacttgaataatattgcaactttattgataatataagtttcacattacaaagagaaaatacaacactaagtttactggtaataaggtcataaatgttcaacattctagtggttctttattagcaagccgttaagtcaagctaatttataaacccgggttccaactatggcttcgataacataaggaccttcctaatttagttatacactcctacagatgcatctctcatgtttgcaaatactcgtcttagcaccaaatctcctacattaaagatccttttcttcatccttttgttaaaatatctcataattcgatgttgatatgctgcattagtaatttgcgactcattacgcttttattcaagtagatccaaggaaaaattcaagagttcttggttttcttcttgattgtagaaaacccatctgtgggtcgcaacatttactttgactggcagcattgcctccgagccaaatcccaacgagaatagagtgtgccctgttgctgttttctcagtcgttgtgtaagcccaaagtacttgtggtagttcatctacccatcttccttttacagcgtgcatcttcttaaagtatcctttaatgttttattaacagcttctacctgtccatttgcctaagacctcaaaatcgacgagaagctcttaataattttgttcctctcacaaaactcagtaaataagtcatcatcggactgagtcccattatcgaatactattttaatgggtattccaaatctgcaaattattttctttacgacaaaattgagaaccttcttgcaagtaatagaaactagaggttcagcctctctccactttgtgaagaaatgcacagccaccactgcgtactttactcctccttgccctgtgggtagtgccccaatcaaattgattccccatgttgctaatgggtatggtgaggtcatcattcttagttctgttggtggtacgcgaggtatatgtgaaaatctttgacatttatcgcactttttgacaaattcgtgtgtgtctttatttattgttggccagtagtatccttgtcaaattaatttctttgacaagctttgccaaactacatggtctccacaaacgccttcgtggatctctttgattatctcacttgcttatatggggagcacacaccgcaggagaggtattgaataacccctcct

SEQ ID NO: 84366 - DNA, 805 bp, Cannabis sativa
ataatttggtggcattcttctttatccgcccaagccttttcgtagtggaatctatagccccatctttggttagtttcagccttactcggaatagagttgaatgttattagaagaggacaatgatccgaacaccacctgctcaagtgtttcactttggcaactacataaatattccaccagctattatttgccattacccgatcgagcctttcgtataccatatttttttgtccttccattacaccatgtgaatttgcttccttctatttccacttctctgagtccacacttgtcaatagctttattaaagttcttcattagataccccggtttccctcctccacctagtttctcatgaatgcctcggatttcattgaaatcgcccccacaaagccacggcccattgttgttttcagcaattctttttaatagtgtccaggagttatgtctttgagaaggatccggatccccatagaagctcgtaaagcgccaattaagatcatcctccgtattgatccaagcatcaatatggtgatcgttaaaagacgttagattaaccgaaaaaggagccttccaaaggagcgccagccctccgcttttccctttagcctccacacaaaaacaaccttagaaacccaaacgaatacgaatcgactccatgtattgacttttcgaacgagtttcagacaggaacacaataccaggattgaaatctttcacatgattggcaagagcagtcacagtccacgggttgccaagcccttggacgttccagaacagtgaattcattgctctcggcgaccct

SEQ ID NO: 84367 - DNA, 635 bp, Cannabis sativa
agttcaaggggaatttttaacagcaaaaaaagttcagggggcaggatttagtacatgttaaagttcggggggaaaaattactaattagccttacaataaatgtactcactgttaataaaaatgttatttgcggcaaaactattatttgtaattgttacacgtatgactctaataaaagaaaatacgacaaaagtactacatcttaagattttattgcagttgtatattttttttagttattaagtgcctactaagcccgttaggtgccaactcagaaacacgtggcgatatacgtgatctaataatatatctccacatgtttttaagttgacacttaatagtcaaaaaagatacgtccacaacaaaatcgtaaaataatgtacttttatcgctactttttgtaattgaggtcatatatgtaacaattataaatgttaagaggtttcatcgcaaatatgccttagtaaaactgtaattttcattcaatttcaccattagagattatattagtggcttaaacaggacaaatataagacctagattctaatttattgggtctggacagaaacgtgtaatattagttacttttaagtcttcttttaaaaaattcaaaaattaagtctagttataaattt

SEQ ID NO: 84368 - DNA, 966 bp, Cannabis sativa
tgagaagaagcccaaatttgttaagaaattttgtgatatgatgtttgtagtttatgtgaataatgaaatgtttgaagaggctataggggtttttgaatatgcttatgagaatgggttggagattgaggaaaggtcttgctttgctcttttggttgctttgaagaaatctcataaggtggagttgtgtttagccttctttgatcggatggttaagaaaggagttgaaattacagttcattctttgactactgtgattaatgggttgtgtaagaaaggtgagtttcaaagggcaaaggctttaatggatgagttgggtattagaggggttaaggctaatgttttcacttacaatggttttatagatgcatatattgaaagaaaggactttgagggtgttaaggagatattgagcttgatggaaagggagaatgcgaattataatgctgtgacttatacacttttggtcaagtggtatggtagctgtgggaagattgaaaaagcagggcaactgtttgatgaaatgcttgagagagggatagagccagatatttatgtttatactgcactaatcaaatggagttgtagactagggaatttgaaaagggcattctcattgtttgatgcattaactatgagaggccttaaaccgaacactcacacttatggagctctgattactggtgtaggcagcagagattttgctaagtgagatgcaaaacgttattttttaacgattttaaaacatcgattcagtttgttaattacttttaataacttattttttttttaaaaaaataaataaattcatataaaaaaatcattcagtttgttaacgttaaagacgattttttatgaagttgttaatctattattcatataatcgtaaaagaataaaaaaaccaatagactcttcccttccattcccactcccaatctcaatattttcgtatcttattcacactcaaa

SEQ ID NO: 84369 - DNA, 1141 bp, Cannabis sativa
agcttcatcttcaatcttggactatttccacccatttgtccacccatccgattcaactcgctaggatagcatccgagttcaagcagctggagctgaaataagaagaaaaaaaataaacatggttagtaggtccagaattaacaattcacgtggataataattctcaaaaacacatgagtttatagtatagaaagaaataccttgtttctttgctagaaacttagggcattggggtttccagtgtcccttttcattgcaatagaagcttttccttttggcttatcactgggagtagcatcctttttctgtttaactgttttcacagcttgaacaggcttcttgctattcttccacttcttcttgttctttggtttggaagtagaggtaaagtttgcctcagccttagccgctttatatcattcccagaattaggagttttagatccctttttctgtggtcctccaatgaaattttcaaatgtctgaaggttgtttaccaactcgtgaaagtcaagttccttcttgttcatgacataatttgaagtattaggaagaaaggctggagtcaaactgttcaagatcagactcacttgagttgtctgatccataacagctccatgattctgagcttcttggaagtaactcatcatttggagaaggtgatcacgcacgttctgatgagtattcatccgtgcattgatgaaatttcttgttgcttcaaagcgagattgaattgatgccatcccaaatagttcagtcagctggttcaatatttatgcagccgtgagagtgttagcaaaccttggtttcaaggtgtcaaccatgtagaaagcatgaagtatcgagctttgttgttggcattttgccaacgcttgtacttctactttactgctttggttgcattctcacccggctgctcaggagatggttcaattaacacaaacacagcattttcaccaacgagagcaatgttaatgttctctttccttttgggaaaattagatccattcagcttattattagttaacagtggcaccatggggttggtcatctacatattggatactacaaataacaataaatagaaatcaagtaaggttcaacacaaaatctcattcagaaattattagcacatagcaagt

SEQ ID NO: 84370 - DNA, 786 bp, Cannabis sativa
ttacatcattttaaattagaagatatatatgtacaaaattaaattattattaaatcgttttgagataagaaaaatattaaatcaccttgaataatcaaatttatatgtttggacttttatttaaaggtcttttcttttcactatgtttttatattattaattattttaaatgagcagcttgacatattaaaaaattatataaataattacgacaacaactatgactaaactaaattaataaataaaaaaaataaaaagaattaaaaggcaaacaattagatatactatactttcttgaatttttagaataagaacatctcatgaaatttttttctaaaaaaagtttaatcctaatgcaaattttatatcaatactaataaaattagttagaagaacaaagaaaatgaataataatgcatatatttatattcatgagattaattagaaagaaaataaataaacaaataataattcttatacataccttagagacacttacatgatgatcaaagaataaattgaattaagatttgggtgtgagagaagctttgagattagtgccaaaaaactaaatatctatccactcattatccccacagaaaagaactgtggaaacctatttttatatgtatcactttttttttttatatagttgttaataaattacatatttatttggtataataataatagacataggaaaaagtcttttataaaaaatttgtaaccccttttgaattatgtcataaacgtttcacatgtctattgaatgataattgatgttat

SEQ ID NO: 84371 - DNA, 534 bp, Cannabis sativa
gtgttctaattttggacttgggtcatggtgaaaatactcattctgttctaattttgttgaaccatattttaagtttactaattctgggcattgtttaagttcctgctctattttttttttctttagaaggcaatatatagagttctagaatctagactatgggtcatttcattgtgggaatgcttgtttcatattaaagctttttgttagaatatgggagtgtatgtttgatctataagtcaaactttgcattgagttctgttatgattctaagaaaacatatgatgtcagaacataatggatataccattattttttttttcttttaaattgtgtgtgatataaagccattataatatttttaatgattatatgctctgtaatgtctcttaataaaattgtgctattttgaattgcttttgatttacaattgcttttttttttccctttttttgtttatgagattagtaataataagaaacattcttagttttaatgcctttagttttagtatatataattatagtgttctct

SEQ ID NO: 84372 - DNA, 677 bp, Cannabis sativa
catctacggatcaaccaagcttcggagcgtgagtgtagtgaaaaatataaaataaataataataaaattaaaaatataatatattcattcatctagctttggatataggaggtaagtgtcatatttttatattatttttctttaaattttttgttgtaaattatgtttttcactcaataaaaaattgtaaatcatatataattatatacactatgtaatatgcacacacacacatatatatatatatatattagttggatacaattataatatatataactaatctcatacctatacatataaatatattttttttatcaaagatcgaagaaggtttctattattttgtatcaatttgatgatatctattatcatctagatttgacattagaaataagcatcatattttttttgttctaatatatattaatctggtacaaatataatatatataactaattttatacttttatatatatatatatatatgtttttatcaaaaattgaaaacaacttctactattttgtatcaatttgatgatatattatcatctaaattagatatttgaggtaagcatcgtattttttttttattttatatattttttaaaaaaatattgcatatttactcataaaagattgtattaaattggatgatgtaatatatcattatatat

SEQ ID NO: 84373 - DNA, 855 bp, Cannabis sativa
aaaggaggagaaaattcttctaaataagcgggtacctgatctgaaatctgctacctgtgtaagttttcaatgtttcgtgacaattattctatcgataatcccttttcttattttaaaaattaaccatttgttaactaaaaggataaacgtttcttcatattttccagaaaaaatggttacctcttcatactctagctgcatcgggagaattttcttgtttattatgtgaactgtgttcatattatgtattctctccattatgaaacttcttgtatcaagtttcagcaaaagccaatttcggaagaagtttgtttgagagattggctttggttggccataagaaacaccttctcaatgtctagcacaggatgcaccctttaatcagttcttttccaaataagcagttttataacaatgagatttttgatggtcagaatgttaaacaaaggagttacagccaatgttttctgcaaggaaagatgtatggctcttactctttcataaatgtgccatatggaaaagagactgttaataacaagcatagtagcaagaacaaaattgaggcttttgttgtctctgagatagttgcaaagctttatgaaggtgtgtaataattgatgcatactcttattttctttctttctttcttttttttaataagatggatgaacaaatattgagaagaagtttttttattattattattattattttggttttgatctctcagaagttaaaaaaataaagaaaaatattagagttggtgttatatcaccatactgttattagagatgccagcactagctatttaattaattatatatatgtttgtataaggacaaaatatacagtata

SEQ ID NO: 84374 - DNA, 526 bp, Cannabis sativa
attattttaaaaataacaaatcaaaaaatcaaaaaatttctttttctttaaaattaattaatttagaattaaaaaaaaattaaaaaaattgaaaataaaaaaaaatcctaattccctaaaaaattcttactcttcttctcgttctctctctcattgctctaaactcagccgacatttcccgtcgaagccaccatcactatccaccacaactggtgactaccatcaccaccaaccctcacaactgcccaccatcaccaccaatgtcgaaacaactgcacaccatcaccacagtcgaaatcacaactgctcatcaccactactatcgtcacctccatcctgattcaaacacaaccccataactcatatccaaacacaatcaaacaaagatagacacctacaacgatctcagtttcaaatcccacaaaaacaaacaaactccattcaaatccataagaaaaaaaaatcttagatcgaacaattaaatctgtcaaaaaaaaatgaaagagagagaggtgagacagtggag

SEQ ID NO: 84375 - DNA, 1216 bp, Cannabis sativa
  modified_base (717)..(724): a, c, t, g, unknown or other
gaaggaccatatcaagtggttgaagttctagaatcaggggcatacaagttgggtaagtatgatgaaaaatgaaactcattctagtaccaggctattggaacggagaacatttaagaaaatactaccaattaaagtaccaggtcggatgaccatatcaagtatgaaataaaagaacattttcaattaaatgaataaccttctgggcggaccacacctaaagatttggataaaattttcaagtacttaggtcagatgaccacctttgaaagtatgatttttattttctacaatttgttttgttcatgttaagctaaagatcatatcagatgagcataatagctttgatgtaagttactacggttacagacatatttccgaccaataaatgaataaagatgtttatttaaattcaaattgagtcgagttcattagcttgttattaatttaccatccagtgcgtacaaaaggtttggtcgaacccaaaaccccgaatagacaaaaaagcatacttgtaaaaaaaaagtgaccaagagtcataagtctgctcggtcacttggggggcacctatacctgtacaaagcatttggtaaaaaacaaaacaaacacaattgcacgatgattataaacaaggaacgaaattcattgaataactaaagcattcaaacccgggattaaaggctgcccggtcagctagttgttcaaaaaatgaaaaatatnnnnnnnntttaaagaccgcttggccggtcaccttgtcttaaaagaggtccttatggccgaacagatataaaaaaaaaagatagtaaaagaaaagcactgaaacagcaggagtcccaggctctttgtatgggtcagctggatttgaaggggcctgagaaccgtcattctgggcggaaggagcctcaacattttgatcagtaggtgaggtggaagtggtcactcggcctccccataggctgcctgagcagcgcagtagtcgagaaacatgtctttggaagcgcccaggtaatcaaagtctgccttgggattagctttccaaaagtcataaaatatctcgagaccagctgtctctaaagcattcactttctcctcgagcctcaccacctcagatttttgcttctcaacctcggccctaagctcctcctccttagctttcttctcttcctccaacctgcgaagaagggtatggagaccctctcttttgttggaaattatttta

SEQ ID NO: 84376 - DNA, 902 bp, Cannabis sativa
  modified_base (382)..(395): a, c, t, g, unknown or other
tttttaaaaaaataaaattaataatagataatggaaaatattattataaaattttataatatattctctaaaataaggagaaatttttaatttaattttataaaattatttatgttatagttatttaaaatattttaagaatcatgtgtttaaattctgtaggttaattttttttttttgaaatttttaaaattatataaaatattttaaataataataatatatatgtctagtaatttatggtataaatatttaagtttaactctcagttataaataaatacttaactttaatttttgacggtaataatacataagttatatttctgaaactctataagcatttggctgttaaatgttaagtcattatccacgtgtcattnnnnnnnnnnnnnntttaaactaatttttaaaaaataaaaaataaaaaattaatgacttgaattaattagaaatcgccatgtagcaatttacataacacttaacattcatgtacttaaagaagtttcaggattataaattaagtattattactgttaaaaattaaattagtatacatttgcaattagaagttaaacctaaatatttatactaacaattaccctaaaaaaaattggattaaatttttttctatgattggggtacatctataaaggtatattactgaagcacctaatagcatgtattttttttttgcttgtgtgtatggtttagtagatgtgtgtaggattgccctagaaacagttgttaacaccaattacccaaaaccattataaggggggttcttgtcggtacaccagaaacacggtcaatactcaataataatgtactctactcttaaatggccacttgctttgcttttatcttctatcaaaatgctatgccttttttttaaaaaaaaaa

SEQ ID NO: 84377 - DNA, 696 bp, Cannabis sativa
agtgtggaggagttggacaaattcccttaaccaagctagtctcgttggcataatgcagaagcttgttcgagttaaacagactttgagaaggtttagcagaggaacaatgcaagatgttattgttgagtttaaataggctaaggaaatttacatcaaagctcaaaagatgcttgcaatgaacccaactgacaacttactgcagcaacaagagaaacaaagcaaagtaaaatcacttgggtgaaatgtaatgatgagaactctagttactttcatgctagcatgaggaaaagaagagttgaaaatagggtaacaacttttactattgtagacaagtagaagatgattatcagaaattgtttgaccatctccttgctcactttaagagatttatggggagtaagagcactgctaaaaaagattttgatactagttgtattgatcaaggggaaactctgaatgtggaacaataaattaaattaattaggccatttcataagaaagatgtgagagaggctttgtttagcatccactcttctaagagtcctgggcttgatggattcggatcaggttttttcaaacgcttatgggatcaggtgggtgatgacatatcactacttgtgcttgaattcttccaaaaaggctatctctcgagctctttgaataaaattgtcctctcgctgatttcaaaaattgaga

SEQ ID NO: 84378 - DNA, 520 bp, Cannabis sativa
catgcatagttcaaaatatcataaactagtctagtaaaacaattccatgggactaactatgaagtgccactagtagttgtggtagttgtctctgttcctatgcttgtaatacatgattcctccagaagtaaaataaaattaaaatatattagaaataaattatttgtcagataagaatttaaatatatatatatatgaaatgataaatttatttgacccaattcaagtagttcagagacctccaaatcttcaacttcattcatgtattgtctcaacacaacagagcaggatactcacaagtcaaccaattctttgagcaaattaatgcttcaactgtctttggagacaaagaacttctaaatatccgtcctcaagtagaaaaagttgattcagaagcaacactagatatttgaacaaccaaaacaactttagcaatgtgagagacaataggatacttactactattccttttccaccaatctagaatgtcaaaatccacattatcaagcaacttttcctt

SEQ ID NO: 84379 - DNA, 593 bp, Cannabis sativa
gtaatgggttttatttagggcacaaaacccaacaatctgttcatcttatgcagcgaggtactctcaaagctagtctcgcgtgctgaaagaaacagggaggtgcatgggattctcattgctagaagggctgactctatttcccatattctatatgcggacgattctatttttttctgccaggcttccacttctaatgttgaaaatcttttgaggtgcatttagaagtatgaattgtggtctagccaaagagttaacacaaccaaaagtggagttatcttctttccgaacttgtctcaacgatgccatgatgagattaagagtaaaattgggtttaattgcctggatcgaagggagaaacatcttggaaaccccttctttttctcggctaaaaagagagacgattatctcttcctcaaggagaaaattttaaatagactcaaaggttggaaggcaaggcacctatcgcaagtgggcagaatggttttggtacattcggttctacaaaatattctaaattatttcatgtctactgctttaatccctaagactctttgtgatgagttgaatcacttggttgcaagattttggtggaa

SEQ ID NO: 84380 - DNA, 1360 bp, Cannabis sativa
gtagaagcccaatctttttccactctggcccactaggtttagtccctttccttccacaacagctagctggtgtggtggattttgagtgacttgtccgaatttgctgaggtggataagtgaaacacgtgtttccacgtcacggccagaatgctgaattcgcttcagcattgcttcaacaatctgcctcaatttcagcttatgttccacttcttccttgcttcctttttcaacaacaaacaagcacaattaattagaaaatcacacctaacaatatcaatatttacaagacttaaaagttagcttactaaatagaaaatgacactaaaactaactaaaattcagcaaacaaacacattttcactgctcttctcacaatacttttagtttaaaagcataaaaataactctataccatagagttatcaactgggcaaagggtcgagagaattatctaagagagtatactcagagattatattgtaagagcttcaagagaagaatctctgtattctttgctcttaagtcaatacaatggggaggctattaccaaactgctcggggtcaaacctctttaaaaactttgtgttctttatttatcttttcatattacattttaattatatcactcatcgcttacaattaagactcatgtcattttcaaaaagcgaggtcaacagagagcaaggatcataaattttctctttacttcaaatttaatcataaacacgatggtggtacaaactcgcaagggtgtagtcgatcgggtagatccactggcagtagatcccacactgtagactctagggaatgcaatgatcccatcagtcactaaccccaaacaaccaatcacccaacgaccaacagcgggtaatggtgtgacgtctcctttggctggaatcacactcgttgtgcaagagactggatataccagttgagcagtcgatctaagtactcccagtactggggttccttcagcaataaatgttcagacaactgttggagatgacaccgagatccagaacctccatattggtcttgtgctcatgcaaggccatattaatactctgcatcatgatcaggaagagcttcgtgctacagtgaaccttgcgttcgaagagcaaaggcgtcagtgcacaaaatggaagcataaagagatggaaacgttaaaggctcaacatgcagccatcgacgaccgaacaagacaggctaccgtactgatacgaagagcctacaaagttgctaattagcaacccgcatccagcatcccgctgggcggctcagacgaagatctagctgggaataattcccaaactctaaacagtcagtattccaatcctcgatcacaggttccacctgtgggc

SEQ ID NO: 84381 - DNA, 898 bp, Cannabis sativa
  modified_base (864)..(873): a, c, t, g, unknown or other
agccccataaataaaccctaattaggttaactaactattaggtattacacattacaaagcccataccgaatataatatttactgggctcatttaattagatcacttatttagtccaatttagaatattagctcaaataaattatcttaatttgtaagcctacttattggattattaaaaataacccaacaatctcccacttgggctacaaattaattccaataaaaattatatttgataaccttatgtgcacataaacttgctaattattctccaaacatctcctttaaacaatctggtccatttcctataccaatatgagatcaaagcagcctttatatttatcgtaactagacccatcaatgatcaccatatcaaatgtatttaatgacatagatcaagcatgtatatgtaactggaaattacatgcaatgtgatcttaatcatgcctattttcaattggtcatttattccttagtgagatcaatcctcagtctttcaaattttatgtcaaatcacaattgaaaggtaatacattcagagcaataaagataataaaacctgcagaaaactaaacctacttaaagtagtgtaatgatgtcaatctataaagtaactaatatagaaaaaaaaaagactcccacgaaaactgcacatcttcaagtaaaacaacacccatatgagtatttcactcatggaagaccttgggtgtcaaacctttaattagtgggcctgctaaaaataagtttgttcttttatactcaataacactatcttagtctgaactctctctattaacagctagaaacttaatgtctatgtgtttagactttgttaagcactttttgttggaattattttaccnnnnnnnnnnatttactaacaagtatgttatttaa

SEQ ID NO: 84382 - DNA, 2553 bp, Cannabis sativa
aatgatgatcatttgtgggtaccaagatagtaaaaacgtcctgaacatcgtttccttgcggggacaactttgatagagtagaaataaagtatctcgaggggagtgggacactcctagcctaggatatggtacaaaatctttaaacttgctagaatcctctaagaacttggaattagctgaaagggggcaattccaagataattatagaattcttcgtagtactctctccaggggagaactgctccaaccttgatgtactcaaggctccaagcgcctatcccagacaagccactagtactggcaccatcgaacacctcatagattactctttcttgtggaaagcagctgaattccctaggagcaacggacctaatgcgacatcctcacctttgcttgatgtcgcaagactttaatacaccaccaacatattttccaatggcccttaccttggattaaacaagtttagcttcaaaagtgacattaggatcctagggggtctttgatttacgaggcttggtggacataatttcaaaatcaaggtcactcttgatgaaaaagcaatagagtgactcgggataaaaacaaaggtctcactaaaggaataaaagataaagtttgatgttcaggccacgcggcatattgcagataacgacgtttacctttacttatctcttgtaaaaattgcctatagcgactaacaatttcatcttgattggtttttattatatgatccctaattttggcatcattaatatcaagtttggatttaggtttttagattttgggtttgaatggaagggctaattctttaggacattcaatttttatgaaatctggagttgaaatctcaaaaccagattgggacatactgaaaaaaagaaaataataatcccaattcctggatggagttaattcgacttaaaccagaaacataggaatttaataaacctaagttcacttctcaaagccttagaaattacccaaaagagaaatcgaaaaacacttaaaccaaacacagtaaaagacgatacaatcggaagcaaaaataaaagtattaactcaagaaaaagggaataacagagagtaagaaataaatcacttactatttttctaaagatttatgggcagtaaatatcttcgcgattgggatcatgatgaacgtgatgatgggcttagagaatttctaagattaaaaaatggaatctgaggaaatatgtagaaaataggtcaaggacaatgagggcatgcaaggtgattaaagacgaagatgcttttttgcagagagagcttgaaggttcaaaaggcaaaaatggcaaataagtgttttaacttgagtttatactttaaggatggtcaccgttagattgaaagaataatgatctaacagatgggaacaagagaattgaaaaagatagacatttaatgcgaatgatgtgcctcaaaatcatgaaccgccaaaactcaaagcatgcaattttccaaactgggattaagataaaaaaaatacacttataatcatttaaaaagctatttttattaaaaaagaacttttaaaggggcagttgttatacccaaaattcagctacactaaagagagtgacacgtgtcttgcaatggaatatgaaccacctgatataatgaaattatatcatttaatgcaaagaaaaagaataactcgttagtaaaggattaatagaacatattcataactcactgactacgtagtcctagagataaggataaaagactattggatattgacgagacacgcccgcctcgaagtacatgacctcaagaaaataattcatttattcaaaagagtaaatacagttatgcaaagcgatctctacgaatagcgagacagacacctcactattctaagaaaactcaacgaggtgaatcatctgctaacacttagcattttttccatatcataatagacaaggataaaaactcgaagataagcgagatacagtagtccaaatcagcattaatcatctataaggataagaataataggcagttaagtggttatctagtattatccaacatatgatttaaatgaaacgtgagaattgatcacgtttaattaacggttatattttgaattgaatgtaaattactgccaacctatattcctgtaaatgggacagattccacacaaaaaaagggacagagaattttagagagaaaatatgtacgatcaattgtatattgtatctaagattcagaaaatatcctaaataagataaacacgtggagtatgcagatttaactgcaaaacaacgtaaaaaaaatctcgtgttgcttatacattatttatttcttattattcctgtgttatatttattacgtaaaagcttattatttttggttaacgaaaatctgcattaacagtatgtattgagacaattcaatttgtcctttttaacgaacaagtcaaagaacacaaataatacagttaagccagaatctaaccatagcaggattaagatcttttgatctaagattaactaagtgacattgacttaagaaagatataacagtaagttt

SEQ ID NO: 84383 - DNA, 1280 bp, Cannabis sativa
cttcataaagtgcaagtatgttagcatgatttaaacttacatctttaaaaactttattaggaaaaccatgcagtgggacaaaatttgagctaagaagaaaataatgcaatttgtacattcattctcttcatacaaatatttataactattttgtaatttgcctcattaaaaattttgccagagaaattcagtgggacaaaacctaaactaaggtcaactccaatgcatgtggcccatcagatgttgtcagacggtaaactacgggtggagtgttgttatgcattggagaactttaaatggaaaactacagatgtttggcaggagcaattgtggtatctgtccttttttattttttattttttttagaaaaataataaaagttaaatacttacaaaaatattatattttagagtatttttagagttgtttccattggagtatattttagtaaaaagtagtcaaaaatgatgtggatgataaacaaaaaataaaatattatatgttagggtggtataaagttttataacaactttgagcattgcttgcattggagatgctctaagggaacaagagtgtaatatatatgtaacatcttgagattagtaaatagattagaaaccttatttaaatggactatattattatatagtatgttcatattgtcttattgcaggtaatttttaataagttgacacgttatagttacaatcggatattttagctcgagctaagttcgaggtccaaaaattataagttatgtgcttaaggcaataacatgaaatacgtacatgattatttgggatatatatgtggatttgaattgactgcatttcccttaattgctatttacattgatttttggccttaggggaaaaatggtcatttaaccaatttgactaaatattgaattaagtcatttgttggctgagttagaaaatagaaaaccattttctagtcttaagcctcaccaccgacccctctctttctcttttaccctttctatgcaacttttgatctttgagtaatttaagctttttagttggatttttagagttgaactttgaggaataagctagtgaggtagtaagataccttttattacatttaatttttgaattttaagctctgaaaattgatattatatttggttgcatgtatctttgattaactattttagagtgagttatttgtgtgttgaggttgtcttgatttttactttttagaactttaacttgttgtttgtttcgagtaaatttgaatattaggtcaatttttcttat

SEQ ID NO: 84384 - DNA, 545 bp, Cannabis sativa
tggtggagtttacattggcaaaagcacatatgagatgagtgtacaaggctgagtttatctcaggtgtgggggactcactttgagcgtaccaataaccagcttgaatccatggttgagcagaggaattctgaaactgaacagagaagaagaggaggatgaataggatagtgttgagggctgccatggaaacacaaaaaggaaagcttgggagtcatggtacttactacttattgatacattggtcaagtcaagaaaagttgggacaacatttagtcatacaagaaaagagaaaaatctctagtactatgttgatttgatacatttccgtacatataacacctgcctacagatgactgaatctatgaatcatgagatttttgtggaataatttatcatatagttttgtctgctagagaaacttttcttttttggctgcaaagtagagaaacttcatggttatggttgtgtgattttgatcggaaatgaacaaagaaaaaacaaggaaaatgtagaaaaatatgaaaaaatggttttttttttttttt

SEQ ID NO: 84385 - DNA, 539 bp, Cannabis sativa
tttctgataatatctatggagcaacagtcagaaagaatcggctatcaaaaataaaaagaaaaaataaagaatgttgaaaatatcttgcatggctcaaatccatattttactttccataactgttttactgtttgtgttttctaataagatgtttgatacttgatagcgttagttttgtttactactcaatttcaaggcctttatgaagtttgatgatgggtttagagattcaagctattgcacagtattgtcccacatggattaaatgtaaaagtattaagctatatataacaatataggctacttcactgatcaccaattggttttgagatgaaacccatgattctcaacacaagccaagccccacccttttgttgttatccattatggagcttaatggctcatagaggaaccattccatagaaaggaactaataagagctcttttggttttggtggctacttcctctcattttgtgattgcctccttgggtttttgttctagaggccagaaagtaatatatttatgttatgtgacaa

SEQ ID NO: 84386 - DNA, 612 bp, Cannabis sativa
agaggtatgtttcaaataaatataaaattagaggtaaatttgattaattgatgaataaaagaggtatttttcaacttaccccttttgttttctactaatactatttaggattatttcataaatacacaaaaacaacaaaaaattacaaaaatacaatttcacggaattttaaatattttttacgatttttttttattttatttacagaaaatacgatctttttatattgtactcttgttaatttgttgttatttgtatgttattttttgttgttgttttgatgttatttaaatgttattttcatgttacttttatctagttttgatgttattttcgtgttatttttatagaaaactataaaaatgtaaaaaaaaattttgtaaacgtaaaaaatataattttttttttaccaaaaatgatatcttatgtaattattctatattgtttggtagcctgattatcttttgtgtatcagaattattattgcatctgctgccatttgattaatgaaatttttctaatttgtggttcttccttgagatttgcatgtggtatttttcgaagattatttacctaactaataataacaataatcaaacttggtacaccttt

SEQ ID NO: 84387 - DNA, 800 bp, Cannabis sativa
ccactattcattctcttctccaaactagatagctctagaaattttaacctcatgttccattaatcgacgacgagtggtcctcatctccccccgtcattcccctctctctgtgcgcctcttacccatagtcaatctctctcctctatttctttgttcttctttccaaagttggcaccatacatttgttcttctctccaaagttggcactgcacatgttcaacctctctctcttcaagacctctcttttttgccatttgacaccatgtggggttagtctttacaaacttttttttttgtactggttagatttgtttggtaggaagtgagttctcgcttcataatttttaattgttttttttaattttattttgcttggatctgagttaccaatgagtgaaagaagcttttcatcttttcttgagcgttgtcgaaaaggtaaggggtgtatttctcgtgtggagtcaaaatttggaattgttttctctgttttttgtgttaattcgagcagtgaatgcaattttcccaaaaattttgatcttagctatgtgatttatctatttttgtttcgcaagaaaccattgcaaaatacttgaactaatttgtatatatacaaaattaggaattctaagctgtattttagggattagttagtattgaatgcttaatcgagctagattttcgctaatttgtattatattttttacttggtaaataagttggaagaaactttcagcgatgttggtcctctccagtggtgtttcatggttacgcacaatggtaagctaaactctgttctaagt

SEQ ID NO: 84388 - DNA, 676 bp, Cannabis sativa
aataattgtatataccttagtgcccaactgacgtgttggatttggcacagtcatgagctcttgaataaacttcatgcagtatccacgttgaacaagatcgggttgaagccgacacttgtggtaagtgatattcggtctactatttacctttttactatcctgaagattgcatttcagcaatgtgttatgataaaatgaagttaattaattactacaattcaataattaatttattcctaacctactaagttaagaacttataacacacttactcatctaacatgcatatataatccactcattcgaccacgtacattatttattcgcagaatctacttcactattgatgaatatctatttatttaagatattcaaactcttctaacatatttaaattaataagaataagagttttagtagcttaccaactccaataaaaatagccttaacttcttcaaatggaatcaccacctatcaatcaacaccgaaactaaatctaacattagcagttaaaaccaacaatgttaaaactaattacaaaataaattacaataattatagaatttattaaacatcaaaactccaaattattttatattaatactaatattaataactgaagtaatcaaaatataaacaataataataacaatttgtattatatagggctcacttg

SEQ ID NO: 84389 - DNA, 505 bp, Cannabis sativa
ctcagtgtttagtattatatacttagtttttatgtttttcaaccgttgtttttgattgttctaaattattttttttaatgtatttagggttaggagaaatttttgaaggtgaaagttctctctcgtgatgtgatggtagtccccattgacaaaagagttattaaggtatagtattttcttttttgtgattttatttaattatttagttttgtagttctactgttattttagtaatttttttatgttattgttttaggattagaattttaaatacttacgttttaactggaaaaatagttgttttccgacttttatggtgttgctctggtagttcggtctgtagatgttgaaggtgaaggcttcgtatatgtttttgggtatactatacacagtataaaagaaataaaaaagtccagagcagtatatttgtaaaaaaacgccatgtaatgttatttttgtaaagctcacccaaattcaagtattttgtaaattttcctatataatt

SEQ ID NO: 84390 - DNA, 1395 bp, Cannabis sativa
taaactaaaaactttctgctatgatttttttttttcaaatgaataaactacaatcaataatttaaacaagacaaatcaaaaaggtaaattataaaccttgacaatatttttctttggaagtttcaacttgtcaacaacgtcagaggtcttatcacgcacctgaaaatattaggatgacaaaattaataaaataatgaaccgataaaaatacgattaatagttatacaatgctgcaagtatatcatgtactaaacaacattaaaacaacaatataacaactaaaaaataacgtaattataaaatttaataaacatgcaactaaaataattccaattaaaactctgatacaattgataaatgtaagacctaacctaatgatctagttttgctaaaaaataataatacaaaaaaaaaacttaagaaccttagaataagaattgtataataactaaattaaaattaaaaaaacaactaattagaaacagaaaaagtgagagacataaaccatttaaggttgaacaattcttctaactaaatacatcagaaaaaaaaaatataaacataataaaataagtctttgcaaccagacaaagacaacaaaaactaatacatcaatctttaaaggtgcaacctcatcatcattatctctcatcatcattatctcatattttcccctaaaaaacctcttcaatggatgacttggtgaaacaacagcaaaaaaataaattaaaagatgaaacaacttataaataacgttaaatcaacagagccatttaaaatatttagataaatctctaattcataaaagataaaacttagatcaacaaaagtaatatcaaaataatatcacaaaattacttatcttaaagtttaaataaaatcacatttgaatatgccgaattcctttaaactagtgaagaagactgaattttcttgggcatttcaccaaacacctagcaagtgtacttttatatgtatacatacaaaaactcaacattatgaataacaacaaaatttataaaatctatgaacaaaatagagaaatcaataactaataagcaaataaacaataaaatccaataaaaactatcaaatctaaaattttattcttgtaattttagcaaaaggagaagaagaagaagatgatgatcttacaaacatcaattgagcgacaatagtggaaaagtaagggtgagggcttgagagtttggcttcaacaaaaaaaattgtgggaagaaaagaaagagaaaaatggttatggaaacctagagaaagagaagaagcgagaaaaaaaatgagaggaaaaaaaaaagtatggtatcatcaatatttttgtaattataatactttttgaaacttaaaaaggtaaaaatagttttgtaaaaatgtttaaaa

SEQ ID NO: 84391 - DNA, 569 bp, Cannabis sativa
gtctagaatcttatttcttagtgggatgtatatttgtaaaaatagaataccgaggttgagcggggctatggaattttaccatttcacccctagtcttgaaaaatgccaaagttataggttatgggggcattttagtaaattgtcaaggaatgttttggtggcggccctagaatgtgacgcctgcctattcttttttgagcaaaggaattgattttcctaacctttattcaattaaagaaaaattagaagaaaagccaaaattgaaagaaccctcttctccctttctctctctcttttcgaacctgcctagaccaagggagattgttgctaattctttgtgttttgagcaaagaattcagagagaatcaagccaaggtaaaccctagtatcactatttattagttcttgaactttaaggtttggttgagtatgtgattttgagatatagggactgttaggattaagttgtgttgtaattaaaattctaagcttaatttgagttacatttagctccttgcagctggttttagtgtatggtgttggatttgcacaagtttgaactttgaaac

SEQ ID NO: 84392 - DNA, 1093 bp, Cannabis sativa
caacccacccaaacacagaccgactggcaccctaacccactcgagcttgaaacccgacaactcgtgcacacaaacgggttgattcaatctactaattctatacacccaaactcaaaaattttgaaactcgttaaaacccacccaatatgcacccctatctcatagggtccatttcaaatggtttatggcttaaacctacttcatcattaatactacaatggtacagtgacattgattgggcaagttgtatcaatgaaagatgttcaatgggtggctatctcatgtttttaggtcacaatttagtctcctagtctgctaaaaagtaacaagtcgttgctcgttctaacattgaaaatgagtttcgagtaattgctaatgttgttgagatcatatggatttctttcttgttgtctgagctttaagtggtgcttcctcaaccttcaatactttgggttaatactcaaggtgcagttgcattggcttacaaccctatttttcgtgcctgaagctaacatatcgagatcgaccttcactttgttcgtgatcaaatcattgaaaaacaactctcaattcgttatgttctctctttggatcatgatgcaaatatcttaactaaacctttgtctactgacaaatttagttacctcaaatccaaacttcaaatggcatcatctccttattagttagaacaattggtgtaaaagttagttaaaaaatatatttagttgaggtggcattggtaacatttttgtttttgaaaaataaaaatatgttctttaaccattttgtttttcaattttaaaaacagaaaataaaaatgtgttctgtaaattttattttcattataaattttatttaagttgagttttcaattaacaactcataatggtgagttcttagagagatttacttcattgctcatttcatttgttatttagaagtacaaaccttatatacactatccaagcagatttttcaaattgacacttttttccaataatatcttcacatatatgttattatgtaatgcttccaacaaacaaaaactcaacatttctctcctatatacagttatgcaacaagagaaaaatgt

SEQ ID NO: 84393 - DNA, 1827 bp, Cannabis sativa
  modified_base (727)..(727): a, c, t, g, unknown or other
  modified_base (1037)..(1050): a, c, t, g, unknown or other
aacaatggaggttacttgatctttcaaaaaaaaaaaactgaaaagaaataaaaaatcaaatgaaaacaaaaggaaaaaagagagggaagtgattgaaagttgattgatcgtcgatagggaagccacacgtgtctgtgcatcgaattgatgtgcaagtggtatatgtgtaataaaagaaagaggaaaggtaaaaatgatgatgtaaccgtgtgtaggtttttttgtaataaagtatgtaaattgtattttttgtgtaaaaatttctttttaatgacaattttatttgataattattttaattattgaataaatagttttggcaattatagtattaaaattgcaaaaagtggtatttgtgaaaaatagataaatggtgatggacccactaagggtcgacccactaagggtcgaccacttagtccatttccacttagtccattttttgccattattttatcattttttattccaaataaatcaatcataatcctaagtgaattagtataaaaagaaaagaaaggtctcattatccaactaatgctactaatgactcttgacctagttttcttcttgtcaaactactagagattttgagacttcttctttttcttcttttctctaattagaaatccttattgttcttcataaaataatttcaagcctttagtgattgagtgcatgcccacccatagcaagttagtgataaatcatagtgtgtaagactgtnaagaatccaaacaactgaaggagtttcgggctcagatcttagtgatactcgtgacagaaaggatacaagggttagagatctgagcaaaaggagtcatttaattatgctgcaaccaatgtaaggtttctcatactttttatttgtttattttcatcgttttagaagctcatatttaggatgttaaaaatatacttgttagtaaatctaggtcctagtaaaatatattccaataacttgcctcaaagtcatggtaattgatttgctttcaagaagtatggattttagacgatgtatgtgtgatttggatgtnnnnnnnnnnnnnntatgtgtttattgatgattgattgatgtttgcgaattttttacataaaataattataattgttctgaaatgatttttcttggatagtatggaaaaaattaagcaatttacttttttacagaacttaattttgattttatttgaattagttatgattttttttgaaaattggaaaaaattaggaggtgtgacacctccatgcgcgcacagatgcccgtgaaacacgggcgcacacggatttggacaagccttatgtccgagttttctcggtcaggtgggcaagttttgtctgaaggctcccaatccgcgcgcgggaatgctacttgcagcctcccctgtgcggcaaaatttggtcaacttttaaatttttgttattttatttaaattaaagtataaaatcaaataaatgatatttatcgatcattttattttattagatatttaattttattttcttttagaaatagcataaattttgaaaagttagttagcagttttgaatagatatttaggtgtgttaaaaacctaatttttcaatatatagttttaattttaaaattaattatttaatttcattttattatttttgaaaataataattgattatttagatttttcgataataatttaatcattaaattaattttaaattaaataaatcttttttccaactatccagtttgttgcatgtgtgtgttttatatatattgtttattattaaaacttctttttttttttttataaaacctattaatgtttgatctaaattgtcatggtt

SEQ ID NO: 84394 - DNA, 680 bp, Cannabis sativa
ccccatctcaaaaccagacctagccttggaccttgaacccgaacttggtgtcgaactcaaacctaaacctcaaaccagttgccgaacccgaacacgaaccaagatccaaaccccaaacttagcccaagaccttcgaccctaagcctgaattcgacgccagacccaaattcaaccttagacccgacttaaataaaatcaataaataaaaatcaaatttataaaacacacttttatttttaaaattaaaaaacaaaatagttatagaacacattttaaatttttaaaaacaaaaatttacttttattattatgattaaaaaatttaaaaacaaaaatgttatcaaacaccactttagcaatccgttaaagatgctctaagagaaccatacaaataataggtagctataattcaacattaaagaaaagtaaaaaggtaaaaccatttctttcaccattcattttaaccataaataaatttgacattacatcatgataattctcaatgtaattttacaaacaggatctaggctcagtaaaagccttatccatgtgagtgactagaaaattttggctagttagcaaattagcatggtgaaagtaacaacaacacacaccccacccaaggaaaaaaaaaaaacataacagattaaggacatcatcaaaaacaggatatattttctg

SEQ ID NO: 84395 - DNA, 510 bp, Cannabis sativa
atcctatattttttaaaatggtacaaaacagactatgaacttaatttttattaaattaaaacttaataataaactttatgacaataatagttttttagattgtttatattaaaaaattgacaaaaattaaatttaagaactattttatattatttttttaaaaaaaatagagaatttgaattataacttaataaaataaaagattcaatcaataattttggaaaatgatataattctacaatacactccattaaaatgagtatactgatacaacccctaactgttttagtatctataagaattttttagtctaaattttttcatagtcgtggacgttgtagttatttaagacatcctgtaaaattttgagaaattcagaataatttacaatatttaaattaatgtttcaaccgtctatttcacatgtgtataaaataaaaaagtgaagcgtgcaacaaattctttaaacactgtttttgacgtgttaaatttttctgaattttttaaaat

SEQ ID NO: 84396 - DNA, 700 bp, Cannabis sativa
cataggtcatctaattaacaaaaggaaagttatcagttttttatttattactgaattattttttaataatgagtggtcttttcaaaccaccaatgtaatattatgatgcttcttcttcttttatcttttcattaattattcatacataaatgttattaattaaatagagagtagggatgaaaaaatgaaaagttttattaaataaaaatactaattaaaaatcaaataaaatcttaaaatttgagaaaacaaataacaataagcaaaactcatatagaagatgctacatcatctcctccttagtattctaatctcatttatataagtatatagatagataaatatatatatatatatagatatattgatttgtaaaataatttatattaatgcatatatttgtataggtatttttttttttaaaaaaaaaaagaaaaaataaaacatgaagcactaaaaaaaaagagtaaaaatagattaaaaaatatatatataatatcgcctaattcttttgatttttttttttttaatttttgttccgtgtgtattttttcaacatgcatatatatgagtaaatttttttagattaaatatgacaaaaaatatttagtttgtaaaagatgttgtatatcacctaaaattattttaattgttggaagaatatattttaaagaaaaaatactcccaatttataatgcaa

SEQ ID NO: 84397 - DNA, 692 bp, Cannabis sativa
aattactaattggattggattggatgaggaaaaaaatgttggattggatcggatgcccacccctactgccaagtctttctctgatcagcccattaagaaatcttttattatgccacgtaaacttacagtcccttgaacgaagatcaatgccaccagtgttgagaaggaacacattaagccatttagtgtccctaaaagagactctcttccctcccatcatatcctcctccccccctagacagctcagatctccaatgaccatccaacttaggtcattagccagaatagaagatgctaatctgctccaaaacaagtccttgtattgttcatacggaggaccataaaccgcaaagagtctccaagagacattcatagagtgatcctaaacaattgctttaaaaacagagtccacaccttgaacaatttgaattctcacaccatcattccacattaaacacaagccaccagcagtaccttgggccagaatacagccgaaaaacccaacctacgagcaacctccaacattcttcctttgtttacttttatttccataagaaagacacattctggattatactttcttatccagaccaacaaagcctggcttgtcgggtcctatgcaaagccccgaaaatttcacaataggattctcatttcgaagaggggggcaagttaagggccgcctcctcgcc

SEQ ID NO: 84398 - DNA, 837 bp, Cannabis sativa
ctatattgaatatatattaactactaatttaatctttaaaaaaatgtgattaacataaattatatatttttttaaaaaatatatatattagtatatttctttgtttggttgtactttttgttaagttttattaataatttttaataataaggttttttaagtagcaaattaaaactaatactaaaatttagttgaaatcagttgacagcgtagtattgaattatgttttacctattacatttgctcatatatgtatggacaatatataaaaattaattttttttctcggatatattaatattagtttgatatattatttttaatataatgaaaatatttttattaaaatattaaacaatatacaaagataataaataatataactatttttttttgagaaaaatataattattcattacttaaaaacaaacctggtacaccatatttattttttaaacattttatttttggcggtaaatcccaaatttttccctctgtattttcaatttccctctctaccaaatcctcacccctaaatttcacagagaaatcacctttccccgaattctatcgcataatgtgccttctatctcataattagcactctctctctcgtcttcttccccaaatcaacctctctcttagctttctctcacaacctcagctcaccgactctccctatcctcaaccagactcaacccaaccctaacctctgcttcacacccaacgacgacggtggcccaaccccttctcttggtgagacccagagccccctctcaccctctctcctcagttttttctccaatctctctgtttgatcaatgcagccacctaatc

SEQ ID NO: 84399 - DNA, 866 bp, Cannabis sativa
  modified_base (97)..(105): a, c, t, g, unknown or other
gctgcacccaatgtaaggtttaccaaactttatatgtgtttatttcatggttttagaattcatattaggttgttaaagaaacatacatggtagtaannnnnnnnnctggtaaaatatttccaacaactccatgattagaacaaataataaaggagaaatggggtctccttgtcgaagacctttagcccctttgaagcgaccctgcacacggccattcataagtaatgagtaggaagtattcctaacacaaatcttgactctattgacaaaagtccttggcaaattgaaggcattaagcagatcctcaagaaaatcccagtcgaccgtgtcataagcgttgctaatgtctatttttagagcacatctaggtgaagtattcttccttctataattcttcaacacatcttgaagaatcatcacattatgagcaatgaacctcccttgaacaaaggcaccttggttttggttgataatgctaggcagaaccatagccaatctattacacataagcttagagatgcatttgtatatagttgtgcaacaagcaattggcctataatcagccgccttagaaggattatcaactttaggaatgagagatatcattgtgctatgcaattccaaggggatattacctgaagaaaagaactcattaactgctccacaaatttcagcacctacattagtccaaacttccttgaaaaaaccagagccataaccatccggacctggcgatttcgagtcagggatactaaaaagagctttttttatctccttgcaagtgaaaggtttcagcatagcaagttgttgatcaacagtcacaagagctccgaacttcaaataattcttattgatacccataaagg

SEQ ID NO: 84400 - DNA, 687 bp, Cannabis sativa
  modified_base (197)..(215): a, c, t, g, unknown or other
  modified_base (626)..(640): a, c, t, g, unknown or other
tccccatactacttgagacaaactgcttgtaagactcaattaattgatttatttaatcaactataattttaaaattagagtatgtctagtttatgaattttcactaaagatatggcttgaattttagggtttatttgttaattaagagattttttggagtctaatttataaataataaataatataaatgataattnnnnnnnnnnnnnnnnnnnaattattaaataaataattttgacctatatagaattaagattgaaaaatatggcatttataaaataataaataaatggttgataaaaatagcaaaaatataattagtgtagggcccactatgtggccgaccactatgcctttatttttgctattattttattattttttattccatataatttaatcctaaccttaagtgaattagtatatatatatatataaaagaatagttgcttaatccaactaatgcttttaaacctagtttcattctcttagacaactagtgttttgagacttcttcttcttttctcttctaatttgaagtcctatagtgttcttcacaattaaaattcgagccttagtgattgagtacacacccacctagagcaagttagtcctcaatcatagtnnnnnnnnnnnnnnngaatccaaacaattgaaggagtgtcggctcagatcttgattatactc

SEQ ID NO: 84401 - DNA, 597 bp, Cannabis sativa
ctgctgccatcggttgctgccaactttgcaaacaaataggctgaaagtctttgtgatcagacccgaagttgaagtagcgaaaaggtttggtaccaatttcctccgataaagtaactgaaatgacacaagaacaatgatcagaactcgcttcccatgtaaacatagcagaagcaggaatactaaagagagcttttttgatttctttgggtgtgaacggcttcataatctcaagatgttgatcaagagaaagaacagccccttgtgtcatacaacctagatcgatcttccttccaaccctgcttttacaacccataaagcttcggaaatggctcataaaatgctcaacaacttcagcaaaattatcaacttgcagcccctgatcgttagtgaaactaacaattctattctcagctctcctctttttaaggcaagcatgaaaataggatgtgttagtgtctccttttttgatccaattcaccttgcttcgctgtttgagaaagctgtggtagcttttctcaatactattaaatatagcagcagcagctgcttcatcacactggaagctaaggtttgttggatgggtctgggcaagcatcc

SEQ ID NO: 84402 - DNA, 1022 bp, Cannabis sativa
ccaaggattgcattatatgcagttgggcagtctaccaccgcaaaggtgcagtacttgaaagtactctggggtgtatcctggcacaaggtgattggcaacctcacttttgccattgggataagcgtggttccattgaatcccgtgagctaggaacctctcggtgataaatcctgctccgtgaggcctattgctgtgaaggattctttaaacaacaggttaacgaaactcccattgttgatcaatattctagccatgatcttattggcaatgggagtccctatgaccaggggatcatggtgagggaaacgcaccagctttgcgtcttctttcgtgaaagtaattggctgatccatgagtctaggcctttgagctggaagctgggttacttcccatacttcgtcatgtttaatggccccaacatagcgcttcaattctttttgagtggtcccccctatatggggcccaccaaagatcatagccactcttcgattgggtcttggtggcaggccaggggtctgctgagggatcgctcctcttgagggtactgctggtgccaatgctccgggcgtacttcctggtgtccctagaggcaatggaccccctgtggaaccgagttgagatggggcagccagttcttaatccactcatataggtgacccaatcggatcaagttttcgatctcatctttctgatttttgcactcattagtactgtatccaatgtcgttgtggtactttcatctcttgctgggatcccttcgcgaactgtctctgtacagaggaggaggccttcggtagtgcgtattttaccttatggagaaatagacccgctcttgcgtgtctgtcaactccgtgtagtgggtatattggggagtatacccccttttttggtgcttgtcctctatctggttgctgcctttttaggacctcttgctccgggagctttgaggaggtccggttaggctcgcgacaggagtggagtgagatgggactttttcacttatccctgaggggttcccgtaa

SEQ ID NO: 84403 - DNA, 511 bp, Cannabis sativa
agggtccgacacacaccttaagtatggcgtgctgagtcctctttggtaaaggacattatccatcattacacatcgatgcgcctgatattgtagcatcctggataaggccctttcctgaggcaactctcctctcgttatgtatttgatgatggagtccatccaactcggttcttgctcatttgtagctatagtttctatgactctaatacttggctccgcgaggtgttcaacgggtaccacccccagtctctctattttgttatccgatgctaacttggccaaatagtctgcatgagtgttcttttctcttagaattctttccactttgtattctgtgaactcatggagcagttctctgacgattgctacgtaagcggccatattttcttcgcgcgtttggtatgtccctgatagttgattgaccactaactgggaatcgctaaagacttctactcttgtagctcctactgcttttgccaacttgagtcctacaattagggcttcatactca

SEQ ID NO: 84404 - DNA, 1494 bp, Cannabis sativa
  modified_base (1055)..(1062): a, c, t, g, unknown or other
gaggcgaaggccgatatccattgatagaaaaagtcacttactgcctgattctagcaacaagaaagctaaggctctacattcaagctcaccctattcgggtatacactgaccaaccgttatgccaaatattgcaaaaataggatgcctctggacggttgctcaaatgggcaatggagttgggccaatatgagattatcttccaaccccgaatagcaattaagggtcaggccttagcagactttgtagtagaatgtacgagcaaggaagaaagcgtatcagaaaacaaccccgagctagtacaaatacctcagccaagtatcaatgaagacaagccgacttggaaactacatgtggacgggttggctacagatcaactattcggtccaggaatcacccttgtcacacctagggggcaacacctgcacgctgcagtcaaatttggatttaaagcatcaaataatgagacaagatatgaagctttgatcgccggtctaaagatagcccaggaaatgaaggccgaacatattaagatttgtagtgatttccagctggtggtaaatcatgtatctggagaatacgaggctcgaggggaaaagatgatagcgtatttgagaaaaatacatgatctgctcgtacagttcaaaagctatgctctcaggcgaattctaagggaagaaaacacgattgctgacgcattagctcgacttgcgagcaacaatgtaaatgatagagaaaatctgattcctattcagtttctcaaagaacctagcattactggcacggaagagattgaaatgatggatacatccccaaactagatgatgccaatagcaacctacctcaacactagggaactcccagataacagaaatgaagctcaaaaaatgagaaggaaggctgcatagtacatcatagtagagggacttatgtatagatgaggattctccatgccattgcttaggcgtgttacacaagaagaagctgcacgacttttgtctgaggtacataatggattttgtggaaaccaagctgtcgggcagagtttatctaagaannnnnnnnggcaaggttatttctggccaacgatgattgaagattgcaaggcttatgttagaaaatgtgataaatgccagagattttcaaagatacctcgggcaccgcccaacgagttaactcagatgcaaattccttggccttttgccatttggggaatcgactttatcggaaaattacccaaggatataggtggcgtgcagtatgcagtggtcgcggttgattacttcaccaactggatagaagccgagcccattagtagcacaaccattacgacgtcctccaaaaaaaaaaagtagtgcaagaagacttcattgtgaagaacataatttgccgttttgaatttccgtacaaaatagtctcggacaatggcaagcaatttgacagccaatcctttattgatttttgtacaaaccatggtattatcaaaagtttctccgc

SEQ ID NO: 84405 - DNA, 885 bp, Cannabis sativa
ggcaaatcatgccatttacaaaaataagaatggaaaccctaatagcgtgcgtttaactaaaatactattaagccgttagcgttgaagtattaaagaagcgtaaagaatgctagatcttcaaccaaaatgaatatgtgacaaatcaaatttgttaatgactatcagtcaaatatctatcaatgaaaattgagtaataacaaccctattattcaatatagaacaaaagaaaataacaaaatgaccaccccataacgataacaatcataacaaataatcacaccataaattatggggccaataaaaatctgagaatctctaaacatggacaaggataatcatgctaacacaaacatgttttgagccaattgagattctctcaatgtctcaaaaagaaacaagactaaaatctcccgccatgaatgaataaagtcctactaccataacaatagcaaggtggtgtagcaacactattattgaaaataaaaattaacataaaaaaataaaaacatagcaaaacaccagtgaagatccaatccatagccaataaataactcaaatctctgagacacatttctaaaagaagacgaagaagaaaagaacactcaagtaaaaggataaccccaacgaaatcgaaaatagtgtgggaatcaacaagacctgaccagagccacatcgtaaggccaaaaaatggccgacgagccctagttaggcaaaaaaatcaagggcggctaagaatttctacaaagaaccctaaagagtagagagaaacaattccttgtcatttactgtaatatttaaattttgctgctaattagattggatcatgttaattaattttaactatataatattttttaacactacactcatagtatttaattgaaa

SEQ ID NO: 84406 - DNA, 797 bp, Cannabis sativa
acttccgccggtaatagtccgctggtaataaatttgaaatttaaaaccgggaaaattcccgcacaaagcaattccttcaatattattactttcattttaaaaaaaaacatactattaccagcggatctagtccgcccctaatagttccgccggtaacagaacattttcttgtagtgaggcagcgacacaatttttggtttttttcttctcgattctttcatcatgcgtcctcaattcttgtatatactttctttaaacacccgaggacctgaaacaaaagaatcaagcgtaaaatagccctaaaattagaaacaaagagtgaaaactaaccgaaaatatgactcgaaacttagactaattttagcctaacaattactttattttatacagtatttttcttgaatttttaaaaatttagacaatattttttttattttttaaaaaactgttcgcaatgctttttagtgtaataacatttatcatacacttaatttaattttcttttttttttttaaaaaaaaaaaagaaagtaaaaataacagttacctgatattaattataagtatggacagattaagagataagaaaattaataattaattaaattattaaattattaaggaaggaagaagaagattaatttgactatttgaggaaaaacgaaacaatatatggtgtgaaatgttataattaataatattgttgttggaattgatcaagttgcattatataataaaagcatgcatgtgagtagtagtttttcctaaaaaaaattatttgtgttatgtgataaatta

SEQ ID NO: 84407 - DNA, 972 bp, Cannabis sativa
gggccatgagaattggagagtgtaattggaagccttcaattactttcaattacacagtataattacatggtcagacaaacatatcaaattgtacgtaattacctccaatcacacacaagtccaatgacattgtggctttctaaacgcacccttagaaatattgttgttttaattatttaaaattttggctacattacacttgtaacgataatatgtttatgaagtattaaatttaaataaaatgtgatatttaatttttacttattttttttttttttatatttttagttaatattggactctatctcggaggtcacacacagaatcgccaagataagaatgccgagattggccaattttcttgtagcgcattaattatccccgatgaacttgtccacctcaatcttagcagatgacattgtggcttttcaatcttgatcttcaagatcatgttcttgatcaatcggacttcaatccttgaactttgataccaaatgcgaccgacatacttaagaactcagatcaatgatgacacaattttgattaataaagataaaaagcaatctgttttattcaatacagtaggcaaccgggaaacctttggtactggatttagtttacagaaagacagctcttcaatggtgaaaattaataccaactcgaattacttacaggactaggagagacaagctctaattacattcaatcgatcaatacaatcaaaaattgtagtaagtaaatctaattatagagagaagataagagaggtttatatatatacctcttacaagtgaaaggtaagaaaaaaagtcataacagaaaaataattaactaatcatgttgcatcaactataactgtctagacatgtcaccaagacatgtgtggatctggctgtcctagctaagttacacatcatttatatatataaagtaaatattaatagtattaatctattcaaattgtgtatgctt

SEQ ID NO: 84408 - DNA, 1071 bp, Cannabis sativa
aaaaaaaaaaaaattagagtaaatttagtaactaatatatttaagcttatagattttagagtgattctacgtaacattaatttccgacataaatacttaagtttaactctcgattgcaaataaaaatctaaatttaatttttgacagtaataatacctaagttatatttttggaacttcggtaggtacctatctgttaagtgttaagtaaatttccacgtagtaattcctgattggtctaggtcattaaatttttattttaaaaaaaaattagttaaatataccaataagaaaataacacgtggataataacttgacatttaacagccaggtacctatggagttctaaaaatataacttagtattattatccccaaaaattaaatttaaatatttatttgcaattgggagtttaacttagatatttatgccgcaaattactctttaataaattcagaaggatttacaatataaaaaataatgttcaaacaccctatttcacatacatataggtgacatttacttagtaagatttttttaattaattttttatgttttcttaattggaaatgcagaaatatttttagaaaacatattctataaatttattttcacatttaaatttttaaattgagaattaaaattttaaatttttttaaaacaaataaaaagtcactttaaattttttttaaacagttttttttattcaatattacaaactcgaccagacccgaacccagatccggatccggactcgaacgtaaactccctagccttggacccgaactcggactccggcctcggacccaaaccttaggcctagacctagagccgaaccccagactcaaacctagacccaagccctaagacccgtactaaggcccaacccccatccctggaccccgacaccaacttcgacccctgacccagacctggaccttgccctagataccaacccgaggtccgagccctagatacgacttgaataaaatcaaaaaataaaaatgaaaataaactttacaaaacagacttttatttttcatttttcaaattaaaaaataaaagtagttaa

SEQ ID NO: 84409 - DNA, 568 bp, Cannabis sativa
tcatagctgcatctgctttctcatatgtgatttcttcatcatcctccacttttacttgaggaattgtttgtttgaacttattctcccttagcatctactcaacaatatccatatataaatcatcatcatcctcgttacatcttaaatctttttattcacaatatttttttaaaaaagaatagacaattaataataatttattatttaaactaactttctaataagacaaaaataggatcataactaaaatttatttagggataataaaataatataaaaatttatatttttaatttttttttatatttttacgatattttataaaaatataaaaaaaaaatacaaaaattacataaaaataacaagaaaacaacaacaaatcaatttaaaaaataatatatgaataataaaaaaaattaacaataaaataacaagaatgcaacataagaataaaaaactgtatttttgtaaataagatctaaaacaccgtaaaaatattaaaaactctgtacaaattggatatttataattttttttttattgtttttatgttttttggaaatttact

SEQ ID NO: 84410 - DNA, 560 bp, Cannabis sativa
tatatattaatattttttagtgccacttatatatattattttgaaatatgaacaaaattatttatgagtattatttttttttttttttgaaaacattatgagtattattattagatattaatagtactgtttaatatttttaaaggtgttacttaataattagtgaataatattttttaaatattattattttaaattatacgaaatttaatatttaattataataataacatctcaacaaaaaagtgataaacatattttagcactttttatgtgttaaaattatgagaattgctaaaaaatttactaatggtccctaatatctactaaggtgttatgtgtacgccaatgctctaaaatatgtataagataacctcatcatgattactttattaaaaaacaatatataagacttacaatgtatttatttgatagtgtgcacttgaaattaatatatattgaaaaattaaatttgtaatctccttaacaggcccggccctaggcataggcgggctaggcccgtgcctagggcatactctttctaggggcccatttaaaat

SEQ ID NO: 84411 - DNA, 1274 bp, Cannabis sativa
gctcttccgatctataatcacatctatatataaaatatatatatttaaacattaatttcaccacaataatttgtacactttattgtaaccatactctcctaactagaaattaagaatattgtatctatcattatcattattttttaaaatatgtatttagacattaatttcaccacaataatttgtacactttattataaccatactctcataactagaaattaagaatattgtatctatcactatcattattttttaaaatatatatttagacataattaattctctaatcaaattcaaattttgtcaaaatattttctaatataatccttatgcatagagagataaatataaaatacctataacaatgaaattcattcttttattgtatatataaaatacgtatatatataatcacatctaaagatcacaccaaaatagccgcaatatagctaaaaaaaaattatgaaaacatcaaaatctcaaaccctattttaaaaattaaaaaagaaaaatacattacctaattagaaaaatttaacgtacatgtattgcacttaacatcacttaactaaacataattaaaaagaaaattaattataagtatataaataagtatggattaagtatgaatccacatctaatatcctcgattagtgtacatgttaaatatttcaatccaattaaatcgtaaattaaattgaacattttataaacacccttatctccaacttctcattttatgtacatatgaacttttcaatatatttattcgttttttttctatttgtctccttaatattattttttaaaaaaaataaatacaccctcttcattttttacatttattcatctctcttataatttgatcctatatgccatccctaccatcaggaagcattatttatgttgagaaacatctacaatcatctgaatacatacacgcacatacacacagcaaataatctccaaagaacacacacgaaagtacccaatagaaccaaagatacaaccacacaaacttgagctctaaaaaaaaatacttttttttttattgatttaggaatatgtttttacaagctgagaattttacacttgattttctatgacagaacttctaatagtatttttagctaactaaacactaagaagtaccaattgtcataaatgtcgagatgtcaattatgacagttggacttacaacatataaaaataaaatattacacataacaagctgaatacacattttataggacatataatctaacaattct

SEQ ID NO: 84412 - DNA, 1447 bp, Cannabis sativa
cctccctttcttgctcatcaaccgagaatcaagattcgatcagtgtgaagtattggtgttgttcatcagtttagcaatccaccgatggagagtaaacgaaggttattcatttcgaatggcactaatccttgtatattgattgaccagaataaaagatcgcaacctgcaagaatatgagtataatgatttaaaaaaatatttattattatatattttattcgcgggcctcctgtcttactttcttcctttctctcttgagtaatggggagcgggctaatccctaaaaatgtttgtttgcttgtcgttggggagaaaaattttaactcttttccggtatgccgcttagcgaggaaggagcgaaagaaccaagtgaactctagtggtcacgaccagctaaagctaaagttccattaaagagcgtttccacggggtagaaccttttcagagaacataagatttttatgaggctgatcttgagctgccatccaagcacgaataccctcatttaagagaatattttcgatgtagaagtctcaaattcaggatcttacgctgtaacatgggctaaattttacacaataataaatatcatttttttatttacttttttgccacttatataactttttatacttttatatatttaatatagtttttatattttttcaatagagatttaatatttttgttgatttattttattgcaagtgtattgaagcataactgtaaaatttgcgtcaaatatagtattgactctttttttttgcgccaaagtgaacacaaaatttacaccaaccattggagatggcttaattctattttttttttaaaaaaataattttattccaaatgtattggagcacaattataaaatttggaccaaatataacgccaactcatttttaaagccaaatttagcataaattttacaccatccactgaagatggtcttacatattttattttatttaagcttatgtgatatatattcaattgtatatgtaccaacaattagagatggtaaaatgaaccagacacaataacatgactcgaaactcacataaaattaataaatgtgtttggatttttcttaatttggtttggtttatttttgggttaatataacaagtgtacttattaaacaagtcattttcgagttgacatgcataacctaaaaataacacgataataatctatttaaaagtatatgtgtacatttttatatttattatactatacgcaaataatattaagttaattaaatatgatataaacatttgaaattatttataaatgtgtcatgaactctaaatatattaagcttgttataattaaaattaaacataattatttttatgggctattttaaaaaatatgggtaaaattattaagattataataaatatagcataaagagtaaatgctactaaatatggcattatctaac

SEQ ID NO: 84413 - DNA, 1814 bp, Cannabis sativa
attatccacaattgtttgcatacctggctgccataaggaagccaaaatattttgcattttctcaaaatcaatcacccggttagacaaaaaccgtccaaccaaacaccatctatcatcaattccatcatctcctccccctgtaatcactgcaacctcctcaagatcctcctcctcaatctgaaatcgcaatatttcttcctctgtatctccattgtgccaacttgtcgaagccataattatgatccaagagccaacacgcacaacccccacaatgcagaaaacaaagaaactcccacaagagccggtcagccacaaaaaaatagccccccacaaccaagaaaataaagaaacctgtcaaccaagaaccccaacaaccaagaaacccgacaaccaagaaacccgacaatcaagaaattgcctgactatcacaaaacgaccttaacacctaaccattaacagagaaacatgtaaccagaaaaacaaagaaaccatgtcatacgacaagacctgacctgtattgtaatgctttccaactgttgaaaaatctaaatcaaccccctatgtttgctgacgtgcacagacgacatgggaagctttcagacgttcagaataccaaatacataccggtcgacgacaatcaaacatgcagctgtggaaggaaccagtcgaacggacggctactggaggaaacgctcttgcagacgactgctggaggaacgactacgcctactgggaggaactacgcccctgcaactatgcctgaggaggacaatcggacatactccggggaacctagaagagtcgggggcattgatgcagcggcgctactgttagggtttaccacgactaacttatatttttcttcttgttagtttattagtttatgctttcaaaaattaaagtaatatattaatatatgctgaattaatgagagaaaatctagtatgtatgtgaaattaattggtaaacactatcatagtgtcatatatcgaagataaattttactatatttgcaaattcgcgagcccgatatgtgctcatctccgcataattacttaacaagcttattattgtgcttatttgtgaaattggcgcgcccgatgtgtgctcattctcgcataatttcttagcaaatttattattgcgcttatctataattgcaaatgggtgagcctaatatagtgctcatttttgcgttattatttagcaaacccgttattatatttctacttgcaaattagcgagccttacgtgtgctcattttttgcaaaattatttgataagttcgtaactatgcttatgtactctcaaagaggcaagctcaaacacttattttcttatactaaaataccaagtatatggcaagctcgcgatagtgctcaattatttttacccattagtacatcacagatacagccaacacctcgcttaggcaccaccccgattcaatccagcagcacaaactccaagaggtttgctggcgtaacatctcagaaatatgaaagaatcaaaccccattgaaaaggtttgggtcgtgaattatttaccaacgacagaagattgtttgtctcattttaaggcccaatggtccacttggtaaataccatcctcttatatattggatatataaaaataaagaggcacattagaagaacgagaaggaatcaatcaatgcttggacactatatgtgcagatagcccaacacctacagattaccaggtgcactttttcttttattttaatcaagtccaacactttggtcaaataatcattttatatttgatacattagaatccgttaacttctgtggcga

SEQ ID NO: 84414 - DNA, 945 bp, Cannabis sativa
tacattttaacagaaaaagtgcatagttagtaatatatatatatatgtgctcatttctcgaaattacatttacatcgtatgaaaagacagaatgttaatcaacaattcagaatattcaaagctgccacattgcagtttagttatgtttaaagtaaaactaaattttgctgcaagtaaacccaaaacaatgttttcctttaaaaaataaaagtaataaaaatatgaattgatcatttattggtaataaattaattgtattttattcaaaaaaaaattaattgtatataaaaacaaagtggccaaattacctgtccacattttttgtcttatttcttgtcacaaccagttatattttaccaactcaattaacattccacatgtacatttaacatatctttctacaagctaactctgtttgatgtggtcaagtattctttctaaaactaactctgtttcttttctttttttttaatttaatgttttcttttttattctttatttttttatttaaaaatttcatcacttcatctctctcactatctaacatctgtagctctaatggattattaagcatcctaactgccattgtcatttatataataaaaggtatatataataaaactcatattataaagtagattaatgaatgaaactgataaaaatagttttttatattcatttgaaagaattataagcaaagagaaaataagtaagtgagggcaaaacaacattctaagaagtgatcactcagttactaaaatttgaaagaattaacccaacgaaaatttgttcgggtaactaaaaaggtgctcaaagtaaaaaaaaaaaaataataagataaaaatccagacaaataaacaaaaacagacccatctccaaattttaaaaaagttgaagagtttgccgattgaaaaaaaaaaaaaaaaaagaatgtctcgatatgac

SEQ ID NO: 84415 - DNA, 655 bp, Cannabis sativa
ttatttaaagtagtcgctacttaatatatttttttttaataattattaaattcaaaattctctatccaagaattactcatcgggagctccatcaaaaggaaccatggccaataaatattagtgtgtctttacattgttcaagcactgttctttacattgtttccttgcactgttctttacattgttctttacactgttctttacacgagattatccgatgaagcgaagtcaccagtagaggtaaacactgcatttttggtgttgttgtaggtaaatcttcctgtttgaaatggcccgagccaaggagctggccagtacacacttgatacgagcgggtcgggaccttgaaaacgtaagaggaggatgttgtcatcgtcaaaataaaagttatagtatccagaagaatagttggtctgggattttgaagacacaaggttggtgttcatggtgaaattttggttaggaagaagtgtatctgtggggaatttgaagctttcccagtaagtaacatgtttaccaaacacagcgcttctgagaacaaggttgccggaatcatggagatgcagtttcacaacaaggccggcacagaacctgttccccagtcccggtgtcgtgtcggtactccatacttgatctctgcctatgtcaagcaaga

SEQ ID NO: 84416 - DNA, 824 bp, Cannabis sativa
  modified_base (523)..(526): a, c, t, g, unknown or other
  modified_base (737)..(744): a, c, t, g, unknown or other
ccattgtccgattgcgcatgacactccattgtccgcgcgtagtaatggatgcatggtcgagaaatgccagcgcaagaggctgtcaacatgatttacgcacgcataggggaggcttcagacaagaagcctgtttgaaaaatctcggacactccattgtccgattgcgcatgacaccgagtatcactcgggtgtgcgcatgtgcaggggatgcttcccttttcctaatttttttcaattttcaaaaattcataactaatttaatttaaattgaaattaagttctgtaaaaaaataaattgcttaattttttccatactatccaaataaaataatttgagatcgtgaatctaaacattttacgtaaaaaaatttgtaaacgtcaatcaatcatcacataaatacatagatcaacatgaatcacatccaaattacacactcatcgttttaaatccatattttgtgaaagtaaatcattaccatgactctaaggctagttgttgaaatatattttactaggatctagnnnnactaacaagtatgtttattaacaccctaaatatgaattctctaaaacaatgtagataaacacatataaagttcaagtaacctaacattggtggcaacataataatatgtctcctcccacttagatctctaacccttattcctttctgtcgtagagtactatcaaaatctgagctcgattctccttcaagtgttggattcttcacagtcttnnnnnnnntgattgagtacttaacttgctataagtggcatatactctttcactataggtttgaaatttatgaagagagagagagagag

SEQ ID NO: 84417 - DNA, 1565 bp, Cannabis sativa
gcttgggatgcttgaagcgacagatggcaccttttattttggtttgcctaatattattggccgaaacaaaacctctattcttggcttcttaaagaataaggtaatggctcggatcaacagttgggatggcaaatttttatctcgagctggcaaggaaatccttcttaaaactgtgattcaatccttgcccacttacgctatgagtgtcttcttaattcctctaggcatttgtgaggatattgagaagcttatggccagcttttggtggaaaacaacttcaagcaagggtcgtggcattacatggatgtcttgggaaagaatggcaaagcccaagctggaaggtggtatgggtttccaacatcttcatgactttaatatcgcaatgcttgctaaacaagattggagacttttgtgtaaaccggactctctggtgggtcaaattttcaaagctaaatactttcctaccagtgattatctctctgctgatttgggaaataatcccagctttgtctggcgtagtgtttgggctgctcaaagtgtggttcgtcttggggtcgtgcgtattattggaaatggtgaaactaccagaattctctctaccccatggatgtctgacactgaaaacagacttgtaacctcaactcatccagctcttttgcataatactgtgagttctctcttctctttggagactcgtacctgggattctgatgttgttaaggatctgtttaacaaccaagatgctagcttgattcttggtcttccgttatctccaaattctgatactgacttctggtcttggttgggagatcgtactaggttcttttccgttaaaaccgcctactatttgctgtagaagaataaaccccagcactctagtgctgataattctggtttttggcgtaaaatgtggcatttgaagatccaacccaaggttaagaacttgctatggcgtgcaattactgattgtcttcccacctgccttcaactagtaactaaacatgtgagtatttctgcgctctgccctgtgtgcacaaaccaagccgagtaaattgtacatgctctccttacatgtcctttttgctatgtcatgttggcatactcttggtatcacttatgacacgcttcatcccttatcttttggaggttggtttgagaaagtacttatggctcttgatgaggaggttgtctcacgggcagctatgctttgtaaggcaatttggaaggcccgaaaccttgttgtatggaagaataaaacattctcacgaaatgaagttattgcatctgcacaaataactcttgatcattggcgtaacgctcaagataacacttcactatcttctttattctttgagaatcgaggagatggagctgagcgttggactaaacctgaagcaaacaaaatcaagataaatgtagatgctgcactttttccacatgataactcttatgggttcaggatcgttgctagagatagctctagcaatctcattgaggccaaaacgtggtattatggcggtgtctatgatgcgaaagttgttgaaacaatgggggtcaaagaagct

SEQ ID NO: 84418 - DNA, 1718 bp, Cannabis sativa
cccactcgccaccatccttctaatcttttagttacattggtctgcacatggtaatttgataagtgtgagctagtaaactcagtaaaaaaatatgtgcgaggtagtcacataaataaaaataatacacaactaaaacgtacatgcacatatctagacaaatagccatacataaatttaattttatcactagtaactaataattagtttctaaactaagtcacataataatgattacgcccttgtcaaactatgacaaataaatcgagctattggactaaatggcagaggactggattttgtaaaatcatatccgctactaaatgaccccctatctaccatttagatcaaacaatcaagtatttaaccattatcttctcggtcaaatcatatcacataagctacaatctatctaatttaaataatgtctaactactatacattatttaactagcataacatatcataatcatatcatattaattataccataaatcatatcattgtttaaataatgtgaatccattgtaccatccactgtccaaacaacataactagtttaaataatgcgaatccattgtaccgaccattattcaaactacttatgcatatctataatttaaataatgtgaatctattgtactgtccattattcaaaccacatacacatatctattatttaaataatgctaacccatcgtaccatctatcattcaaacatcattatataattatgaagaaataaaaataggttagtagtcttatacctcattcccactcctttataaacattttttcatacaaaaacctgaaaagtttttacttaattttcttacctcaaatgtggagtcctatccttgatggcaatgagaaaaataattatcttacaaaaaatatgaatttcatactctttcattaggatttattataaggatatacatttatatatgtattacatatatatgtatatatgaaactttaaccttgaatctacaaatttaaaattataaaatgttatctttgtttctaaataaaatctagtaaagcactagaaacttgaatgtaaaacgatgaagatagggacgtcaaaatgatgaagcatgtgatgaactctctctatatatatttatgtgtatatatgtataggagaagcgatggtggtgtatggtaatggcttggaggaatgaaagaataaaaaaataaaacttaaagaaatatgcggttaagagttaagaaatataaaggcaaactatgttgacaagtgagatggagacgatatggtaatatatttaaagtgtgaatgagagtgactaagaaaatgaaaatgatagcctcagtattaaagaaacctataagggaggagagattgagagggtaacttgagagcttggtctttgtgagtaagaaataaagagaaatagaaatatacttataggctctaagaattatatatatcacagtctactaaaccataccatggtccgctaccacaattgaattaactcaacaacttaaaactaatttcaaacttaattattttccttaaaacttccttgcaactctgtccagtaaactgatacatagtcttcatatattgtttgttgagaggatagttctcttaggttcccacgtgtactacactattcagtcaagtgggccaaagctataaagttgcttcttcatgcaaatacacatcctttgtattgggttttatgccctaa

SEQ ID NO: 84419 - DNA, 907 bp, Cannabis sativa
atcttttatagattttcaaaaaaattctaataattttagatgtaaaaattttgattcaaagagcttgttgcacttgtgcaataagttgtttgcatcttccatcctaattcttacattctaaatttgttagatttttttgaaaaattagctataactatattatacatcattatataatatgaaaaaatagattttttttattgtatataaaaaaatagatttgtagtgtactataagtacaaatatatatttacttaattaatatgatatgattatcaggtgggatatatctgctactgacaacttgccagagtacatgaaagtatgttacaaaaaatgtttagaatttttcaatgaaattgaagaatttacaaaggaaaattcatactgcgcgagttatattaagaaaggggtaatttttttttaccatcttcttttctttataataaatatttatttattttgtgatgaaagaaatgaactttcatcattaacatatatgaatttgttgattttttttttcagttgcaatgtatggttagagcttatagtaaggaagtccaatggttacacaataaatatatgccaacatttgatgaatattatccaattggacttgataatgctggatctgatgagctaatatcaatggccttttgtggaatgggaaatgttgtaacaaaagaatctatggattggatattttctcagccccaacctaagattatacgaactatgtcaattgttggaagacttatgaatgacattggctaccacaaggtataataataagttatttataatgattgtgaggtctaaatattattattaatttatgaatattatttaaaaaaaatgaaaaaattaatacataacatgatcaattaagtgctgcattattgtactt

SEQ ID NO: 84420 - DNA, 885 bp, Cannabis sativa
  modified_base (835)..(836): a, c, t, g, unknown or other
actggttggtttgaccgatcacctggccagaaccattaacctgggtggagttattaggtataacctctcctgacgaattactagataaggtctggccgcctaccactgggcccacaggtataacttgtgactggggattggacgctgaccatttagagtatgagaggtgttcccagctcgatctttatctgactcaccgagcaggataatggttgtaggttactgattggtagcctggtaggctctttatattagcacggtggcctgtcttgttcggtcgtcaatggctgcatgttgagccctcaacgtttccacctctttatccctccattcagcgaacagatgccttcgctcttcaaatgcaaggttcaccgcagcacggagcttctcctggtcatgatgcaaggtattactatgaccttgcatgagtccaagagctgcacggaggttctagatctcggtgtcatcttccacggttgtttgaacatttattgctggcgaaactctagtattgggaataccctgattggctgctgaactggtatttccagtctcttgcacactaggtgcgatttcactcaaaggagtcgtcacaccttaacctatggttggcagttgttcaggatttgtggctagtggaacccttgcatttttctggattctacagtgcgggatccactgccagtggatttgttggatcgaccacacctctacgagtcggtaccaccattgtgtttatgaataaatttgaagtaaagagccagtttctgacccttactctcaatgaaagtaccaaaatgttgacctcactattagccaacgacaatgagtcttnnttgtaagcgataagtgatataataaacgtgtaatatcgtaaaataaata

SEQ ID NO: 84421 - DNA, 619 bp, Cannabis sativa
aataattatttatagttattaataagtattcgtgggaggtttatcgtggaatgttacagagcatcagcttgaggatgccttcgatcattttggcaatgctctggaagctcaggtacttttttcttcttcttcttcacttatgaaataagttgttcctgatgatttgaaggaaaatgtgaagtggaacgattactattttcctatacattatattatctattatattttataaattatatatattatctgtttcttttgctaactctgccagctactgattaaacctgacattttaatggacaaaattgtgccaattatctaaaacttatcttctctgcattgttgtttttggatttgaattgataagtttcaaaatctctgtctgaattagaggttgttcttggagttataaagagttattgcaagactcacttgggaagagatggtatgtcagcagcaagtaaacacctacacattcgtgaggtattgcattaccaatccttttgttagtggaagctacttatgacaaagtctcatctttggttgactaattttactagattttttctattttattgtaacattttttatacgatcattttgtttggttgcttgctct

SEQ ID NO: 84422 - DNA, 729 bp, Cannabis sativa
ctccaggtcgggtttgactcgctccagtgaccaaagtgttgtcgggtcagtggcaagttgggtttgacccgacctgtttgccattcctaaatataaaataaaaatattatgtggataaaattagtataattatatataacatttataattacattcatattttttttttaattattgttgaatacatatttatgtccatttgacacatttgatacatttttttatacatttattacaaagtaatgatatctgatacattaaaacgttctcacagacggcactaaatattatcagaaaaatttaaataacactaaatattgcgagtattcgagtaaacttagaacactcactagcagttatgcgagtactaactaattgtgagtactcaaagtttgggatacgaaatagacaaaccaagaacaaaaatatagaagagataagagaattatagtggttcagtcagagttcggtctgcttagtcaatttttggtaattactttcagcttaatttattagatgtggatcacccctttatataaaaagcatgtgtccgttaagatcacataactagtcagacaagactgttattacaataattacataatttaattaatagaaatatttaaagaataaatggaagaacaatttaatccgttcttgtcttaattacagcaacgtattcgatttattaagagttgtagtttgtccattcacattctaaatgcacaa

SEQ ID NO: 84423 - DNA, 751 bp, Cannabis sativa
atctacttataaaaggcaattacaattattttatttatttaaaacaacgcctaaacaaaactcagataggttaccccacaaaatccaccatagctctatacaaaaagtaaaaaacgaacaagttgtcattaaaattataactggattcattggaccacaagcaacatgttaacctaatccaagctgagctttctcatgtaagggaagaaaaagcaaaacaaacattagaaaaaaaaaatagtatcagtgtacaaggaaaaattttcgaaaacaaagaaacttgtatgcatataccccattaatgatcactggatgtctctattccaaaatccaaaattttatttagcagagcaattgataaataaaatagtgtctaaaataaagatatactctggtgcaaataatcaattttttgtgatactattatcttacattactttgactataaaaataaaatagaactattagtgatagctctctcaaccaaactccggaacatgactcaatgacttgggagaaccatacaatagcataatataattcaaaaccttttgtgacactatactcatgggttaagtttattaaaaaataattaacattatataacaatatcattcttaataacttaggacaaaaatgtattataatacagttaatactattgtacctaggggtgagaattatggatttatgatgtgatttgatcacaaaatgaaatcatagtagaagtaaccaaatagacaacatgttt

SEQ ID NO: 84424 - DNA, 707 bp, Cannabis sativa
gtccatatatttcctctgctaatatgaacctttattaaaatgaatttggttgctatgatctcatttttcacttttgtttcaaaattttcttatgagaaagaatgtgcaaatgtgatatgtgagagtatgaaactagttgtttgtgcatactataattgtttattgttatgctgatatgatgttatcattggagttattgacatcatcatgtttaattttttttaagtatgatttcattacatatagttcatggatgataagttttcacagtagtacatgaaattttgctggaaaaaggacttgtctcgttgagagtacaactgagggaatataatggtggtgtgagtttggttcttctatttgctaggggaaccttagaatgtgttgatcatgatggttcattttgaatgaaacttgttgcaaatatgggtggtaagggtagagccatagaagcattcaagttaaggaagatgtccatttgcacctccaaagtgggttaaattttcaagtacatatcctataagaaactacaagaaaagttgtcacacacaattttggaatggtggttttaaaaggattaaatttaccgttacacctccagtaataaaattgtccaatttacatttttggatttcaaatagtttatcttctttgttggcaaattgttcagtagtatagtttcaaagttattataaaaccattttttc

SEQ ID NO: 84425 - DNA, 1051 bp, Cannabis sativa
tgaagtaacttgtattcctcaggtgttcctattgcattgaaatttttctttatatgcctctaccaccttttagctaccacgggatcttgtccaccctcaaactcaggcatttggatccgatgaaagatctgaaaatgatgactctgtcgagtggcaggatccatctgctgagcgggaactactctttatgctttgagaagagtgttcatagggaattcaacttgtggaggttggacattaactagaggggcctcttctccaaccattctccttgtcttccttccttttagaggcattttcttaggtctgtgaaccaaaagctaattagttagtgaggattagatgctaataatataaatatgctttatacatataaatatcaagatacttattactattattatttaaaataaatatcaactatttgttgacacactttgaggtaatgaaatccaatgctctgataccatttttctatcacgacccgagccttaggtcgtggcagatatgtaatatccataacttgggtggtcaaaggtcacactctgccccttgtagaaagataacacttataaatgttccttgaatttatatcacaaaatacttatctaaaaataatggattaactcctatatcgataaaaaatattagtaacaaaattaggaccactcatttatataaaagaacaacaatattcccatagttatgtagtcactgaatagatatatttaataggtcaataaaatactaattaatatctagcatctatcattcctcttatccaactagtatatagctaatttaagtcatccagagtatctattttagcttaactacaaaatcagttacattgaaagtttaataagtaaagacaaaactaatgatgtttttcttacttatataaaaaataatgattttcttcctcatcggtaccatcctcatccactagcatcaaattgaatttctggaaggtgagaaaatagcgggtgagcttataaaggcagtaacaaaacaactaatatcaaaggacccttggtttaataaaattcct

SEQ ID NO: 84426 - DNA, 630 bp, Cannabis sativa
ttttttttaaaaaaaaatgtagttttctcgtagtagcatcgtgaaacaatattgttctgaaattaaaaaatataacactatgtattgttataaaagacacacattgctcaatacaaaaaaaaaatactatttttagtgacaattttttagtcacacaacaaaaaatttgtgtgactaaatgttacttttagtcacaacaaaaaagttacttgtaactaagcataatattttagacacaaattctcactaatttaattttagtcacaacaagtattatgactaaaaacacattttgtcacaacaaattgtaatctttgtaactaatactttttagccatagattttttagtcacaacgtatgaataataatttataattagtcacaactttttcacttttaaccacaaattttgttgtgactaaaagtaaaaaaattttgtagtggctttcccatagcaacaatgtcaaaacaatatttttttctaaaaaaatagcaatctacattttagccagagactttttagtcacaacgtatgaataatagtttatgattagtcacaatttttttacttttagtcacaaattttgttgtcataacaacaacgacaaaacaatattttttctaaaaaa

SEQ ID NO: 84427 - DNA, 717 bp, Cannabis sativa
aaaaaaaattgcaaaaatacgatttcacgaaattttaaatatttttatgattttttgattttatttacaaaagatacggtctttttatgttgtactcttgttactttgttgttgatgttatttgtatgttattttttgttgttgttttgataaaattttcatgttacttttatatagctttttttgttattttcgtaaaaaaaattattaaaacgtaaaaatataaattttttttacaaaaaataatgaatagtaccttatgcaattatctttcttttttatctccaatagtatagcatccctatattttgccacctaaacttttctaccttaattaaatattctctaaaatattagatgctctaattatccttgaatacctatataattctttttttattatttatttttttcaggggaggcggctgtccctcttgtgttcatgtgggtccaccagtgctaccacttgcatgtgctactgtgaagacagatcgtcaaacaaacaccgaaggtgagaaaaactaattcaaagtttaaacctcaaaactttgactcgtgatctctcgctaacagtggcaaatgaggatgtgccgcttgagggttgagatcaccagcgggtggggagtctaatgctctggtccgtgggttaggaggtggttggagtatggtcgccaatggtggtggtggtttcttgagtgtttgaagagagagagagag

SEQ ID NO: 84428 - DNA, 540 bp, Cannabis sativa
ttcctaattctcattatctcactccatattctatagtccatagtccatatccaaacacaatgtttctctttctcattatttgtataacaaaaataccaagggacaaggaacaagggataccatacacgccacaattcatgtatgtataatgtaagttaggatacttataatggacaacaaatactaatatttttctttatttttgtatttatgtaccaatttaattattgggcaaaatttgaaagcaatattaaaagaaaaacttaaaaatatgcaaagtccccatcgaccaactcaagcctatgttatgctcaaaactaaagaattaacaaccaaccaaactagacactttttttttaatctgatacttaagtagacacatattcatttcatgctagtatccgtgacagaaagctgcaaaacataatttattctgttatctctgcttgagggacattggtagacaatccaggtgatgaaactaatgtttttctttaatgttatcatagtatttcgattctaaaatggttgacatgacaa

SEQ ID NO: 84429 - DNA, 931 bp, Cannabis sativa
gagaaaaaacaagataaacgtaccatatcattaaaaagcacctaacggaactttcgaaggggtagaagggggacacatcgcccaagttgacacccgggacttgccatgcgcccatgttgacattttgtcaacttgagctatttctaatttaattccgcaaaaagtgctctgggcatctttaccgtcataaaaaataacaaagattcaagtaaactcggggagaaaaccacaaactcgagtccctagaaatagggcccaacacctaggttgacctggtggtgggcctagcgtctaggttgagttggtgctgggtaaagtgcgtaggttcacaattaacctgggatgctgttcaattgctcaaatgtcaaattcgatgggaccattgaatctggcatggtcaaaatctggggagaataccccgtcttcatgttcagaagccttggaagtatcaaaaatagaatctcgaaagcttggtttaaaggccctagcgcccaggtcaacaaatggcctggttcgtttgggatctacttatctgaatcagatgtcattttgatcgttcgtcaagtttttcacaagtgcaatgatccatgaagttagataaaccaaattcacaactttaattttggctcattcggaagccgaaagttttgtcttccgtttccataaaatagcaacatctccgagaatgtgtgactagcttcaccaaaacatataaaaagactaagcggtgtcaaacaatcacttaggcatctcaaaggattttccttgcacatttttacacttttacagcgtctagtttgacattaaatgtcaacttgggcactggaatgtcaacctgggcgctggatgtcaacttaggcaatgaatgtcaacctggacgcttggacctgaactgcttcagtaaaaaaaccataactcactcaattttcat

SEQ ID NO: 84430 - DNA, 1026 bp, Cannabis sativa
taaaacttcttgagtaaactcaatggaaaaaactacaagagagaaaagattatctaagatatattaattaataaatcttatcgtgaagaacatcaatggaaacaaccaagatagctaagcctccaaacataatcatcagtgaaacataaagctggcttggccaaaaagtgtgcaacactatcctagaacaaaaattaaaaaagatactagtaaaattattacaataagtaagaatatttctaataatacatccaaagtaaaaattatccacatgatgattagagagagcacgaaccacattgacacactccgattcaaaaggtatacttgtttggatttatgcccaaaaaacaaggaattgatgaataatacattataaaatatatgcaatgcaattctaaaataaattaataaatataattaataaatatttaaaaaatttcttattgatatggagaatgtatagtcttgtaaggtcgtacaagagaattaagattatacaatacaaatagaacgtcggtagtgtattaaagtaaatggatctctatatagaactactaagtacaatttttactacacacactctatactctagtgagtgtgtataattttaatttggggatcacacatgtggatagacatgtagtaaagatgatatgtataatttgattatacctgactgaacccgatgtgtacatcttttatcataaaagagttattcatatcacaacaatgatcattaatagatcaatttgaattctgagtatgcatgaactcctatttgtgttcattaagttctttgatttactcatgaaagtttcttagagaaaataattcttacaacttatgttgtgaaactaacatgagtggtcgggaacatgttatacaataatagaatctaaactttttgaaagcatcaaatattagtttcatatagtgttaattttgggagtgctaacagttggatccaaatatataattacattattgattaattgttcacattgaattaatggtacataagaa

SEQ ID NO: 84431 - DNA, 763 bp, Cannabis sativa
aaaataatttccaacaatcttctcccttgtcatcatccagtttctgcactgtaggttcggaggtttcgtgttcaaagagattgaaggattcaaatatcttggactcattctcaaaaggtgagttatttagtttgtctggtattggttggtaacaagtacgggcttttcttttttaagaccccaataagtgagttatcatctcagaaacgtttggtgggttagctattagggagggttgggctttatacatatttgtatagtctggtcccaataagtcacagtagagtttttgtaactctgggttatttgtgggccacttaaaattaatgggctcaggaaagtggttgtcgacctaattcatcctatatactattggggaactccatagcagctatggctagtaacagaaaacatactcaaaatagctcttgtcaaaaatgtcaggggtgccggtccatgatccatgatatccactgttatacacatagcaatgcccctgcaaattagttaatgaatattttatcattattatcaatgagatagtacaaaatgaagctttgaaataaccaaacaaatccaaaataccaaagtgtggccacaactccataaatccaaaactccacaaatacgaaaacaaacatataaacacaaatttataatagctcaataacccttggtgcaggcagggagatggccttctggtggcagctcaggcttgtcctgtgttcaacaacaacataaaggaattatgtaaattcattct

SEQ ID NO: 84432 - DNA, 807 bp, Cannabis sativa
cattggctatgccagacttgctgatcatctcaacaggcgaaattcgattgaatttctgagaagagcttgacaatcttttaagagcagatggaatgagtttttgagtaacatcttctctttgttgggaaacatcgcactcagaaataggtgctattatgacatcactacatgaactgttcatggcttcatctgaatcactttcaagactaccatcctccttatcaagaggatcaccaccaatataacccctgcattggttagaaccacaataacacttttttgcaacagcaccaagcaccctgacatagttgtaatcaaatgtaatctcttcacctttctttatatctctcaatgcaaagagtcctatacaaatctcaccattcaccatccacttttcagtttgacaatttggttcgcagctatggttgataaaccttcctttatttccttttacacatgcatctatgacctcattgcaatcaagtgtcataaagtagaaatgtttatgtcctttcagagcatactccttctgcctcaacacataagattgcatatcaagtacttccccaacatactcaataacaaaatttcctttagatacatcctcaagaaacttaagcccataaccttttttcccacatctaaacttctccaattttgcatactttcgtttctgaaactgctggtttgaacaaaggtctcgacatggacatgttccttgcatacattcaatgtttagtactcgattcaggcaatcatcaccgcaacctaaccgaccatctaaaggtggcttgcattggcagatca

SEQ ID NO: 84433 - DNA, 1089 bp, Cannabis sativa
  modified_base (330)..(332): a, c, t, g, unknown or other
aaaaccccctcaactatcaatttacttgcaaaaaattatccaacctcatattttggtgggaaaaccctctaaagtactgttccgtttacatttttaaggtgtcgtctgtccagcatcgctaagtcctaattttgtccacgtggcaatgacatgtcactaaaaaattatcctacgtgaccatattttacaaaataaaaattaaaaatttaaaagtaatttgcagtaaaactctccaactaaaaatttacttgcaaaaaaccatccaaccttaaaattttttggatagtttttgcaagtaaattgatagttgggggagttttgccgcaaatnnntcttaaagtttttatttttattttgtaaaatatggtcacataggataattttttagtgatctgtcattgtcacgtgggcaaaattaggacttaacgagggtggacagacaacaccttaaaaatgtaaacggaacaatactttggagggttttcccaccaaaatatgaggttgaattgttttttgcaagtaaattgatagttggggggttttgccgcaaattacccaaattaatatttatagttaaatttgtttagtaaccattcatgggtaatatccattaaaaaattatccatttatatatatgagagagagagagagagataagcaaagcagattccatgtttgcaataggcagcacaggccatcaaaaaaaatgaacaagtgaaatcatgacaaacctgcattcctgttacagactttaagacaccccatatgatatgcttcttaacacgtgagaataatctccgccaagtccccgtaaaatcaacgcgatgaaatgtatccatgggtaacttaagatcattgacaacaaaccttgatccctcataagtaaccagcagctcaacctgcatagaaaaaatatctatattttattggacaagctacattaagagtatcaaataagaaagatgtgacaagcatatgaaaccaacttccaaattagaattgaacgatgttagggttagagaacatttagtgagaacccaccaagaagataatgctagtcgccagaggcgcttcttgcaagaaatcatt

SEQ ID NO: 84434 - DNA, 520 bp, Cannabis sativa
aaattgatactacataatcaataatagagatcaaagaaatgttcaatataacatctattcacatatatttaaaaaattataaacatataatcaagtatggaagatataggaaaaatactaaaactaaacatatttcaaattttcaaagattttaaactcaattatataaagtgtctcgtttaggcgagagttaatgatatcactagttaaacagagtagtgagctcttctaaaatcgacactaatttagcaaccttttattcgatcaaaacaagaatctagcgttatcccgtttaggcgagagtaaaggtcaatcctttttcatgagcttctattattatttcatattcataaacctttttctaagtagtcatctttagggatgagtctactagaaaaggaatctatgaagtacttatcttgcgagagctaacgatgttaaattgtgtaatcgtgaccatccattagggggacaacaagcacctcgaggtctcattagaaaaataaccatgtaagaccaa

SEQ ID NO: 84435 - DNA, 1273 bp, Cannabis sativa
cttaccaattatagatattgtaaataaaaggggaaaaccttccctcaagcatatagccctataaatagtgatttattctcactgggcgaagagtcgagagaattatctaagagagtattctcagagattatattgtaagagcttcaagagaagaatctctgtattctttgctcttaagtcaatacaaataaaggggagtaggctattaccaaactactcgaggccgaacttctttataaactttgtgttctttatttatcttttcatattacatttaaattatataactcatcgcttacaattaagactcattgtcgttggctaaaagtgaggtcaacattttgatgctttcattgagagcaagaataacaaactcactctttacttcaaatttggtcataaacatgatggtggtatagactcgtagaggcctggtcgatccagcgaatccaccagcagtggatctcgcattacagaatcaagtaaatgcaagggttccaccagccataaatcctgaacaaccgccaatcgtaggtcagggtgtgacgtctcctttgaatggaatcgcacctggtgtgaaagagattggaaataccagttcaccagccaatctgggtatccccaacactggggttccaccaacaatgaatgtgtccaaacaactgttggagatggcacaccgaggagatccaaaacaacctctccgtgatgctcttggactcatgcaaggccacaccaatactctgcatcatgattaggaagaactccatgcttcagtgaaccttgcattagaagagcagaggtgccaattcgctgaacgaagggataaagaggtggaaacattgagggctcagcaagcagccattcacaatcgaacaagactggccatcgtactgatacgaagggcgtatcaagctactaatcagaaacctgcgaccagcatcccgcttggcaagtaagacaaagatccagttgcgaacacttctcagactctgaaaggtcagccgcccaatccctagtcataggtttcacatgtgggtcaagtggtaggcagccaaaccttgtccggtaatttttcaggaggaattatagctaataactccgcccagactagcgattctggtcaggtgcttgaccaaaataatcaaacactgggacaacctggtgtatctgtattcaatagattgggaacaactcatgatctcagggataatctaaacagaaggagagggttagacgagcagtatgtctcacaagccactcagcccggggc

SEQ ID NO: 84436 - DNA, 563 bp, Cannabis sativa
ttcttagtgttttgaatggcaagatggagttaaagctgtatagcgttcgattgagtggcaaaaagactagcaaagactgtccaaacatcaggagtggatttacagtggagaacgtgcccaagcatagcctcagaaagagaattcatgagccaactcattaatagagcatcataacgaatccaatgatcaaaggcagggttaatcgtatttgtacatgtaagaagaggctcaggtcgtggagttgtgccaagaaggatgttatcgaatccatgggcatgaactgagggaaggctcaaagatcaccaataggagtagctatgacgatcaagatgaatattcagaggaagaagattatttggaatgtgaaattgtggtgcgactgcctgaggtgcgactggagcttttggttgaggttgtggagcagggtggcagggtcgtcaggatcgaccataggtatgataccatacaagagcaaaaataagtgagagaaacagagaatattgaaagagaagctctatccaagaatggagcagagatatgtattatataatttgagaacttga

SEQ ID NO: 84437 - DNA, 1015 bp, Cannabis sativa
taaaaatgacttctatgtctttagctgaacccaaattggcatgatgtggatgttttctttcttgaaattaacattgggatcctaagctcgcataatcaccgagcgtttgttgaagaaaatgtatcctcttgataaaacttggtcacgatcagcaatgcttctaaaccgaaccaagaaaacagaatgagaaatcatctccaccatgtctatcttgtctttccacacccgtctcacaaaacctccaagattgacattgggggatttgccccaagtacatagcagactattgaaggagtccaaaaatttacctcttcttggatgtcctccttcgtgattttgactctttgtttcgatggagaaccaaaaaatttagagtacaaattcctaattatattaccagatctaagtataggaggtataacatccttaccccgtgaatccgcattcgcagacatattctgagcttctctgaattgcttggcttccatgaaatgtgtaaagtccatacgaattgcatctctcctgatactgtcactcgattccaaagcaagggagtttgcaacctccttctccgcattcatcaattcgtccgtatcatcttcttcgtcggataaagtaaggattcaattccaagaacttaatccatggatttggtcttcttcacatcagcagttgagtcaggatcgcgcttcttcttcttcttcactggagatttgggcttactatgtgttgccctcatctttgccatggcaccagctcggggagctgagagaaagctagagagagaaaaccctaggacctttattcttaccctgacgagatattactcaatctttatttgcatattaaatattacttgtattttattttgaataatttcaaactactagtcaaaaacaccactcagagtttagtacgtcttcaaccctccttcctaaaagggggaatttcttgaagtctattgcatgtccaacttggttttcaccttcagtcttgaagtgagaaacttggattt

SEQ ID NO: 84438 - DNA, 1433 bp, Cannabis sativa
tgacacttagtctttttctataatagccatcttgtgagaaataaaaacttgaagtagacgtattactgtcacgatacagagagtgaactattataaatttgttgtctctcttataattacttaaatacttatttattctcgccaatatagcaagcaggtgtgacttagaagtctagtctagatttctgagtcaacagtagcaatgatagatttccacttccgtcaagctttacagatgaacagggaaaatcactcactagccaaaagtcctcaatccaaatattcgagaagctgaacattaaagaaaatcattctagccgaggtcgtcctcaaatggcaaacagagaacatgttagcccaaaacaagaccctccaacaaatagacaagaaactttctacagtcccacagagttacaaagaagcttaggggaatcttttagtgaagaggagcttcacaagatgattaaggaggttgatgctgatggcgatggattcattgatttaagtaagtttactgagcttaataccaaaggtgtggattctgacgaggttttggagaatctgaaatcgtgttctttctatgctatttgggggtgtgattagcttaaacctattcgtgagatgattattcataacctccaggtacttatttttcaatgttagaatgtttatgatgtatgaattttatgcctattgtcatgttgaaaaactcatagttcatttttagagaatatggtatataagaaataaatgggtcaatcagaaagttgatttgaatgacactctcttgtttgattggagtaaagattatttgaatcggttccattctactaaaaaatgaaagaattccattgatatagagagtgtttagaaaccccatgatgtaaagtggtgcaaatcgtcatcaagtatggttaaaatcaattgtgatgctggccttagcatttggactttgagcactagggttagtgctattattcgtgatgatacagaattggtcattgcttttggaacttggacttgacttggctattgctaaagctttgagcatttgttctggtatgcagctatagttcatcttgggtatgatattgtggttacgaaatctaattgtaatagtgctatcacttccattcttaatcatacggttgatcaatcatacctaagttgtattgttagagctattcttgcttattataataatttttctgctatcagtattgctcgttcgttggcaaagttagctcttttcttgatggattattatgtttggtggtttgattatcctgattgtatttctgctgtcttgcaaccaaactattattgattaatgaagttcttctgtcactctttttccttttgagatttttcatattggatttactcttgaagttttactgaggcaattttttaaaaaataaaaaaaacaaaca

SEQ ID NO: 84439 - DNA, 806 bp, Cannabis sativa
tggtttggttcaaaaattatgaaaatccggaccaaaccaatctgtgaacacccctccttcaaattttaataaatccctattttgttgcaatgaattcaaataaaagttttgttgttcttagtgttagagtttttccttgaaaaacttgcaaaaatatttctgtttataaataagagttgaatattttcattaatacttgattgttagattattaatattttatattgaatgatttatattcaaatataaaaaaaaatattcatacataaggttgtgacttgtatttgtacgaataattaagatcacttagtcatgaataaaacagttaggaacatattaaagttttagaatctttaatcaatagttgctagtgcagtatactaatgaccgttcttcggtgcaagcaatctctattcggattgctgatgtagtatgacatctaagtgattgtgctttatataatagagattacatatgacatggactgatatataattaagctgtctttaccaaacatgtttataacgccctgactattaggcacgttacccaagataattaagaaaccataatctcctagccgggattactaataaaattagcgcagaaattaaactttaaatacaaatggaatgaaaataaacttgtaacaatttaaactttacaaacaaaagttacatgtatcgggatcccaaaaaatattttacaaaatgtattacatgtctgtttctactagccgacctaagcggcaaaacagagttacaaaattcatcactggtagaccccaacccgcctggtctagtgtg

SEQ ID NO: 84440 - DNA, 789 bp, Cannabis sativa
tgcttctttcaccatataatatatgtatagtacttattttcatttaatgacattccatctatattaatattttattatactttatattatatatatatgttaatatcgcatttgtcgcgatcttctcttattgaggctggtcgtatttttagtagtcactttttgcctactgtaattgcatccttaattttcgatgattggaccacgattttaatcattggatggtatagtcaaatcatatctaaatttttactctttctaaaatttaaagtaaagatacttgacgaataaatttgggacactgaatttatttaatcagcatctcaaccattagatggtatattcaaatcatatctaagcttttactctttctaaaattttaagtaaagatatactagacaaataaatatgggtcactggatttatttgatcatcatctcaaccattggatggtatagtcaaatcatatctaaaattttactcttccctaaattttaagtaaagatacttgacgaataaatttaggccactagatttatttgatcaccatctcaaccattggatggtatagtcaaatcatttccaaaattttaaataaaggtacttgacaaataaatttaggtcactggatttgtttgatcatcatttcaaccattgaatggtatagtcaaatcatattcaaaattttactcttcccaaaattttaagtaaggatatttgacgaataaatttgggccactgaatttatttattaatcatctcaatcattggatagtatagttaaattat

SEQ ID NO: 84441 - DNA, 1035 bp, Cannabis sativa
agagcatttcttttgaacacttagcccgagcatttctatctagtggcgtcctacgattagttagagatattctctaaaagttattttcttaagttatatgggactcgatacttaattatactaatagcggtatgacactgaggagagtgttaaacactagtgatgccttttagcaactctactttaatgtaaattaactttatttttaataaaaatatgtaaaaaaaaatcaacaaatacattaaattttaattaaaagtgtataaaaatcttactaaatatataaataaaatgtaaaagctattaaaaccattcatgactagcaaattaaaaaataaaaaataatacttattatgatttaatatttagcctatgcgatattttgtatcaaattctgttaatttttagtatgttgtaaaatttagatcatattatatattattattggaatttaattttatcaacataatccaaaaaataaatagaacaatttacggtgaaattctttatgttttaatttttatatacttaatttctttatttattttttttttttttgtgacaaaacccccttatgtttatttatcttttttgcaaaatttgacatgtcagttaaatattaccgttaaatattaactggataatcacagtatacacttgtgtatatataacagtaaaacctcaaagtaaatactttaacggtaatatttaactgaaatcttaaatttacaaagaaaaataaacttaaggagattttgccacaaaaaaaattaagaaaattaagtgtataaaatttaaaacataagaagattttgcacaaattactcaaataaatgtacacaatttttgtaacacttaattgaagatgctcaaacatccttggccggcgatggagaccaaagagcagccgcattggtgtggatatacataaataagttcttgacttttatggtttgccaactactacttcatttcatggttgccccacagaattaggacagaagaaaagagattattacaaacagattgatgaat

SEQ ID NO: 84442 - DNA, 963 bp, Cannabis sativa
  modified_base (56)..(56): a, c, t, g, unknown or other
tacaagttaacctaaaaaaataacctagggaagaaaaattcttgggcctttcagcntcaatcgtcatcgtgaatcaccgccatcaaccgttctatccactgtcgcgcgttgtattggtgacaattcagttttaagattgtattggcgcttatctccaaactattaaaaaaaagtaaaattttttattagtttatacacatgtatattatttgttattataataaatattataatcaataattaaaacttacaactttttgatctatgtaatggttggagttggcacatgcgacgatctcagtcatgtatatttcaaaatataaaaactacattcttgatttttaggttgtcttagacaatttacaagtgaattccttgccacagggcaagatactcatgtgttgcccctatatatctgtatgcactatttgaaaaatgatattagcatttcaattcattagttaattaaaatttgttacataaatagtcattaaattattaccttcccaacatttgagtaatttgttcgggaacttggtggtcacgtataaggtctaaatgaacaattttctttggtgtaacgacctctagcatccaatgcgcactagaaaattatatttggatataagtaagatagtataaaaataatttgaagtcataatatagaaatgaacaattagcactaaagaattaaatagtgtttacctgatattctaaggaataaagaacatttggtggttgttattcatcgatgataactaaccagccaatcatcttcccgcattgtcaaaagactgactcttctcttcagggttgctaccactcactacgagaagctctaggtcgtaaaacttgaaaaaaaaattctcaaagcgttgatgctcttccagatgtgcctgccaaaaaaattattaagtattagtgtcttataataatttgactaaaatttgatatataaggtta

SEQ ID NO: 84443 - DNA, 599 bp, Cannabis sativa
tttaaaagtttaaatttattgcaagttttattttcattctgtttaatataaaagtttaaattctgccctattttgattggtaatactcattaggggattagggtttcataagcatttaggttagcgtgcctatttgtttagggcattacagtggcaaacttcttccgtctctgtccgaccaagtttactcataagggcatcaagtatctgtctgccctgttcatcctctacgccacccagaagtggggcattccctctccgcatgcgatttgctggttttttaacttgaagtctactcccaagcaaggcaggttgggacacttctatttttctcagccagacttcaagtggttgacgggcaccgcagacaaagccgtgagcgaaattgggaattttgttgacgagtattacatggtggaaggcatgggcaccacctatcctcgattccagtagatccctataaattacgtccacctttcatgctaactcttagggatagagctcaaaggatcactcagctgccggatgatgcctggaatatcactttgctgacctcagaggccaactttgtggagtacgggctttatccaaaggatttc

SEQ ID NO: 84444 - DNA, 1019 bp, Cannabis sativa
caggtattttgttgacacgggcatcactgatgtagtaggtgtgtaactcatgcaaagtgtcctccaaagcttcaatatcttctgtaaaaattattgcattgactctcgttccctgtgtaaagtttatcaataagacaagcaacaagattttgtattagataaatatttaaattaaaatttgtctagcactgtgcaactaatattattgctaaaaagaggaataagtctacctttggatcagataaaaatagcttttgatatcgctctggtgaattcatgcttgttcgtggtggaaatttatgttgaactgtcatttttatttattatccaactgtggtgggagtgatgtcatctactgattggtgtagagtcggcatctgatatgctcatttaataattatatttcgttaattaaataaaatttaaaaattattgtgagaagaagtagtatctcaaatgtaataaaataataatgcaatataatattaatatggaaacaataataaataatatataaaaaaaagcatttacattgatatatgaaacatgtaggagtttaggatagctaattacaggatcactttgcaagttttttgaagagattaaattaaacaagataatactaataactttgtgtagacgatgtttttagtcgagttcttatcttgttgcgaagttgaaacaggtcggatcaagactctaactgtcgatgatgtctttgctcttgatattgctacatataactgaccgtgtaaaaaaataggctgtggtaaatagatcccaacgtaatccaatgtttgtccctgtgacttatttatagtcgttacaaaactcaatctgattgagaattgtgttcgtttgaatggaaaaccactattttcatctacatttggaaggaatggtatccttagaataaacactatttttctgatattgtgtcccatgacaatttcagcatctatgacattttggtcgaatgcccgacatattaaacgtgttccattgcataaaccttcaga

SEQ ID NO: 84445 - DNA, 2761 bp, Cannabis sativa
  modified_base (2713)..(2715): a, c, t, g, unknown or other
aatgtcaatgcagatattttcaccccctttagcttccctttttataaattggattgaaaaaagggaagctaaaggcttagattgtagtagtgttagcatcaatcgaggaagaggaagcagaggcacgcttcttctccaaatggttactctgtatacccctttccaaaggtttcctgttgttccccacagaaatggtaagatcctcttttatcattgcaatatcattgtcttgctttgtgaggagattattgccttttgagttggaaccctttatggtaaacatctttgtctttttgccttcagagggtgttgcagcatcaataagctcctggacattgacttgctttgagttttgtccaaaagggaatatttcgcctatacccgaagataaaccataggcagttgggtaatgaccattgccggctctttcccatcatgttcttcatcggactcggccactattcttcgcttttacgggagttgcattctgcattcacgcatctccgcctcctccccatttcgaatggctttttggactttaacttggttgcgtagaacagggtccttccctaatctcttctgcaaaacccaatcttggaaccatttagctaagggggtggtgaacgtggatttttctttgacatcattccatagccaagttccatataacgggtagaaattgcctagactgtctttaacgacggtaggagctttaaagcatgaactctgtccatgtgagagcacaccacatttgaaagcagagttttgggagtttctcgtatctatattggatccaaagatccttccgtttttgtcgccgaaggaagaagccacagaaaataggtttattgatgtcaatggttgctctgaatctcagggtacttgatcccacagcatcttcaattcctgcgggtagttcgtggaccggtgaggccttggcagccatctcctgaagattagaaaggttccagtagaagggtggtatactctccacattaacccacaacggagttttgtcaaaacggacctctgctggtgtgagccaggcgggcaagggcatgagcaccatgagcgcaccgcaccgaaccagggcttgcgggctaggacgttcgttgcatcttcccttctggcgaatgtgaattggagaaggccatcctctatttccttccatttccagcctttaactgccttccaagagaggttcaatgagccttgtattgcagcttttccaaacttgcatctgttaatgatctttcctaagagcacttggtttgtttcttgtggttcatctacctcacccggattgagggtgaaactaatgtcattgggagataactgtatagagtcttcgaaaagattactgattcctgaggaatccattacgttggcaatgaaaacaaacgcaagtgtagggtaattcagagcaaatctctataaacttccaggaagtgggctccttgagagcattgatttaatgttgtatatttttcagccttaattccatctagaggaggcaagaaaaataaaaaagctgcaaataaaaaaaagccatatttcgtataattaaattttgatgccatatatatcaaaatttatctttcatttctcatatttttgtaaatagccatattatatataggatgggatatatggaatgaactaaagaaaaaagaaatgtaatgtttttattagcgcaatctcaaccacattacaacaaggaaaattaacataaacagatacaacgcaatagaagatcatgaataatgaccaatctgatggatcagctagtttccaccgaggcagaggtaaatagatcatgtacagcagtgcatgactttttgacagactcatagtattcagctgggttgggtagattctcaagcacctgtttgatgcaagtttcgacattggtgctaaccctgtcgtcctcggccaggctgcaaacttgatgggtctccacatcgtcgaaatggaaaagctcactcactttcttcaaacattcctcgtgctccattcgctttcccatcacttttccatcctcattactcatcgcactattgcaaaccgaaatcatcaaagcagcactcactatcaccacaataatattcatcatactcattttagtcttcactatatcaacacctttgatatttcttctccaacctaattaatgaacctttattgatgtaatagcttgtgtatggagttagctagcggaggtgggattttatatagttgagatgatattgatctcatctaccaagaagccaattatattaataaattaagtagctatccatagcattatgcacatgtcattatttaataataatgtgcgttcccatgcacatattgtttattaatttaatttgtagataaaatttactattcaaattattttagatatgggaaatcttttgggtaattgtacatttatctatttatttatttgagaaaaggtagctgtacatttacctaaaccattaaataatattgtttatagtacatgattgagaacatttttcataattcattgggacgcagatgatctcttaaaattttctgtctatttccaaccaataagaacatcccatgtcattaatgacttaacagaatcttgcttgctatattcattccgttaatttcatttcttatatgaaatatatatttataataataataataaaataattagttttttttttttattttnnnacttcaaaataatttttttttttgcatttttacaaaattctatata

SEQ ID NO: 84446 - DNA, 716 bp, Cannabis sativa
aaggagcctctcgaaaagctccaaacctttgtaattgtgctaccaaactcaacaaagtcaaacttactggattcaaattcttaaataatatcatagatagaaaattctaagggaaatctatcaaattagtgcggtgagctgcggacaccatgtcgaagaaactaggagacaagagcacattggattccaccgtcgacgatgaaattgcggcgttgaagacggaagtgttgggaattacaaacgctatcaaggaatcgatcatcgaatcgatgctcgagatggggcgcccaatgcaaatgatgcagcaacagttccagcaatttttggaagctcaagatcacgcaagaatggtccaagaaccagtgatggacaatcacgaattcttcaagaaccacctaaaacacacaccaacttctagccatcaagatatttatgctgcgaagattctagacaccataatggggataaaaagtagtccacaacggctattacaggcatgaacagcgattaaagaaactaaaaataccaaattttgacgggaacaatccaaatggatgggtcatgcaagctgaacgatttttcacgtgccatcattatgatgaagacaagaagatcgaggcagcgtttatttctctatcaggagatgccttgctctggtatcaatatgagaataagaagagaacaattctgagttgggaagaactgaagaggttggt

SEQ ID NO: 84447 - DNA, 2322 bp, Cannabis sativa
  modified_base (468)..(473): a, c, t, g, unknown or other
atgaattctattattggtataatggttttttattaccaaatatctatatattgatgtttatttgtggcagatgtcagtagtgatttggattttatcctacgaacaatgcgtattttaattgtgtataaatgacaatatttgaataataaactatattattattacttcttgctaagttcttgtgactcacgggtactatgtggtgcaggtaaaggcaaagaaaagctacataaccgtgagatggcagtcttctccagaaatgtacatattgacctcactgacctatgtgccgagttgccaagagttgttctgggctggttgtatctgctgtgtattttgattttgtgtttaaatggttgtcgtaaatatttctttagcaaaactttttataacggggatccccgaaatacactttttatgtcgttataatgtccattttttgtattttattttagtgaagtttttaannnnnncacggtttttaataattaattattctattagtattaaattagtttataaagtcacacacatagcatccctatatattaggagcagccatggttttaaaggtcccgaagactgatcgaatattaacatttgcaatgaagacaaatcgactcatggtataataagtatttatattatttgatattggattacctgcctagactattataaagtatgttgagagaagtagcatagtgataattttgataagaatatgtgtatggtatatttatattcatatcgatatccgtctgagttttaaatggttagaagacgtggactaaatgtgtgataagttatgcagtaaagacaatcaaatagtttaattagcgagctatctgggctcggggaaaatagtatggcagagaatactttattgccataatgttgggaacatgtaaattctgctatgcaggatatgattagacaataagggaaaatagattcaggatctaaaagaacaataggctcatcttgtgtctgatcttgtactaccgacacttcctgttgtaccactagatgtggtggaatatatgaagccaacttactagtatatcaggttacaagaactaaatgaaccaccgattatggggatgaacaaaaaaagtttcaaggtgaccataatagcggtcaaggtgagaatacgaaatggtgatcttatcctgagtgttcaagatgcaaaaaggcaccatttgaaccaatgtagagccagatcttgttttattgtgtggtagtgggtcatttgaaaagaacctactaccgtagttaaaaaagactgaaattaaaggagaaaagtgtacgggtcctccccaagtgctggttatgactcaagggggactcgggtatcggtcctttggcagactcaagttagaatttatgggtaatactataatttctattggtataaaacattgtactctcaatgggggaacatcaaaagatctaaatggattatgtatgtatgttatttagtggtagttcatctgacagggtagaatgattagaaaagtgacaatatgagttaaattgcaggtattcctaagtggaatataggacatgattagttaatggaggcatcggtcttaatgattcaaataataaaatatttctgtttaggtgtgatctagcattagcaaaggtgggacaatttacgagtattgtctggaatcctaggtgaattgaaggcggcaattgtgtagtaattttgagattatgtaggcgtgggactacctatgttagctagaagcatcttattttggtagctcaccatgagggaactccatggttgagtgtctttgacttggggtgatttcatttaggaaatttcctcatgaagcatgcgagtcggagcaaagcatgttgaaaacacttggattagtatgtgggggccaatcgttagtccgggaagcagctagaatgatgcacttgtgtataagagctatcatttcgtgggaataagggcccaatggagacttgaagggggaacgttaccgaggtaacgtataaaagaatgtcaggaagagtagtggtattattaaggtaaagaagattacctaaattacttaaggtgatacagtaatgatggagagtactttataattgactggatagtcaatgtggtatataaggagaccattaaaattctgagaaatgattactttattaagcaattatggaaaggcatactcacccagaatagggaaaaacttatgaattgaggtattatttaatagacatgtaattgagtgattggtggatgttggatcacaaagtaagttatttattaaacaacgagctatataattgagtgta

SEQ ID NO: 84448 - DNA, 636 bp, Cannabis sativa
aaaaaaaaaacaaaagttggtgttattttatgaaatgaacaatgaaaatttaattttaaatttattaatattaggataaatataattttaaatattgtattttataaaaattatcgattggatcctttattttgtaaaatgacaaattagacagtgtatttttcaaaatagtactaaatggtacaatgagctgattttttgtcaaaataaaactttataataacccgatataaatgtgttatgacaaaactgattacgtttttttcaattgttcaagctaaaaattatcttcaaattgattttattaaaaaaatatatcaaaaatttagtttagggtactatttgtactagtttaaaaaatacaagatcttttatattatttaataaaataaaaaatctaattaataacttttacaaaatacaaatttgaaataatattattcactcttaatataattatcataatataattaatgtagcaaaattttgccagtttcttggagaattcctgctgatccagatgcataatttacaccatgggttatgttataaccagtagtattagcaaatggtggtatgtagtgatccaagcctaaaagttgaccttttataataatatagcaatataaaaatata

SEQ ID NO: 84449 - DNA, 560 bp, Cannabis sativa
gtgttcttggtgcgctttttatttttaagtctaaacaacactttggattggagactaacatagaacttgaccatttcctgccaaaaagaaaaaaaataataaaatagatattagaaatcttaataataaaatttatcagtgcatttaaaacaacaacatgttaaagttaaatagtacctaccatgtttagagcgtaacatctcatgaaattaatttccatacattacaaatgtgataagactttcttgagctcgtttttttctataagttagctgtggagggacaattagtgatctctagagaattacagttatacacaagattttaagaagagaataatactgtaatcatagttttaagtgatctacactactataaacaaaaaataagaaattccatgattacctactgccttaaaaagaacatgaaatgaggttttgtacttttttatccttatgcaaaacaaccacctactaattattaaaaaaaagtaaaattaatattaagagaacaagtagccaagcttctttttttttttagttaaatcacatataaatatc

SEQ ID NO: 84450 - DNA, 560 bp, Cannabis sativa
agtaaaagcagttttatagaacagttttatggaaatataatattgggattcgacgcataccataacataaatatcacactcaaagcaaccaaatgatttttacatattctttttaagcaaaaagtacaataaaatctcaataaatgataatttaatttaaattattaataaacttatggacataagtaaaatttaattataattattattattggtataatttagtatgctatcaggtagtagtcctaagcaataagcactaagcactactaatacttaataagaacattttgttttaaatttttacaataataaataaacatttttaattatattattatttaataagaaaataaaaaggaatacaaattaatctttaattattgtttaattttttatttcaatattaacaatataatattaaaatgttattaacttagattacattattattaagaatttttccatacaaataacaattgaaagaagaaaggaaatttagaaccctaaaatggaataaatttcatccacacaacacaaatctacccaaaaacaagagc

SEQ ID NO: 84451 - DNA, 850 bp, Cannabis sativa
tacctacaaagttccaaaatataacttaggtattattaccactaaaaattaaacttaagtatttatttacaactgggagttaaacttaagtatttatatataccgcaaattactctaaaaagtataatattattaactatgatatgaattcttgttatcgtaatattattattttcaacataaaaaaaataggttgaatctactttaatttttaaaaataggttgcatatgaattcaattttaatagatttgctttcgtataaagaaaataaatagaactgaaaatgtacattttatttttcatcataaattcaaattcttcttttcctttagttttttttttcacattgtaaaattagtgtcaagataagttgatgacgatgacaatagacatatattagcaatttatgaattgtaaacgactcataaaatcatgaaattgtaattaacttgatcataataataaggtggtgattttagaatatttgaaaattgttaccataatgaaactaataagataatcgtagaagacaaaaattaagagacctaatcgtaaattggagacatacaattgagaaagaaaatcatataaatattagtacacaatatatatgtacttttccaaaacttaagtataatagggagaagtattttttaagaaataatatattccatacacattgacatgatactaatcttattccaatagattgacccaaaaaatatgagaaactaaaaaaaaaagttgatattataaattatgtatttcaataaacaaaacaaacaataagttatattccaatatcaacgatcaaaagttgtagaactttaatatatatgtctacgaaat

SEQ ID NO: 84452 - DNA, 1041 bp, Cannabis sativa
attgtttgtttgcttgaattttccatttatgttgcagctgaaaccatctttttggcatttcaaaactacatcatgatgttgggcacaagtgttatgattccatcaatgttggtgcctgcaatgggtggaagcgatgtaagctcattctccagtaaattatcttttctcttaaacctctgaacctttcttttggttttactgggcacatgcaatttcatccagaacatacttttttcttaacaatgtttgtagttcccttggcctgccacttgtattttatccaggtgggatgtatatttgaatgcttatttgtcatggtgtcagtcaatcttctattttagttactaagagttctttcttaacatttttatgattgatgaatagggtgacaaggcacgtgtaatacaaactctcctctttgtggctgggcttaacacacttctccaagcgctttttggaaccaaattgccagcagttgttggaggttccttcgcctatgtcattccaatagcttacattgtaggcgactcctcgttgcaacgcattgatgatccacaagaagtaagctgttttcttagtctggcttgtagttacctctgttctcagtttttactttcactagtctctctctctctctctttttcattttttaatcatttacatttttttttggtaaccacatagagcaatatttgtaaagtttttcccaaatttcattatagtaacagcttaataagaacaagtagaaaaactgtctgaggaattttacaatatttttaaaaataaatattatggaagattgcatctaaggttgcctttgtcataattcatgtcattggtaactaagtccccctagatatctatctctacttacatttcagtcaatgtacttaagaaactctcttatttggtagggtattgaaagagatcttcccatgtcattggtttgcagagatttattcaaacaatgcgagctattcaaggagctctaattgtagcttcaagtattcaaattatcatgggctacagtcaagtttgggg

SEQ ID NO: 84453 - DNA, 871 bp, Cannabis sativa
tcccaagcaaaccgtagtaacttcgtctccaataatcggccagaacttcctataaaacaggcccggcattccatcattgcccggggctttgtgtggactgatatctcgcatggcttgtagtacttcatccttcgtaaatggagagacaagatactcattgatttcccgggagattttgtgtggcactatgcgttggaactcttttaactcttctatagtggctggctgggcagtaaacaactgctggaaatagagataagcgacctttcccaccattttatttccataaacccagcgagcattatgatcaagcagccccgtaattgcgtttttcttcttccttgagttcgcttttctgtggaaaaatttggtattgcggtccccttcctttagccatagagcacgactcctttgtttccaaaatttctcctctttgtccaaatacacattgtacgatctctctatttctttcaaatgattccagcttttatggtctgtttgggtggataaggctgcaattttatcttcatattccttgattcttctattcatttccttctttcgggtcttattccaatcattaagaaccacaccacatttatttagttgttctttgagctgtctagccgtggtgctggtagttcccatcccccatgttttcttaactaaatcatggcacatgtcttcctcggcccaggcgtgttcaaaatggaagtgagaatgccatttaactcccttgatggcatcttgttgttgtgtatcacaagcgagaagtaatgggcagtggtctgaatttaatctctcaagatgcaccacttttgcagcaggaaacaagtcaaaccaatcggaattgccgcaaactctgtctagt

SEQ ID NO: 84454 - DNA, 937 bp, Cannabis sativa
agagagagagagagagtttattttaggaatcttttaaattagtggaatcaatttgtacaaaaaataatgggtctaaattttgatatgtgttattttattagggacaaaatatgaaatttcccaaataaaaataactttctaaatttaccaagcatataatatttctagtaatacgctttttttgataagaatcttagtgtcaaaatatgaacccaaagacttctatttatagtctatttatagtgtaggtatactaagttttgaaaatcaaaccctacactcccatggttgttactaggcgtgtaagaggatttagtggatgtgaaaaatattagagtgaagtttagacacatccctcgttgaatgctcaacattttgaaatgtttatcctaagtcgcctagaacaaatttctagcttattcattttttagtttcaatgttcctctctgtgccaactcatccactaatgtcccaagacacattcatatgatatagatgtgttttgtaaccgtttttcacatctaaaaactttctcatttaatttcataatctccatatgtaattattcttcttaattacatattaccaagatatacataggttacagttctattttcaaaattgtaacctcacatatattacaaaaatgtgtgtttaattatatcatattttatatattataacctacaataaatatatactattcccgatatgctaattaatccattcatggaattggaggaaatgtccggagaagaagaagattacagtgaagtgtcaatgataacggtgacggtaagatcactttagttttttattgttttacaagctaatgacaacggtaacagtaagatcactttcttcctcacattttttattgtgtattatattctaatcgattgcattaatatgatagaaattcatatgatatttgcac

SEQ ID NO: 84455 - DNA, 806 bp, Cannabis sativa
atatatatatatatggataccacaaaaactataaaaaaaaaagcctatacagaaacagacacacagatcaatagtgtttaaactataaagaaactatataaaaaaactataaagaaatagacaaacagatcaaatgaacaaaatgaaatcaaacacaaaaacacatttagaaatcaaaataaaaataaaaacaacaaaaattataacaaaatttaaaactagaaaaataaaaaggaaaaacataataaactaaacataaatcaaattataaaaatagaatgattaaaaccaaaaagaacaaaaaaaaaaagcataaaaataacagaaatcaaaaattgacttagaaaatctaaaccctagaaaaatcaaaataataaacacaaaaccccaaaaaataactaagaaaaaataatcgaaattgggagaaaactaaaaagaaaaagaaaacaaacctccaacccatgatcatcttgaacctgctccttcttgttgtcagaaagtggggaaattttctgaggaacaaaaactttagctttcttctttggaggtccacgatcccattgtaatacatgaggagcaaagtcagagttatcatcttctacaactggtcgttttcctttggacctattagctccaaatttaacacctattttcatttttttttttttttgcaatggagaaggagaggatgaagaacgagtaataaccatgattatatatagattcacagcaataaaaatagagtacaaacggttatggaaatcagttaatggaagtttgcaaaaaaaaaaaatggcagaaaagta

SEQ ID NO: 84456 - DNA, 720 bp, Cannabis sativa
gtcagattagtgcttgaggaggaggagtactggtagagatgatggtcatgattagtagtagtactggtagtgatgatatcatgatcaatttgatcatgatttgtagtatcagaattagtgcatgatttgtagtagcagtagtattggtttgtagtatctgaactagtgttattatactgattggatgggtagagagatttatgggagtgagccaattgggattgtaatagttgcagtgaagagttttaatcttgttcttatacatactctgatgtgataactgaaatttatgagcatatgatggtattaatttatgattactactattttaccaactaagcatttggtctttttataagtacaatagccttgttctctcctccatcgtcactctagtatgtcataggcaattattatcataattgagcaaatctttcaggggatggaactgaaacagtgtgtgaattcaactttgtgtttggagaaaaagcccaagttagttgtgggacttaggggttcaacatctaatatttttgtagacaatgcagcttatagggacttccttttccaaacatttcaggtttcatcttcaggcatggaaagttttgctatggttatggtaaattacttaactattttctctttataaaatttacaaggtttaatatgatcatataccatttatgaataataatataattgggtgtgtgtgtttttttt

SEQ ID NO: 84457 - DNA, 3370 bp, Cannabis sativa
ccaactggtagactagttcccaaccaagaattcctgttgggtttcctggggaccaaccggtcgactggtttagtgcaggttacacccaataaactcactccacaacctcaaatcaatcccaaacttcaccataacctctagacctgctaattatacctcaatgaacatatttcatgcaataaaaccaaagaatacccacaaatacaaaaatcaccattaatgatcaaagcttgagctctaaagctcaaaccttgtctaaacatcacaccaagccactaatcaacaccaaaacagctcaattaacaccataataacatcataatacccaactaaaaatagaacataacaatagcatccctaagtccaaaatcttgcataaaagtataacttataacttatgaaatcatttaaagaaaggcttatgggtttaccttgaattgagatcactaaaagctttctaaatactctaatttgtagcaaaataacaccccaattgctgttagtccttgaggattcgaacaagagagaaagaggaaaagatggttttctgtaaaattttctttttctttctagtttctatattttctaaaaatgaaagtaaacccaacttaattaaatcaatagttgccagatgccactttaaaaagcagacaccactcccaaggggaaatgacaaaaatatccctccccataagcttaactaatacaatggtctagggataaaatggtcatttctaacccctcaagtaaaacccaacattcgcaatgtctaactaagttgcccaactactactaaaatactaaaatgtaattctaatggccaaatactgcgttccaatgttgcctagcacgaaacatggaaaaatattaaatttcatatatgacatatataatacactcttaatttaaataaatcaccataaaatgataaatcataattattattcatgtttcataattaaaccctaattatttgctaattctaaaatggagctaagcggtctttccacgagatttctcagatttaaattagaagcttgtcaatgtttacacccccacaatttcaggaattcctagataaggacaatgatgagaccaagactatataagaaagaaactctttgggaatccagttagtcatttaacattcactactgggcgatgtcgaatatgcccgtgatgatgtcgaccgaattgaagtgactagtagggactgtgagtagcctcaccataaagatttagatgattttattgtttagagttgtgatgaagacactagtgatagtgatcatgaaaataatgtaactgttaatgattatgatgatgattatgataacttgtagactttaaaatattataatatttaaacccactgtttattaaatcaaatagatgttcctttttttaataggttgattaattaattattcctagcttatatgtttagaatgactaatgcaggtgtaagcaatagtaagaaaatgagagttagggaatagtacaaggacaaaaatattgaacaagaaccggtcaagtaacctgcgggacagaattgaaatttaaatttcataaggggactcgggtccgatagaagactatggcaataagtttaacaactacatcaagtttcttgttcgcaataccattcctttgaacaagtttgagttgtaggatgttgaagagatagtcattcagactatttgggacaaaattatagtaactttcaaatttttattacaatagatcaaacaaaaccattataaaaaaaacaaatatgtatgacttcattgtttatttttttaaaaaacaagtttgagttcccaattggcaatcctatgttcgaggattacgttcttaaatcaatgtcaaaagggctatgtgactggagagcaaatttgaaaaaagcatgaaagaggaatattaaaaaatatggagaggtggaagtagctaagtaatcacgtcaagatgtggtgacgccggaggtgtgggtagaggttattgcatgctagaaagacccaaaacaacaggtataaattaaaagttataaaattaaatatccattaactaatgatttttttatcattttactaacaataaatttaaattaaattacaggcaagagccaaacaaaatgcaaaaaatcgaaggcagatgaagattcaaggttgatgggaccatagtttgccacatcgcgagcggggtatgatgttgtcagcatatttgtttaaaaatttatgccttttgaataatatatttctaatttttatattgtataaaaaaaacagatcccaagacaggggaacttcccaatgctgtggacacttttgcaaagttccactgcaaggacaacaagcgtgatgaacacacacaacaattgcatgttatgacataggtgcagggtgagcggtcacaccacttgggagggatgggccatttgccgagacataggacgggggcaaagatggcaattctcagggcaggtccctctgagcaacccactgtcacccaggagcaatatgaggccctgaagtaaacgatggaagagcaggaagcatggaacgagtggcagcaacaattgatgcaaacacaggatcaaatcatgagcgtgtttcaatagcaaatgatgcagctggccggcaccattctaggattcaacatgcccccaatgcctttgatttcaacaattccattatttcggccacatggcactgggtcttgttcactgactgtccctctcggtgatgacgataacgatgacgatgctgtggacttgtagttttattttttagtttgcagtgtaaatagtattaatttttataaactaacaatacatttatttaaatttaggcaatataaatagttttataattataacataaatgtcaaattatatttatttgttattatctttcaaaatttgatttttattttattataaatataatttttttttaaaaaaaaatttgccaatgaactatatagcgacagcaaaattaaaataattttttattcgtgaagttttgccagcaaaataatgtgccaacaaaacttttgcaggtaaataaaaattaggtgcaaatttggcaccaaagttttgtctttgaaataactcactggctaaactttgtcatacacccctcatccaataacacattgccgacaagaagcttatgtcggccacttaatttaccggtataaatagttttatcggtgacttaaggtgattcgttgagaaaatacgttatgccgacgaatcattgttcacatattttggcaccgccaaaactcaccggcaaaactatactgccaacgtatatatacttttattgataaggaaactcactggcaaaagtaatttttcttgtagttg

SEQ ID NO: 84458 - DNA, 765 bp, Cannabis sativa
tcattaattcgtctttattacttgcacttatcttttcaagaatataactagtttatttcggcaaggtagatcacgagattatgcttgcacacgtacattatatatttatttgtattgaaaattaacactttgtgtgttcaagtgcgcagaatctgtggcttcatgattttagtttgaataaaagtttggatttaccccggaaaatatacattttttggtaactatagccaactttccagcttctttctctctttcctttatgtttagtttataattaaaaccaaacacttatcatttaatatctcacattattttaatcttctttgagcagtctaaattgagatactcatcgcctccaactcatattgacatttaatgttgtatattgtagttttaatagggatttagtctatggagaaagtttgaataatttatgatgtcaaaaatgatattaaaataaaacaagttcgagtataactttatattttaaaatggtcacacttaaaaaatgtttttctaggttttttgggtttctttcactactagaaaatcgggtattagtgacacacattgagtaactctaaaagtgtatagtgacacttcaacgctcgtcactaatgagagtgacaggaaacacaatttttaatgacacttcacacgtgttactgaaaccttttgcattcattttctgcgtatcactataagcgtatagagtcaggttttgtcagactgaaaaggtaacagccactcacataaagtgtcact

SEQ ID NO: 84459 - DNA, 1036 bp, Cannabis sativa
aagtgaaaaaagattcatttcatccaaaaaaaaaaattactgtctataaaaagatacctttagaaaactagacaataagaaagagatacctttagaaaattagacaataagaaatagatacctttagaaaattagacaataaaactttaatataaaaaaaaaaattctaaagtatttttgtcccaccaacaaatctagaaaagaaaaaatatatcaatatcgacacaagaagagtaataaaactagaaaagaatgtgataagtatacttatatgttaagtttctattgagagtataaatattatatcccatttcttttatgctcaaaataaaccattaaaggttagaaaggtaagccttcactgagaaagtggagaagtatcttccatctaagaaatcttacagtcgatcctaagggtatgtttagttaattcatgagtcgcatcactaacgttgcaactgacaagggagatatagcagctcccagaaagctagacaataaaactttatatcataaaagataatcccgagctcattctagaacttggggacgactccaaaactaaaactagtgacagtaaatttaaaaagacttctgtaataagtagcaaaaagtagtgacctgagtatttgccaacactttattaattatgtcgttaaaagtaccattgtcgatgtgtaaatcgtcagtgaaaatggctaggttattagagttagtctcacattgttaatgtgcggaaataaattgtgatatataagatgaatgggctactcctccaatagccaattgcttttgagatggaaccccatttactttatccaaaattctaacatggtatcggggccacttgtgatccgtcgtgagcccaaagtgccaccggtccaaaaaaaaagtcgtttgtgatccgttgtgagcgaaagtgccactagtccaaaaaagatacttccactgtctcccctatttgggacatttcggccaatgtgtaccaattttcagtgttggggtctttgaccttgttgctcctgaattcgcccaa

SEQ ID NO: 84460 - DNA, 702 bp, Cannabis sativa
gccaactataaataaggacacccacgaatttgtcaagaagtgtgataaatgtcagagattctcacatatacctcgcgtaccgccaacaggactaagaatgatgacctcaccttagccattagcaatatgggggatcgatttgattggggcactccccacagcccgaggaggagaaatgtacgtagtggtggctgtcaacttctttacaaaatggacggaggctaaacctctagtttctataacctgtaatcaagttctcgattttgtcgtcaagaccataatttgtaggtttggaatacccattgagatagtatctgataacggaactcagttcaatggtgaattattcactgagttttgcgagaggaacaagattatcaaaagcttctcgttagtgtcacggtctcaaggaaatgggcaagtagaagcagctaataaaaccttaaaggatactatcaaaacgaagttggacgttgctaaaggttgggtcgatgagctacctcaagtactttgggctcatagaacaactgagaagacaacaacagggcatactccattcacgttggcatttggcttggttgcaatgctaatggtagaagtcaatattgtgacccatcaatgagatttctataatcatgaagaaaactaagaactcttaaaattttccttggatctacttgatgaaaaacgtactgagtcaca

SEQ ID NO: 84461 - DNA, 504 bp, Cannabis sativa
catctataaagctgaaattcaagccgaaaatgtatgatggaagctcaagagaatctcaacaaagattctttaaattctgttttaatgcttgatgaacagaatgcaagggagaagtacatggccattcacaaagcttacatctctttcttagttcaaaaagccaaggttacttggatcaagaatagagatgagagaacaacgatctttcatgcctccttaagacctaagagagttcaaaatagaatttattttattgagaacgatcatggtatctggtgtgatgatccaaccggtgttcaatatgcttttctagagtattatcaaaatttgttgggcactgtcatggtaggaagatttcatgtgaatgaaacaattatggatgttggacctaagatttcatagtcacatctcaatattttacaagatgaacatatagttgaggaagtgaaagaggctatcctttccattcactacaagaaatgccacttttaccagcacagttcg

SEQ ID NO: 84462 - DNA, 693 bp, Cannabis sativa
tgactcctattatcctattatcagattatcaattacttactcgactcgacgggcaacttccaaatgacaaaaatgaggcgtgaaaactattgtgttcagtacctcgctacacaataattgaaggaaaactatatagaagagggtattcgatgcccctacttcgatgtgttctccctacaaaagcgaatgaaatcatcagagagattcatgagggcttttgtggggatcatgcaggttggcaaagtctatcaaaaaagatcattagacaaggatattattggccaacaatcaataaggacacccatgagtttgtcagaaaatgtgataagtgtcagaggttttcacatatacctcgtgtgcagccaacaaaactaagaatgattatctcaccctacctttttgctatatggggaattgacttaattagggcattacccactgggcgaggaggagccaagtacgcggtagtagcagttgaattcttcactaaatgacggaggtcgagctgcttgtttccataacctgcaagaaagtcctcaactttatcatcaagaacattgtctgtaggtttggaattcccatgaagatagcatccaatattggaaaccaatttgatggcgacctgttcactgaattttgcgagaggaacaaaattatgaaaagcttctcgtcagtatccaggcctcaagtgaa

SEQ ID NO: 84463 - DNA, 1071 bp, Cannabis sativa
gtttttaaaaactgaaaacagtttttaaattatgaagccaaacaactccttatctttcctgattctttttcttcttcttcttcctccttcacatgctgttgtttttgttacctgctacaaaaggagagggttagcttttatgtgggtaatgttgtagacttgagaaataaaaaagaaaaaaatgaagaaaaatgtgaatagtggagagagagcccaaatacaataaaaaaaaaaaaagaaaataaatgaagaagaaagtaaataatgaaagctattataccttacaaaaaaaagttaacatgtaggaattaagcttttcatgattagattttaaaaaaaaaaaaatcacaaaagtaacaataccatcgcgtcaaaactttttattattaaatataataaaaacttttataattagtttttttaaaaaaatatatatgtcactaactgacgtgacaaccatttttcccatcaacctttatttttttttttaaaaaaaaacacattttaaagtgacgaaaaaatacaacttgaagcccaaccgtataaaaattataaaaatatactatataaatataaattataccgcctgatagtataaaagtaaaaataggacaaaagtgagtaatctgtgtaatttttccttataaaattacaatgtgcctctttaaaagtggtacgtacactgatgtactcctacctgtttcgaaatttgagagatttttttattttatttttttcttagtaacgtacattatagttatttaagacatcctgcaaaatttcaaaaaattcaaataaatttaacacgccgaaaataagattcaaactatctattacacgcgtaactcttttatttggagagtgcattgtaaaagcaccttttaatttattgtttgtaaatttaaatatgaatactataaattatttttatggtaataaaaataaattttcaatgcacatctttaaagtggtgcactgatgtactcctacctgtttcggcattcgagagacaaaaacaattcaataatgtggtagattatttcttagtgtaatgagataatcataatatgg

SEQ ID NO: 84464 - DNA, 512 bp, Cannabis sativa
cagcagtagtttaattctaacaagattaattcatgtcatttctaattttgaatcattactcaaccatttgcatattatttctttttattttaagttgtaattagttggatttacaagatatttttttgtttgcaatccctgtggagacgatcttacttatcactttattacttgtgtgactgcgtatacttgcgtacattttaaagaattaattatcttgtgtcagtgaggttaatctctctagtgcgtatagagagcagagagtaaacatatatgggttgttttattggatgaccgaaagtattgggttactttattaagtaacagtgaaagtgatagagttattactctataaacccgttgtagggttaatatgattatcttattaaaaaatagaaaataattagttactaaattaagtaacaatgattattggttatcttattagataactgttgcccctgattttgcccaatatatgtggaccaatcagacaaggacacgtggatcaa

SEQ ID NO: 84465 - DNA, 1986 bp, Cannabis sativa
aagggaaaaaaaaaaaaaaaaaggtaaactcttgaatttttttttgtttggtaaagtactcccgaacataggcagacctaagggtgttgagggagggttaaaacccactttgagatttgaaaatatattagggtaaatagcagcataagtacttaaaatttaagctttgtaagtgatataaacctaatatttatctttagtggcataagtaccaaatatttgtaagtataatttttctctaatttttttagtatagtttttgcgttaatatactgctaaaaataaatattgactttatgctgcttacaaacttaaaactttagatacttatatcataatttacccaatatattaatatacaactgttgctttcatatatatatatatagtagttaaatagaacaaatttattaaaatgctttcatgttctgaatccccttgccctttttttctatgtgtatctacattttattattaagaaaaatgtagcagcatcagttcttaaagtttaaggtttgtaagtggcataaagttaatatttatttttagcagcataaatacccaatgtttataacgctgtaatttttttctaatttctttagtatagtctttgtgttaatatgccgctaaaaataaacatttgatttatgttgcttacaaacttaaaactttagatacttatgtcgctttctacctaatatatcaataaacaattgttgcttttatatatatatatatatatatatagttaaatagaacaaatttgttatgatgttcatgtttcaaatccctttgccccctttttttattctgtgtttctatattttatttattaagagaaatgtagcggcataagtacttaaagtttaaggtttgtataaacttaatgtttatttttcgcgacataagtactcaatatttgtaaaactgtaatttttctctatttttgtcagtacaggctctgtgttaatatactgctaaaaataaatattggctttatgccgcttaccaacttaaaactttaggtatttataccgctatttacccaatacattaatatacaattatgctttcatatatatagtagttagagagaataaatttgttaagatgctttcatgtttcgaatccatttactcttttttctatgtgtatatacattttatttattaaaaaaaccaaggaagtataaggttcaaaaatagatttgaacttatgatcattagaacaggaagatgttgctaaatcatcattccacttaaatttagcttgtaaattattattttggattatgttaaatgtataactaagcccaccctaaaattaaatcttgggtctgcactgcttccgaattatggtagatgatttctgttctttccatttaaaaaattaagttgatgtgacagttaaaaaatatattttatggtattttttatgaatgggataattgcagtaaaaagtttccaaaaatttgaagttgacgcagattagttcctaatcttgaaaattgatggtgaaaatacctaaggtcgacaaagtcgtgagttcgttcatacccagtgcattaatataagtagcatgacacgtgtactcttaagtgctaaaaataatgccatatgttaaaagctcgttggtccaaattataatttcaattaaaaataattaaaatgatttaaataataaataatttattaaaaaataaataaaaactttaatatttttctttttcttttcgttttctttctttctttttttttttttatatgtttttctccttcttcttcttcacgaagacctagtctgttagtgtaagctctttttttgaaaaaactctttgtttcttgttcaccttccaccaccaccatgagcttgaccacaacccatttttttttcttcatggagcataaaccttccttcttcatgttgggttatctatcctaaataaaacttattttaatataatcaaatttactaattaataaaaga

SEQ ID NO: 84466 - DNA, 1451 bp, Cannabis sativa
  modified_base (1313)..(1315): a, c, t, g, unknown or other
ggtacctataaatgataaacatattttaaatatgtaatttaaagagatctctacaggttatgtcaatatgggaggaaattgtcatataataaaatatttgtcgataatagatgttgagtgtttgcatatacaataaactaatatgagatagcaatgatcatggtgttagatttatcaataattatagataaacatttatttttggccaaaattttatgacacaatccagacaagtttacttgcataaagtgaaataagacctgtaaggtgtgcaaataaatatttttaatgagaaatttgcatatatgtatttgtacagaaagtgaattgttgtacaaaatttgcatacacatgagattgattgaaataaggcttaaatattgagaaaatataatcatgatttgattatagcctgaaatatattttatgagaatttataagggtcacataaaattacaacaaatgttatttatttggagctcctaacatagcgagagtttgaaataaaccttatctaaaaattctagaagaatataatacatgtcttaagtgatataaatttaaaatcacgtgcactatatgacgaagatctttgtataaaataaagacatgtaagtatattgttatttgaaaaacatgcatgattgtctatgcaatataaatttgtaaattatacgttgtgatagacttttgaagagtttttgcttatattataaatgattgaagaacaaatttttatttctttttatatattcagaaatattaaatgtatgcagttgttcattagtagaaatccggaagtacttcatatacatcaagtattatagatatatgatcatttgatatagaaataaagatcatacaacaagatggaacaaatatatggttttggagtaccatcgttctcgcaaataaaaatttatattatcattaatgtattatatgtattatgttcacatctacttgaaatttcaaacttttgtatgaacaacattgtatacacgcatgcatgaatgattaaataagttagataattgttgatgtttcacaaatccctcatccataattagacgtccacacatactctggaaaagttatagaaaatatatgaccatagataatatacagtgatattttaaaagtgataacaataatcttatgatatatattatcaccaaaataattatggatcatatgtgcatgagggggagacatattcatgttgcactctttttcccttagctcagattttgtcagatgtactgagttttcctagcgaggtttttaacgaggcaacttgcaaataattatgnnnatgaaatatatattgcactcttttttccatagcttaggttttgtcccactgagtttttctgacaagatttttaatgagactttaaatcatgttaacatacttgcactttatgaagcatgtaacaccctaactacct

SEQ ID NO: 84467 - DNA, 1198 bp, Cannabis sativa
tttaaagatctattgagaaaatgtccccaccatagtatggagcagtggatgttggttcaaaacttttatattggtttatgttctactactagaaccattattgatgttgcatctagaggtacattcatgagaaaaaatgcaactgaagcttatgaattacttgaagatattgctatgaacaatcatcaatggtctgatgaaagagcttttgggaagaagatagtaggtattcatgaattggatgttattactacattgacagctcaggtagctacactcactaaacagctacaaaagacaactaaagctgccaaagttgttcaagcctcagctgggtgtgagatttgtggaggaccacaaacttttgataagaatgaatcaactaaagatattgtgatgaatctagctcaagtacaagctattacaaaattctagaggaaattcaatagattctacttcgattcatttaataatggatggacaaataatcaaggatagcaaccacaattttagaggaaaaattctcaagctccagctactctaacaactaatctacaagttgctctacttactctcacaaatatataaactcagttcatgactgagacaagagagtccataagatatcttgaaacataagtaggacaagtggctaatattctacataacatacctcaaggaagttctcatagtaatacagaggtaaatcctaaagaaaattttgtattacaattactctcatgagtggtaaagagttagcagagccagccaagaggcctaatcttgcaccatagatcaagatcaagaatgatggtttagaggaaaataagtttattgagaaccttgagtaagagcagccactgattaattattaccaccacataaagattccatatcctcaacaacttcaaaagaagaaacttgacaagcattttttgaagtttcttgacattttttggaagcttcacattaacataccttttgccgaggcacttgaataaatgccaagttatgtgaagtttatgaagcaaatcatatcaaagaaaaagagattggagggttaagagcctgcagaacttactgaggagtgtagtgctatcttcccgaagaaattacccccaatgcttaaagatcctagtagtattaatattatatgctctataggaggctcgattgtaaaaaaggccttgtgttattt

SEQ ID NO: 84468 - DNA, 879 bp, Cannabis sativa
aataataaatttcttaatatcaagtgtgtagaagttatcatatgtagtttaaaaaaaataattttttttgttatactttagttttaaattaataattttaatcatcatgaaattcttaaaataaaggtcttaattcgtgacaacgtacttatcactttcacacaaattgaccctaattcatatctcaaaaaaaattattgtgtcattggattttatttaaattttcacttgtacctgtcatttttaaatcgggtctttgtcatgatgtcgtgaaattaattgccacaaaaataaaatacaattacctttaaaatttcgtaataatttttattttaatattttgtctttctcaattcttattaataattttttaagtaaatgattttgtttaatttataataataccttttaaaaatatatatgtatatatttgatgcgcatgatgatttatatatgtgatgcatacacacatttatacatcatatattagtgtagtatttggcagtatatataattagtgtagttggcagttgctttctttcttctattgaaccgaagttgcttttatatatatgacgaatttgatcatttaataaatcacttcccaataaaaaaggaaaaacaatgtatacatatacgaaagagctcactaatattgaagaatattaattataaaacttcatgttaattgaagtcgctatagaaaagtatatgtgatgaaggttcttgagtgttaaattatgtattgtgatatatagtagaatttctattaatgtatattaatttgggatcaaataaattataatttaattgaaaagttataattaaataaaattatattagaaaaaaaaataacaaaaaatattaatgtaacaataa

SEQ ID NO: 84469 - DNA, 2218 bp, Cannabis sativa
tctctctctctctctctaagtctcactgtctccaccccgaagccccaaaatccacgagctcaaccacccccaaatccccatccatcgtcagagttctcaacctatcgcttgttttttgcatttttttctcttttattttttttctaattttttgtgatatttagcgatgtatttgtaatgatatatcacatgaggtgaaggatgaaatttagcgatgattagcgaaattaagtgataattttagcgatatatttgcaacatgagactaaaaaataaaagcacatatataaacaccattaattatcgtgaaaacttaagtgtgatttagagacatttagcaatgtgttaagcgacatcgtgaaaactatgaaaaaaaatatcgaaaatgagcgatgggttgaaaactccggcgatggtggggactttgggggtttcgggtgtagttgagcttgtgaagctaagccaaatttctcatttaatatagttcataataaattggttgctattaccaattacaacagcttaaaaaaatgagaattcctaaaagacacaattggtgcttagcattttttatggtgtcatatcgttattggtgtaattaagtagcggttctcatataacttaacaaaataaatttttaaggaatatcgctaaccaatcgtaggatgacacatatgaaaggtgttgggcactattaatgcccaatagcaatactaaaaaataattgtaataattagcccctttgttgtaggataattattccgagttccaactatattagtgagagcaatatttgataaatgagaaatgctaaaagcacaagtgctgtctagtatcttctaagatataatatcactattagtgtaattaagtgtcgaattctatataatttaatgtaaataacttttagagaatatcactaaccaatcacaaaatgacacatctagaaggtactagacactaccagtacccaatataaatgctcttgataaatactcaaggacacctagggtgtcctattttttcataaaatattactaagaagcaccaccaatcaacatgctactttatatggcatataactattaatataatttagtatcgaatcacatattataattgagataaaataagtaggattcggtatcataccaatcaaaataagatggtgctaaaaaaaatactttctagggtttctctctattagcgtcagatgttgccaacaaagtttgtaatttgctaccgaagaaatcatcggttctgttatgggtatggatgtggctctggttagaggtgttattcttgcctagcaatgttttctcattggtctcttttttcctcgatttgcttcccttttatcttttttgattttcgatcaggttgatggatccgctacttggtgttttatgggcaagcaatcgttgtcaatgtggttgttgcctggcatagggactctattttcttagacaaatttgtgtgatggggttctttcttggcaagttgggtggtcgaaacttctgggtagtgcgtattgttctactaggggtgaagaccattgagagttgggaaactagtattcctcacattcgtttgatgcttgatagttgctggctttttgaacctttagttagggttgttgcttcttttttatgatgaatggcttagtaagcttaattttattaatttttctatataatgtatagtatatatcttcatatttgtctgatttacctaatagatatttttttattttcataagaaagaaatggtgttagaattagaagagtgtcacaaaagcaatgttattttccctatgcttgccttgctaaaccttctattcttttttgaattattgttttgtttcattattttctttttgtgtttatcatattggtccatttcctatacttatattaccatagtatctttattattttatagactttgaatttgtagtcacttcactaattataattttaagcttgacgctttaggcacctttcaagaggtatgcctcttatatataggaagatgtttgaatttaagagtgtatttagatcccaaaattacttctaattacacaattattgtgtaattgtatagtcaaaaaaaatatgttaaattatataattactttcaattacactataattgtctaaatacactcttaatataaaggttgattagaaaattttgtcctctgaactttcacatgtac

SEQ ID NO: 84470 - DNA, 691 bp, Cannabis sativa
aacccatcttctacaatataagcctctaaaaaaagccattcaatccgatcataggccttactcatgtcgagtttcgaagccataaagcccatctttcgagttatttttctcagaagatagtatagtactttgaaggagaccataacattgtctggaatcaacctcccaggaatgaaagcactttgagaatccgacatgattgcatccataaatgatttcatattgttagacatgactttggtaacaactttgtatggaacattacatagggcaattggtcttagatatgtcatatagtctggaaatttcttttttagaatcaaaaccacatgtgcatcctcgcaaccaacctcaaactctccaatatcaaaaaaactgttaaacaaagcgagttgtgtcctctttaactatatcctaacattttttataaaaggccgaggtcatgccatcaggaccccgactctcatccaagtacatttgaaaaattactttatgaatctcctcccccattactgttctattaaactcttcattcgcaaaatcgggaacaattgaatcagcacaatccaccacttcagcacaatagaccccagatgccaaaaaaaaaagagaggaaaaataatccaccatcacctcagataaaccatgctcccaatccacccaatctccttacaaatttttgggcttcgag

SEQ ID NO: 84471 - DNA, 595 bp, Cannabis sativa
gctacctaattccgagattatttgtcaaaataaatttaaaagaatcagatgaaagagatagtagcatcatagttaaccttaagaacacatatattcaatctcctccattgttcgaaagacacaacagtataaactgttgcaaacaggttcattcaacccattcacttgagtgctcaatcattgtgcaaggtacgtaactgcatcattaacaactccttcaaccacagagaacttattatttctaatcactaacagtgatttgatagtgagccatcgaagaacaaagaaggcgaaccaacaacgaaataaaacaaaataaaatcatgtcactgaatgaaacaagactaatcgcagtaacctaaaaaaaaaaagaaagacaaaactatgtcacaaagacaagactaatcgcagtagtaaaaacctaatcgctttagcataactacaaatcctaacaagccacactcaagtagggagggtcggcgggcctagccagtgaaaaaatacaaccttcgacgggtaagaatttaggaatgagaaaccctagcaggtgatataaaaataggcaaaataagggtgaaaaggggaaccatgggtt

SEQ ID NO: 84472 - DNA, 1332 bp, Cannabis sativa
gtgatggtactactgtgaacatcactcaggacccatggcttcctgaggcaaataactcctttgtcatctcagatcaccctacattggagggtcaaatggtgcactgcttgttttcggttgggcaaagatcatgggatttggatgttattcaagacctgttcggggaaagggatagacaactgatattgtctattcagttgagggatcgggtggagagggattcctggtattggcggctggaaaattctgggttgtacacaataaaaagtgcatatacttttctgcagaattcagcagcagttgacccgattgttcagaagggatacaagcaattgtggaagattgatatacccccaaaagtgcagcactttctatggcgtgcaacttctggctgtcttcccacaagagtgcagttgaataccaggcatgtgaatgttgataacatgtgtcccttttgtcatcaagcacccgaaaccatatgtcatgtgctggctgaattgtgcttttccagccgtgcattgctggaatgtttccagtgttgatttgggggctgtacctgtgcaagcttttggagattggttttttaatcttacctcttgtaatacaacagatgttgttagagaagtagctatggtgggttggaaaatttgggttgttcgtaatgatctagtttggaatgaaaaaacttgttctgctattgaagtagttcggtcggctagagtggttcttgatcaatggaagaatgctcaatcacaaaaaatgggggcattattaatagatgatattaataatgttagtgagcgttggaggttaccatcgttgaatatggtcaagattaatctttcaagaagaaaacaagtttgtatttggtttagtggcccgagatcattcttgtcgccttattgaagctatttctgagagtcgttttggagctgttcatccaggagtagcggaggtaattggtgtcaaggaagcattgagttggattaaaagaaagcaatggtctaatgtggtggtggaaactgatgctttagttgttgtgcaagctattaaagattcaattaacatgccatctcaatttggaatgcttgtgcgtgactgtcgggatttgatggctactctaaataatgtttctttatgttttgttaaacgaacggcgaataaggccgctcattgtgttacgagaggttcttgttctttgtcagattgtactttcaatgagcacgatgctccttctgctttaaactctattgtttctgctgaaagttattaaataaaatcatattttgattcaaaaaaaataaaataaataaagtgagctcttttgtaatt

SEQ ID NO: 84473 - DNA, 730 bp, Cannabis sativa
  modified_base (563)..(567): a, c, t, g, unknown or other
caccttggagcaagtggagactgagaaaggtaagttagaggacacagttaagaatcttaatagacttctgaatgagaaggagaatgagatatataaactcactacagatctgattagaactaaacaagcactgcaattcattcccccaggcacagctgctatcaatcagaccctacaactccggaaaccttatggttatcgtacctccttaggttacaaaatgttgtacaaacagggaaacgatttgtttgttgagaattcactcacctcaactgtcgatctgaccaaaaaggatgatgagaaaccagacatccctgctacagttaacgaaccagattcctctgtgagtagtcaagttccatctgaacccactaaattgaagtttgaagggagaagaattgtcactggaaatcagtcacaaaatgacaaattcattccaatatgtcatttctggaacaggaagggtcacattcgccccaagtgctataaaccgtagaacttcttgaaagtgatgattaatcgaacaaatagttttccacaaccaaataaacctcaagggcgcnnnnntcgtcgagaatggaaaataaaatctaacctcggaccaaatgttggattggtggctaaggtgtctttgtctgcttttgtataggaacagtggtactttgacaatggatgctcacgacacatgactggaaataaaaagttgctggttaattacaaagaggaaaag

SEQ ID NO: 84474 - DNA, 755 bp, Cannabis sativa
attagctgtgttaacagctttaaagaggctttttgttgttgttccacttctttttctttatgggtttcgaagtagaggcaatatttgtctcgagttttaccataataattgtaacattactagaacttggagctttgttaccatttttctgtagacctccaatcaaattctcaaacgtctgaagattgttgatcaactcgtaaaattcaaaagtcaacttgttcatgacgtagcttgaagtaaagtgcataaaagctagatttaaactattcaaagatcaaactcacttgagtttcttgatcaatgatagctccatggatctcagcttcctagaaataactagccattaggagtaagtggtcatacacattctgataaggtttcatccgtgtattaatgaagttcttggttgcatcaaaacgagcttgatctgatgccttcccaaatagttcagttaactgattcatgatatttgtagtcgtgagagtgttggcaaatcttgttttcaaggtattaaccatgctagacaacataaagtaacgagacttcttgttagcattctgccaacgctcaaatttttcctttactgtcttagttgcattctcacctagttgcttaggagcttcctcaattaatacaaacaatgaattctcacctatgatagcaatattgatgttctctttccatttgacaaagttagctcaagagagcttgttgtcaatcaacagtgacacaattgagttgttcatagtcat

SEQ ID NO: 84475 - DNA, 797 bp, Cannabis sativa
catccaactcataccttaacattgttatctttgttaatttctttatttaattaaataaaaaaaataaaaatattatttatcttgaatatatttcattaaactatgttcactttttttaaaattaattttaaaataatctgatgatcaaagcaatttcatttattttaaaaattaattatgtcttcaattgtattagttttttttttaatttttttttctttcaattcatattcctaaaaaatatacctatgaaataaaaataaattgtattacaaatattttaacaaaaaaaattatgttaaattttattagaaaaacaattatacatgattaaaaaaattatgaaaataaaattaaaaaataagtgttaaaattaacgcaaaataatattaaaaaaaattaaaaataatatgaaagattttttaaaattattttaagcttattttttcttaaatatgtgggtgtacttattgggatgcaaataaatcttagggaagttatatttacaccccctataagtataaatacaccctgttttgaaaaagtccttaaatctaacaatcttaatagttcaatgagcatttcattgaccttaaaagttcaggggacatggtttggtatatgtcaaagttcaggaggtaaaaatcctaattagtcaaattctttataagttaattgtcatcactaaatttctcaaaaatctaaactttcttttcatctttcaatttaatccgttaatggtaatacgtctctctccatttgaactaattaaattggtgaaaaatattcaactttca

SEQ ID NO: 84476 - DNA, 662 bp, Cannabis sativa
attgtaaagatgatggtcagaatcaaactgcaggtcttgatcttattgctgatgcaattaaaataggggatattgtttctgataattaaactagatgcaaattgagtttcagatgaagtagaacaagaggattattaagttaatttgtagcagcagtaagacatttacaataggtaaggtttcttagagcgatcctaaactttcttttacagaaccaattctacagaatgggaagaaaattgtaaaagttgatatagagatttactatcattaattgttttgaatttatgaaaatcaacaatgtaaaccctaacatttatatatatgtaaaatctctaaatcttaaatgcaatcaacgctaaacgaaaaaaaaataacaacctaaagaacgcaatgctatcaccttcatttagactattgaagaagttttaagttcgtctccactttccaaatctttgcaagctatatcttcagtggctggaggtgatatggtataagagtgatcatctagaatgaaatgatactaattcaactaaatgctaatatatactatgattgagagaacaccaaaaacggaaatcatatatatatatccatatatggctatacccatatatgtctgaaaatgtcatgatacgaagagcaaaatatatcgagagtaa

SEQ ID NO: 84477 - DNA, 826 bp, Cannabis sativa
ttgatatacacctcctatttgtataattaggaaagatttatggtctatttttttatatatataataacgtacgtgttagttatttaagaaaatttataaatgttagaaaattcttaatagtttatagttgaaaataaaattcaaatagtttattactatgtggcaaagaaaaacaatcacacatgtaacaaaatatttgaatcttatttccagtattgtaaactattcagcattttttgaaaatagattatgtaagaaactctcttgaatatcgaaaaaatatagggtgtactgaaacataccactatatacttaccttttattttttaaaagtaattttagcactataaaatattagaatatatatttttaaaaaacaaaaaaaaaaaagagttatttaattttttttccaaaattagtattatgttgcttcttataattataatgtttagttcaattattttttatgatcatatatgttgtagttatttaggattatatgtaaatttttaaaaaaatttatataatttacaatgctgaaaatgaagtttaaatattttagtgtacacgtgactgttttttttatacacatgataaataattgtttaaattgtattttcaatattgtaaattatttaaattcttttgaaaatttacctatagtactaaataactatgacctacggaaagtataaaaaattaaagtaaaaaaactcctcaaaatgccaaagcaaatagtggtcttccaaaattgcacaacaaatttttgtaaacaaaataatcatagctacacaagcgagtgctgttttcattttttttttttttt

SEQ ID NO: 84478 - DNA, 865 bp, Cannabis sativa
aaatacaagttaccctaatttttataactaatatacacttaatattctaacacttatgaaatggttgtggagattttctttagaaccaaactcactgtggcacaagttgatgatgagtcgttatggaaaggctgataattttttggagtggtaaaattcaaaattagtagaggagacaatatttaattttgggaagatgtttggcttggtgatttttctttattaagtgcttgttctgacttagtagtgaattctaaggcaagaaatacgactataaaggaactgattgtcgatgaaggtttgctaggtgggttctctactaggatttcaagtttagaaggaatttattggagcgggaggtcccaagccttattttcgttaatgccaaaaggtggaaacatgtcaagagtgctgaatattttagatgatagccgatttaagaaactagatcgatttggggttttttctagtaaattggccttttgttggtttatgtcaaactccgatgttagtggaatgtattggacaaggattttatggaaaagttgtgtaccatcaaaagttttggctggcttgtatctttagaaaaggtgaacgtacatgataagatgcaaaagaggaagccttacctatacatttcccttggatggtgcgtttgctgcaaagacgtcggggaagatgttgggcacctgttcttggaatacagccttactcgacgattatggattaatttgataaaggaatttcagttgacatgggttatgtctagatgtgtaccacatatgatagtcaacaaattaattggctacaaacgaaaaacaaagttatggacaacgacgatttaagcaataatttgggttgtgtg

SEQ ID NO: 84479 - DNA, 753 bp, Cannabis sativa
actggaagaagatggttgctcttaaagatcaggtaaagagtatgactatatgcaaagtatcaaagtcttatactattgcaggtggttataatctttttcatccttctccaaacaaacaacactggagttatggaatgtgcgggagattcaacacaccgaaacatagtgtcatcctttggttggctatcctcaataggttaaagaccaaagacaggttgcttcgatgtggaattcaagtccaagctagctgctgcctttgtaattcagctcctgaaaatggacaacacctattctttgattgcatggtatcaaatcattgtttaactttgattaaacaatggctgaattggaaggctcacaccagctccttgccacagttgattaaatggatcgggaggggcaaaatctcgaattttagaaagaaagtgttggcagcagctgttgctgccctggtttacagcctttggaaagccagaaatgaactcatttggcagcaaacagaggtgcatacaggcagattaattgatgatatacaatggattctcaagaaccggattaacatgtttttacctaggaaaatcaaggctatagatagagattggtttggtggtttgtaagtgttttgtaaagaagaaaaattgcttgtatatagaagctaggcccttgattcggtgctattagtttgtaaataccattttgtgcaatacaattcattgatttatcaaaaaaaaaattatattctaagtcttataa

SEQ ID NO: 84480 - DNA, 618 bp, Cannabis sativa
catctctgtaattaaaattgctttatggatttttcttcttattttgttgcatgttacttctaaaacttaagatttttttttttgaagatttagttgttgtttttattttttatttttttttttcaaaagagatttggtggttttgctagacccttgttttagttttctgtgtattgtttttgtgttctctgtgtattgtgtgtttttgtttttcatgccattttttaatttaatttttggagcatcctatcttggttcaaaattctaatattttttttttaaaaaattatgatacatatatgtatttattaaaaaaaaaaatagtcaattttttcattaaaaataaatcataaaagtataataataatttttgttggagagcaaaaatgagcagcaaatataattacaattatattgattgaaaaaaaaatgagttacaaattaaaaattgatggagacatataataatatataaatgaaaagaaataattacctttttattgaataaaatcaataatatcgatagatagacatgtacataagatcgtccccaacaatctaacagagaaaatagttggaaaagaattgataggatcatgtggatattccttgtacaaa

SEQ ID NO: 84481 - DNA, 1516 bp, Cannabis sativa
  modified_base (153)..(164): a, c, t, g, unknown or other
cagaagacatgtatacaaattaagtatgaaaaaatacgcacttgagcacgacacgacatgatgctacaaattagcacgacacgcagggccgatcctgagtagaaattggtcataggccaaaaaaaattttttgggcccttactataaagatannnnnnnnnnnnaaaaattattaaaaaaatatgtattttttaaaatgtattttttttatttgggtcctaaaatgaatgagccttaggcgcgggcctagcccgcttatgcctaaggccgatcttgatgacacgacataaaaaacacgaaaaacacgacatgtaagcacgaataaactagtctaaaaggcataacatgcgacaagcccaaaaagtacgacacgacgacacgatatattaaaaattaaaaaaccttataaaaaaccttataataaaccttataatttattattattattattattaatagtaataatacaatattttttttctaatcaattttgtaagatgattttttatattatattaatatgtgggttgttaaatatttgtttattgtaaccggtttttatttttaatttttgttttggttatttaagtaactggtttatgtaagttaatttttaatttaattgttttactgtgaaattaattttaactaagttggttaatgtaacaggtttatgtatgacacattattcacatctcactttagaaaatagctagtattaaatgttcactattagtttctttggggagtttcattggggggactagctagctaggagaaattaggtttcatgcctaactctatgatattttgggactaagaactattgcaagtattaataaggatataacaagatgagaaatagttgagaaaattattttataatacataaatgcttaatatttttaatttaggtggctttttggtttggaatgataataaattgtaataagaataataatggtaatgataatatgatatttgatttgtttataaaacaataataagaatgagtagtgtgatgattattttttattttttttaacaagaggaataatattattcaaaaaacgaaacaatatacaacaacaactgaggcaaaaacagccccaaccaaacaagtcgagcaacaacaagaacaacacagtcagaccaactaccagtttaatattacatcaatgaaataaatattctttctactgctattgaagggacccaaacataaaattctagacttcatcattttcttcacatcctggctaatcctgcttggggaagaacaaaacaagttaaaaagacagttatttctattttgccaaatgagatagaaaatggcaacagccactacattgatcactctgttttggatgtcatgtcgagccaaaaaatacctgttacaaaaatcagtgtgttggatgttgaccaagtaacttgaccaagccaagaacatatatgattaaccatctattttgcaaacaagcaatcaaacaaaacatggtcatgcgattcttccttc

SEQ ID NO: 84482 - DNA, 517 bp, Cannabis sativa
tgaaaggatataactggttgtgggtattgattatcaagtgttactaacaactgaatcttgattttaatgaagttaattaagttagtgattatgttcttcatttttgtgtgtgtggtgtgatcaaactattacttgtccataattggaaaatcaaagatacattaagaaaatttcaatatagctttgatttgtgtttgttgtacttcacaattgtcattgttggtgtttcattaatgagttgcttgataaattttggtaccaaaccaatgataaaaattggttagtttgcaatttggattctaattatactcaaccacatcttatcttctttagctgaactagtttgaattcgcctttgcttgcattgaaatgtgtcttttggaagcttctgctttttagcaacataagtatgctatttttcaatggcagaacttgacattgagttttcttgaatttctatgcctcaatctaagaaagtaacttaatagagagtaatttctatgcctcaatctatgtt

SEQ ID NO: 84483 - DNA, 538 bp, Cannabis sativa
gaaatttcataattttgcattttcggtgtccggcaacatggaacgcggtgtatggctcagtagaatcacaatctaatattttagtatagtgggaaagttttgttagacattaggaatgtcgggattggtcgggaatttagaatttcccaaaaatacccataatgacttttagtaatttttagtgttttaaagggcaacatggtcttttgtatcaagttgtattttgtcttttgtgggttaagtgaagctgatttttatgagtattggctgagttattttgctaagttcatgtgattaaactaggagtgctatatcattttcaaaagaaaacaaagcaaagtaaagatcactctttctctctcaaattcactctctctttttcggcccccttagagtagctagggttcattgtttcttcatcaaattcaagtaatttttagcaagttttgtgatttcaagttgttggtaagcttccatcaactctttcttttagtttcttgaagtttaaggaagaaaattttgcatgcttgaggatttg

SEQ ID NO: 84484 - DNA, 1033 bp, Cannabis sativa
ccaacaagatacgtgccaatcgtcaagttggaaaaccgccaagttagacgccacctagaggagggaaactgacgaaatgttgagttggaacgtgaggtagccgcggccagggcggcacaggagaataatacacaaaatcaacttgatcttggagtgagaagaccacgaggcagacctcgcggctcatgaaccaggtggcaggagacagctcaagagaaccctcagaacgctcaagaagaacaacctgggaaactgagagtccccctgaaaatgaacaactaaatgatcagccagagccttctcacaggaatgagaatagaaggcgaccagaagccaggaaataggaaatttctcatggaaatgaggaaaatcttgggactcaaccagggacacgaaggtcaccaacggggcatcgccaacgttcttctcaaacaacaagggaaggggcacgtacaaaccccagcagggggcacacaacaaaccacacccaagggagaaggatgggacgtgaagaggcgagtgttacctcgaggcgtacaagaacccatagccgatcaacgcaaggaggagaaagtactcgtcgcaacaatgatcgagaaagcacaggcacgagtaaaactgcacgttactcaaggacaaggtccatgagcaggatgagatccatgagtaggacaaagtctgtgagtaagacaaggtctgctagcaattataaccaaccggatctgtgagaacacttgaaccaaaagaaacctgatcttcaccaacaactcggtccaaagcaaggggatccaatccaattgcgaatagatcagttcgaggataagttcaggaggtatcaagtcagggaacaaggaaaacaatctagatatgactcagatgagaaactcgagccataccatccagacatcatgaatactccctttcccacaaaactcccatgtctcgtcatacgatggaaccactaatccggtctcgcatttaaataatttcaatattataatgcgagctagcaatgttacaaacaatttacatt

SEQ ID NO: 84485 - DNA, 637 bp, Cannabis sativa
gtcgatcaaataccatcgtacggttagggttcacaacggtttagattcctcgatccaacggatgggatgaatgggtatgatgaagagaaagggcgattgaaacgcttaagtacctttctgacaccgacattgatggaagggactgtcaataggcgggagacaaattgtttactgtaaaagcaacaaaggccaatgatgacgatcataaatattgcccatacgcctgagacacgtgtcattgtatttattggtgccagatgcgattcacaagtctcatttacctacgactaaataagacttggggtaaatgctgctcccatttattcccaatatacatggtagctgctgtgtctgacatgtggttgacatggacacgtcacccgaagatgagtccaagacttaacaaaaccacctgaagaatcaaaatgaacgagttgaagtgccaattcctaaacatgagcgaaaggtttatcttcttcttcgggagccaaggcatggacaagcttctccgggccagaaaggctggggttgaacaatcaatttgcatttaatgcgacatggggaaaacgtctgggcacgcccataagaggacgtgtcagacgtcataaacttaatttggggcgattacacgataatc

SEQ ID NO: 84486 - DNA, 821 bp, Cannabis sativa
aatttaattatattaatatcttatttcacatttgttacatcgaatgattaaagtacacatgtgagtatcttgatctctgttttgattgcgattcaaaggattgttcgaaagtccaccatttgtcgatgttctaggattggagctaacaacgctcgctgcaatggtaaaaaaggttctgataccatattagggcagttgaattttcgtaatattgtcgctaaagatgaatattaacggaaaataaaaatagaaaaacagaaaagaaagattgagaaagatatatatagttgaggcaaaataattgtattattgattatgggaatcgattatacattatatacctaaacaatctttaacacaaaatgattgttataactaagagctaacctactaactgaaatgtaacaaacttaacagctagtagaaactaacacctctctatctaatagttttaaccgattccattaacacagcatatttctacattatcccaatctagataaccaaatgaaaatcataattgtgtatacatgaaactataactatacttagctatttcttcaattccatgaacaaataagtaaaaataaaagtatctacatgtatatatagctggttttaacccagcaccaccaaccgtctttattgctattacattgattttttctccttatgaacactagtaattttttgtgtattataatattttattaaagagctatggagatagctaaatagatattatagacttattgaaagggttgatattttgactaacataacaaaaatggtctacaaatttgatgagtgaattaaatttc

SEQ ID NO: 84487 - DNA, 683 bp, Cannabis sativa
ctactgcaattaattattattatcttgttggtatttaaggtgggagtgagtatttattgtttaagattttagattggctgagttgagattgtatttagtttttttttttttttttaactatctgtaatgtgtatattatttgctaataataataaagtattagtaaaattataactattttacattcattaatttttatatataatttgattttggctgtaatttttatataaataatatgtaaataaattattttatattattatttaattttttttaaaaaaatggatatgaaacacaattttatataaaaaaaataatttaatggttagttttggtggacatgaaaagagttcttattgtgggtcgcattttcacacgtccaacaatgctaaacattaaagaattgctcaacatgaaaaatacccctttcataactctggatatcatgtcactaactacaaaaaaaaaagtgttctcgtcagtcaaaatgccgatttttttaagaatcgacgctattaaatttgagttttggtgtaaaactgacgctgataaacattcattggcgtcggtttataacaaacggtaagaattagcatcgatttataacaaacgctaagaattagcaccgatttataacaaacgctaagaattagcatcgatttataacaaacgctaagaat

SEQ ID NO: 84488 - DNA, 573 bp, Cannabis sativa
  modified_base (219)..(223): a, c, t, g, unknown or other
ctatgcccagggccgggcctgggtatttaggtaataaagttatcattttatatttttgatgtaaaattttctaaattaaattgaaattaagaaatatatatatatatatatgacaattgataaatctacagaaaactaatccggttgttatcattatattttcattgtactcgttattacattcaaatctgatatcattaccgtatcttacttgtaatnnnnnatatcatttctaatagatttgtttagtacataaaataaattaaataatgagttaaactactcacttttatacataacttaagttgtaatttttaacataattttttctttataaataaaatatatcaaataaaattcattaattaataatgaaaaaatagatagaattttatctaattattttttattttttataatcatttaatcaaagagatatttttatttcaagaatgtagaagttcaatcttttcaagtgtcacccatttatcaattttagggaatatactcatttagtaccttgtatttgctcgaaaaatatttttggtacatgtgttttcaataatacttatt

SEQ ID NO: 84489 - DNA, 823 bp, Cannabis sativa
gacattaactttttcctgaatatccttaataacagttatgacagacttaaaattaaggtcaacaaaacacctcaaagaaatgaaatctttggccaaggattcttgactagaataaccaattccaacttagattttaacatttttatatcatctgaatcaaattttttagaagatgaaccactctcgaatgtttgctttgttgtaccacgatcatcgatagattcatctaaaaataagccatccaagtacaacttctacctttcttcatcagatggacaaatgttcttaacctttcactgaaataaaaacaagaaacaaaaatagtaaatctaaaacacaaaaaataaaacagtaaagaaactgaaaatcacctgcttcaacaacgaatcaaatatcttgcctttcaagtccttgaaagttggatttttggtcccaacatcattggtcgaattcagaattcttggaatcctggatgcaactcttttgtaaaatgtatttaccatcgcatgacaacattcataaaactagactatgaacacctatggacatcccaacgctctatactaatcatcgtaagactgacatccctttttctcttttttatttttcattttgataccatgctcaattatgcctttgaatgaatcaatcgtcaactcaaatgactctctaccacaacaatactcatcccaacgactgctgtcaatgatatctaaatcagacctaacaactttcttatcaggagtattgctaataaggaaacaatggatgaaatacaacacaaacagtttcaaacctagggattcatcttgtccccacctac

SEQ ID NO: 84490 - DNA, 614 bp, Cannabis sativa
  modified_base (86)..(86): a, c, t, g, unknown or other
acatgaaccaaataacacaataaaaaagtaatgaaaataaatctgtttcttgataaatgaatatagaagattacattgaaataganttttatttagggcacaaagcgcaacacatattgcctttggattggatgatcgataatatatacgaaaagaattgaggataccctgataggcatcaagaggtaaaattctcttacatgtagtttagatttaatttatgtaatcatgttaagatcttggggattatagttcatattagattcatctaaaatattttataaaacctcacttttgctttctactctgatatgaaccataaaaactaataataatagaaaggggtcgttgtctcacgtgatgaagtgggataatagacttgagcaccagactaaactggatgtgaataagataaaggttaatgttgacggaacactttttgagtcaaaaggaaagtttggtgtgggagtagtagcttatgatagctctggcactcttttggaaggcttttcaatgagttttcatgggcgagctaaggcttcttctgtggaggtcattggaatcaaagaggcctttggttggataaaaaaaaagggtggcttgatgttcaactt

SEQ ID NO: 84491 - DNA, 875 bp, Cannabis sativa
  modified_base (47)..(78): a, c, t, g, unknown or other
tttatatgtgtttatttcaattttagaaattcatatttagggtgttnnnnnnnnnnnnnnnnnnnnnnnnnnnnnnnntggtaaaataatatccaacaaaagatctggtcagttctttgttaagagtgcatattgcctactccaagatcaaagagatgagcgaactggtcataacaattcaggattttgggtgaaactttggcaactaaaaatccctcctaaggtcaaaaatcttctttggagagctctttcgggatgtcttccaactagttttatgctccgtaccaagaatgttgatgtccctaccacctgccctgtgtgtcaagaaaatactgaaactattatgcatgctcttgtcacttgcccttttgccaatgcttgcttgaacaaggtgttggcagcgactagcttggtaagtgctgcaacattcggctcttggcttggcactatcttctgtagcctcaatgaagaaatcattaataatgttactgttctttgttgggcactatggaagtcacgaaacaataaagtttggaacaacaaattatcttttgtctctcatgttgtaacttcagcatctacttgctttgatcaatggaaaaaagctcagtgttcttcttctttatcgtcacttaactttgcttcttctagtgacggtgttgagcattggaccaaacctgaaaccaatacaatcaaagttaatgtcgacgctgcaatgtttgaggaggatggtatatatggctttggaatcgtggctagagatgatacaggcagattaataaggagcaagagctcttgctcatcaggtgccccgttggtggagattgctgaagccataggggtgaaagaaacccttagttggataaagatcaatg

SEQ ID NO: 84492 - DNA, 812 bp, Cannabis sativa
gaacatattttttagttcatccaattgtgcttacacagctggattaacttgtttagcctcttggccgaccaaagtcatatcaacatatctttgagcgagattttgagcacgagccccaggctgaacgactggcgcgtcatgctgctcgtctagccctctgcttttgtttagatcatctttgagatcatgagtcgttcccaatcgattaaatatagaaacacccagctgtctcagtgactagttggtttggccaatcaactggctagaaccattaacttgggtggagttattaggtatgacttctcctaacgaattgttagacaagatctgcccgcctaccacttggcccacaggcaaaacatgtgaccggggattggacggcgtacctttcagagtttgagaagtgttcacggctggatcttcatctgtctcgcccaagggaatgatagttgcaggctgttgactggtagcctgataggcttttcgtatcagcatggtggcctgtcttgttctgtcgtcaatggctgcttgctaagccctcaacatttccatctctttatccctcctgatcatgatgtagggtgttggtatgacattgcatgattctaagagtagcacggagattttggatctcggtgtcatctccaatggtgtttcgaacatttgtaacaggcagaacttcagtgttgggaatgccttgattggctaccgaactggtatttccagtctcttgcacacccggctcgattccacttaaaggagttgtcacaccttgacatactgttgttgattgttcagggttcgtgggtggt

SEQ ID NO: 84493 - DNA, 703 bp, Cannabis sativa
gtaagggcaaggctaaggttgagctgctaaggttgagctgccgtgagagcgagcacgtgagagcgagcaaatgtgagagcgagcaaatggaagagcgagcaaatggagagcgagcaaatggagattgtacatgtcgaggcggttaggcctaaagtgtatggtctttgggatagcatggcttattttgtatagccgctaggcgacaaacttttgtaacttgcactatgaaatgtttgtaaatattttgtaaaacgggatctcggttaatacaagtatgttatttcggtaattatagttaattaaataaagttttaattattcacgatttttaataaactctttgattagcaacgagctacacagtcaagttaaaaatcaagttaacacgcctaaactagtaaggtgttacattctcagtcttcctacccttctttgacttgtagtacacactcatgaaggttccaactgctccatacttcctcatgcaatgttcgtagaggccagcatcaaacatcctccagaatttttcctcatcaagctcaaacattgcatactgtggctggaatccgtgattctcgatcaaccatttctccatccttcaaacgacctctatgccatcaaaaacctcaccatttaaagcaggtcctggggagtagtataccccaacatcaatgtacattttgtgcgtactgtgtgtctccct

SEQ ID NO: 84494 - DNA, 1111 bp, Cannabis sativa
ccactatagatttggaattgcactcttgattacatagaacgctctatacaccaaatatagatacgctatgaattatctattgtttcaatccaaacaatcaatgatcctctatagacgttttacattgagtagggaaaaattacctttttaccctttaatgtattttatcattaaaacacttagctaattgtaaatgatattttaacaaactaatgtaattagtgaaatgagcgttctatcatttatcatgtttagcgaagctcaaaggaaaccatcatttcacttctaaataattgtagaagctataaatttcatatctataattaacctcccactcaattgcactaccgaattcctaagatgtaagtatgggctagtcctacaggtaagcaggtaatgaacaagtcaaagaacccatataatatagttaagctagaacctaaccatttcaagattgagatcatttgacctaagatcaactaagtgacatcgacttagaaaagacttaacaatatatttatgatatatttcctactttcaatattggtcaagtttgatgtatagacaatacatccaatacaagtttactttcttaataccctgaaaagcacatttcacttatccaaatataagtaaactacatcgtaaattatcaccagtactacaatgataaatcctggaactaaacagtttgaagcatataatcatgattatttttcactatgttgacaatactataatcacgaataacaatatgttcagaatttaatagaatttatatattgaacatataatcatgaaagtaatcgtgtaaaccatgaacataaaatgatttctaatcttttattaaatagtaaatgagattatattgaaacaagttttatttggggcataaaatctcaacatatgtatacatatattgctaaggataaaaattattctatctttttcttttcatttcaaaaacaaatattctaaactaaaattactttataacaaaagtatctattattattagtgtttttggtaaggtgacaggtgtaattccaagtattcttagtcaacttatgggcccatttactaagcccaagcgaatcgatggattgaccca

SEQ ID NO: 84495 - DNA, 2368 bp, Cannabis sativa
tttttttgttttgtttttttttatacatacatatatatatattatttaattattattttatatatatatatttgactcggtcaaaattgagtctttacactatgcctggacatattcaatctgctccatacaatctgagaccattgcaccttttctccttagggtctgaccattttataagctcttgaaatttaaaacttactttctctcatcagctgctgaaaatccatggattgcctggctgtttccttggctgccacaatcctctattccaatactagcttgcttgaagtggagcttgataactccaccaatcttcccctttaatgtacacatcgtgcacctatttgatccataatttatcttctttatttgctattgcccaaatatactttgttatagctgttaggttccaatcttccaccattctaaacccaatttcccctgttattttagactggcatactgaatcccatgaaacaagacctaccccttgtaacatgtattggcccttcaaagaaaagccctgcaaatggcttcaatgttctttataatcttctttggtaagatcattatttgactccaatatgaataaatagctaacagaactgaattgattaacacaattctaccagcatatgaaatattccttgaactctatacccttatattcttgctgtcatcttctccaccaagaaagcacactctttgcttgaaattctcttagcacatattggaatgccaagttacttaaagggagtttcctttctactaaaaccagaaatatctaccaccctttgaacctctctttcttccataccacagcaataaattgctgatttcgaagggtttggatgcagtccagatgagctagagagcaacttcaaagcatgcagcatacaatagatacttttaaagtcaccatggcagaataagatcacatcatctgcaaaagcataggtggttaagattgagatctttacacctttcaaagaatttgaacttttctttagcccctgctttcttcaagatcctggataggtattacatttcaagaacaaagagcagaggagacatatgatctcgctgccttaagcctctgctagcctcaaaataaccacgcatagtgccattgaacattaatgagtatctaggagttcttacacaagtcataataagctttatgaacttgtgagggaacttgaaagcttgcaagatttcttccaggtagtcccaatccagggtgtcataggccttctgaatgtcaagctttatcacacatcctggtttggtcgattttctcccaaaatgtctgattaaatcctgacatatcattatattgtgagctatgaatctacctgagacaaaccccccttgattctgagctataaggtctggcaagatgtgtttgagtctagaacatatcagctttgttgctattttattgatgacagtgtagcaagcaataggtctataatcactcactgtatttggacacttaatcttgagaataagtgtaataataatagaatttatttctttaaggagctgaccagactaaagaaatgaggacactgctccaaagagatcatctcctttaatttcccagttgtcctgaaaaaagtagcttgagtaaccatctgggcttggggctttagatctaggaaccccaaataaaacttctctgacctcttcttttgtaatgtccctaagtaacatttcagcctgttcacatgtcaccagtggtccctgactcataatgttactcttcacttgcttcttgttgctaagattccttcctagcaagcttttgtagtaattaagctaggaatgcctcagtcacttgctttgggtcttcacatcttgttccttctctggattcaatggataaaattcgattttgcgttctcctatctttaatgatggcatgaaaaaatgcagtgttgtcatcaccccctttaacccagttgaccttagctttttgttgcaaaaaagaatacaaatccttctgtgcttgaatgtaggcctccctggtgtttttttccttcaactgcagttcattgttgaaagggtccttttgtaactcctcttggtaggctgtgagtaaattttttatttttatttcctttgccttaatgtttgagaatgattctttatttagcttctttagctctgttttaagcatcttcagtcgggtcaccagctagtacacaagagtacctttaatttgctgctgccagatcttagaaacaatccctgagaactgtgtgtgtcatgaccacattctaaaatacttaaatggcttttcaccactaagaatttcagagtatatagtcaaaacaattggaatatgaaaaattaacaaatt

SEQ ID NO: 84496 - DNA, 1272 bp, Cannabis sativa
tgtcaagtctgacacaaggtacgatctcaccacactaaagtgaggtcttcccttgctcaccatcagatccgccacagacctcatatactcctctgtcaccgaatccttcgccctcttcacaagctccaatgcatacccaattggattctcgcaaagcttccccgcagttgtcaccgccacagggaacacgatcccgttaccgtagtacccctgaggcagaggagggttaaactttgaccgcccgttcactatgcagattatgcgcacctcttcttctgcctccatcttcaaagctactgtgcggcatttccacaagcacgcagacaacagctcgaaggtggaaatcttatggaactgaggaggaactaacttcctcaaggccgccaactctgtgggtccgaaaaagaaagaacggtgagacatgtcatccaaggatatgatggtacccttggtgtcaggtacttggtcatactcgcggtgttcgcaggtgacacgaggtgggttcctggcattcaggagctccctctgccacaccggcagaatagagggggagtcagcgccccgcgctatctcccccaatgcggtcatgaattgaaccaaacccgcaccgtcgctcatggtgtggttcaaacggagagcgaatatgaagccaccacaagcaaggcgagtgacttggataagaatcaagggagagttaaggaggccactggagccaggaacatcgaaaataagatcttccaagcaaggaaaggggggttgaagagcatccccaaagtccttcaaggtgacatctgcgtcggcttcgatgaagaggaccccctcggcggtgcagtccaccgcaagcttacgctgtgttccgggtagctccctgagcctgccagcaaaaggatagtaaaagacgagagttttagcgagtgcttgtttgatgactttggcggggtctattcccttcatggatggacatacttgtaaaattgtataacagaaacatgaaaacgaagggcttcttggtcgtctatgtcagaaagtaatttgatctctttgggtgttggcttagccggagccaccagttggggttctgaccttcggaccttgaacactaaggccatctatataattatgtaatattgggtatgtaagaaattcaaatacaacttaattagtactgtatatatagaagtgagaagagcatagaagagaaaggagattgcataataattatataataattatagaggcagacattacaactaatttaaaaacatcataatc

SEQ ID NO: 84497 - DNA, 880 bp, Cannabis sativa
aatcaaatcaaataaaaaaaattacatcatcacagttaaccttaatacctatattctgtttcatccaccgtccaaaagacacaacagtaaaaactgttgcagtaggttcaacctcgtagcttgagcactcaactattatgtaagctacgtaactgtactactaacaaaccttttagtcaaaaaaaatttgttattcccaaccactaacaaagatttaatagcaaatcattgaagaacaaaaaagaaccaacaacaaaaccatgtcacacagacaaaactaaaacactcaaaatcatgtcacaaagacaaaactaatcacgataacaaaaattaaatggcaacaacaaaacataaccctgactaagcagcacttaaacccaaggaaagctggcaggcctgaccagagaataaaaataaccttcactagctatagatttaagaaggagaaacctattttttttttcattagaatctttacaaaactttttatttctaagtcgtccaatattagcgatatttcttaaaagttatttaattgatttatattggactcaatacttaattgcaccgatatcaatataacacctaaaagagcgctaaacactagcgccactggtaccttcaaacattaatctaattaaagacacctcaccatttattactatcaggcccgaccttgggtataggcggactaagcctgtacttaggacccacttagcccaggggcccaaatttttttttcccttttaaaattgtatatatttttttaccgactttaaaaaaataccatacattagaaaataatttttttttcctgtgacccactttgttttagggccggccctgactactactataaataaaaatatattagaaaatt

SEQ ID NO: 84498 - DNA, 536 bp, Cannabis sativa
aatcaaaacatgttttgtataagtttatatttttttttttgaataaaatttgattttattaataaatcaaaccaaatcattcaacataataaataatttaattaaaaggaaaaaaaaataatcaccacatgtattgtatatgaacaacctcaacataataaactaagagtgtgaaatgagaactttttggtaattcaaaatttagaagcccaaaaatattgcctcttttatagaggttataaattatagataactctacctcctagtaattttcttatgtaagtctagtaactattgattatttagtttatttaatttctatactttatgatcattatttagtaactattgattttattaatatattagtaagtaaataaaggcaaacattaataaatatattgagtctaccttaaccaaacagaaggcatggtgaccagggccggccctgaaaatatatgggcccaagacgaaaaaatatcaaaaaatgagtgttatgggatttgaactcatgaccttgaacattatggcttcca

SEQ ID NO: 84499 - DNA, 993 bp, Cannabis sativa
  modified_base (943)..(944): a, c, t, g, unknown or other
aataataataaatatttatttatttattataaatcaattaatatgatagtaaatatatagattttaataattatagcttagtatttaatttattaatgtaaagaatgtaaaaatatgaagcattaactcgaactcatataatatatattacgggttagttggttgtttaagaagaaaagatcggcactaattcgagtatggtacaaaaaatattaaatttggcctgcggatcatatcgtcataccttataaaattattggtacgatacaatacaattcatatttttttcatcattatggcacaacacaacttatatttgtgcatgcttttaaaatacgaaccaaaccaacacaatagacaatacccacctaattttctgcaacaaaacctcttctatttcttttctctctgaaagttcactttgattcgaataagttcccaacctagaaaaattacggtaattgtctccaagttcgagattcttgtaagcctattagtcctcattttaacagatccgttagttgctctaaaaaatgtcacatactaatattaaattgtagcataagtcccttaaaaattcactttaatagagataagtccccaaaatattcactttgatggagataaattcctaaaaagtttactttgatgcagacaagccttcaatctcgaaagatcgcggtaataatctccaagctcgagattctcgttagtctataagtacccaatttaacaagttcacttgttgcttccaaaaatgtaaagtgttgatattttattggttcaaatcatatttttaattaaaaataattttaaaaactaattaatcaacatttgttgttttatctttcctaattccttttttttcttcttctcgttcacttccagtcccgatttgctctacccgccaccaaaacccaccacccaccactacccacatctnnttttctctatagcatactccctccatatctctcggtttcttagaaacta

SEQ ID NO: 84500 - DNA, 1292 bp, Cannabis sativa
tatagaatcgttgatacctctgtgtaagcagatttgatcaatgagaagttgttgttgatgaattcacctctgttgatgtttcttttttgtctctgtgatgctgattattagagtgggtaagttctttattgattttttattgaaatgttattgaatgtttgtttcagcaagctttgtcaagcatcaatggttgctctgtttttcttttttttttttttcagtcggacgagaatgttaaggtattgaagaagctgaaaccgtatttgatgtaatttagtttaaacttaccgtatataagttgtatttagggtgtaatcgtatttttgttatttttgtcctattttagtgcatttgtgaaaatttccctatttgtaaacaataataagttttgctggaagagtcgacagagaagtcaccagaaaatctatcggcgctggaaaagtcgccgaagaagtcgtcggaaaagtcaccgccaccggaaaagtcatcgttgtcggaaaaatcaccgtcgccggaaaaagttactgaaaaagtcaccagaagtcgatgtctcaaatataaacaaaaatagaaccggttataattgaaatataaccagttctgtaacacaaagaataaaaataagtaaaacaaaataactcaaactaattataattaaattataaccagttatataacataatgaatataaatgagtaacacacaataattcaaactgattacaattaaaaaataaaggagaaatcagttcctaaaacactgaaacataaattataaacaaaactagttctacaataaaaaaacctcataacacataatacctcataaaaccgattataatttttttaaaaaaaattgagggataaatatgaaaagaatcttttccataacaaaataaataaacacaaataataactcaaatataatataaagaaactgtttatatttatcaactagttaaaaatttaagataagaaaactgattccgtgaagcaactaagataaaaactcacacacaaaaaccagttaaataaaatagcttaaataaaaacatccattcaacatgctccaacccaccaaataattacactcataccatatctacctcaaaaatactcattcattatgtctatataaccggtttgagttattatatgtttttattaattataacattgttataaaactgtttcacgataacactgttatagaaccagttctattttaattataactggtttaagttattttgtgttatttatttttattcattatgttacagaaccggttat

SEQ ID NO: 84501 - DNA, 664 bp, Cannabis sativa
tccctttggaagtcggttcttttgaaaaaatattgtcgacactctgatttccttactacggagattccggcatcggcttccctagtggcgagaggcatttgggcaaccaaagacttcattgcggataactctgtttgggcaattgggaaaaattctcaggttaatctctggagtggattatggtcgagtaaagatggagtcttttgtgatagtggagatcttaatccgatgtgtaaagttgatatcactgctggggatcttatgctgaactctggggagggatgggatcataatcagcttgtcatttggcttagacctgaggcgattaatcgtttggagggggtggattttggcactttactgaatgaggacaaattgcattggaaatcttctcctgatggttcctttagtattaagagggcttattgggacctcaatcggtcgcgattctttgagaaagatgctattggtagtcgaatttggaagttgaagatgcatgaaagagtgaaacttttcctctggaagttgtaccagaattctctcccttttggttgcaaatttagagagatatttggttctcatcctggcctttgtatgttatgtggggaaagtgagggagacaccgtgagccattttgttaccaattgtgctatttctagacaat

SEQ ID NO: 84502 - DNA, 666 bp, Cannabis sativa
  modified_base (111)..(112): a, c, t, g, unknown or other
catcggaccacacatcggacattgtcggaccacatcggacccaatatcagatcctatatcggacccatcggacccccattggacctcccccccatcagacctacgtctccnncctcgcaaactcacagtttcattcgactccattgaaccccatcggaccttgccagggccggccctgaaacaaagtaggccatagggaaagaaaatttttttatataattattttaaataccaaaacaattaaaaatacattggtacatctcttttatataattttccattattattaactataatatacatatgtaatatatttaattaaaattatatttatataatattaaataaaattaaaaggatgaaacgatggctgtccagccaaactagattggctcatgttttatatatatatatgtgtgaatattttgtatatacagttattaattaatacagatgtatatttaaaaaaacctagttaattagttaatattggagtacacctagctcataatattatagaacaataggccagcctgacgatattggaccatactagtgagtgttcttcgattattagtaattatatatatataaacaataattatatacgtatatagttcgatgtgtatatataggttaatagttataatgtatccaaatatattg

SEQ ID NO: 84503 - DNA, 1322 bp, Cannabis sativa
agacccaaaatgcttgttacgtgggtaagagagaagatttatgcaagtggtcagctaagtaaagagtgtattgatgaaattgtagaccccatgatggaaggcaattataacttaagagaagtggaaattttgatcgaagtggctcttagatgtgtcgaggaagacaaagatgtgagacccactatgagccaagttgttgagatgcttctaagcaatgaaaagcataagtgattatatatgtatttatattaattaacatcattaaataagtaagcattaggttcacaagtctggatttttcttgctttgtattatcctctcatatgtttggatttgtgattcatgctaaattatgattatcaatatctatatctatatttatatatatatatatataatcctgttgttaggtttgatgacatgacggtctctataagatttcttataatttttttgctctttcttataattttcttgctctttcattttttctaattttttttagactttggttaatttctttctatttaatatcaatcaatttatatgtattaatataaaaaaactgataagaataataacatatataaaaacatttcttttctttcttttcttacattaatatcatatatcatttttaaacttataattgtaagttaatccatctatatttattaatataaaaaactgataagtgtaataacatatataatatatttcttctcattatttaaacatataagtgtaggttatagaaaccaactaccaataatctatatctatttattttatattattgttaaaaaacggatataagagtaataacatacatatataaatacattttttttcttacaattagtatcatttaaacctattattgtaggttattgaaaccaactaataaataaataaattattttgtaactgctggtagtttaggatgtatatgtgactcttcctaatatttatgtaacctttcctctcccctctctataaatttactatatgtacgtattaattgtgtgcaatttagaagttagacttaataattttataattataatatcaatcattctttctacatatatcttaataaaattgtacaaacacaatggataatcattctctctataaatatatataagagaaacttaagaatatgatgtggcattttttcattccaatattctattttctctaaattataatttttttctaattttttatttaatatttacaaacaacaattaattaaaagataatagaattttaataggcaaataattttaattttgaatttttaaagattaatgataata

SEQ ID NO: 84504 - DNA, 638 bp, Cannabis sativa
  modified_base (567)..(573): a, c, t, g, unknown or other
ctcgatcgatgccctcaatgccattctcaatctttacaacagagcaacaggccaattgtttaatagagaaaaatcctctattcttttctcccctaacacctctgttgaatcccagctacaattttgtcaatctttacaacttcatggggagggttttattagcaaatacctcggcgttcctcattgtgttggcagggtcaccaattcctttttccattacctcctccaaagggtttcctctagattaaattcttggaatgacaagttcttctctcgtgctggcaaggaaactttaattaaggctgtggtccaagccattccttcatttgctatgtcctgttttagagtgcctaaatcgatctgtcaaaaaattcaaagttctatagccagattttggtggggttctcagggcactaaaaaggtccattggaaaaattgggatgacatctctgtctctaagttttttgggggtttgggatttcgtattttgtcttttcataaccaagctcttttagcaaaacaagcttggagagtttggaatgatagtgtaacgccctaaataattannnnnnntacccaaaatgcttatggaatcctaatcccctaattcgggattactaatcaaaaatagcgcagaa

SEQ ID NO: 84505 - DNA, 728 bp, Cannabis sativa
tttgaaatgtataagtttagggaacaattttccccattagtatgcataataatcaaatttcccttttgaaagaagagggttggaggcttttttatagggtaagaaaatctgaattcgagtttcatttaggtagggttttataggaaaaagtataggtttgaaaagactaaaataaccttgggatcgatacctgctgcgaaccggttaactggttcgttaggtatgcaggaaccggtcagcaagcaattttcccaaaaatggcttcaaaatgtgtttcatccaaccatttgaccccaaatcttttctaacatcttaaatatgacaaaataaaaattctcaaacaagaaaataagaaaattgttaaaaattgacgatttacagtaagcttttcaaaaattgccaagaaaacctcaccgaaaatgagttttaagcaacgaaaatgaaaaattcattttcagtagtttaatgatgtaaaatgtgaggtgtacaaacttacggaatcgaaaaatattgaaatatgagaaagtgtgtcaaaaaacactcttttatgcctaaaaacctataaaatcaacaagtagcgtaccaaaaaaaatttcaatgcgtatttcgttataaaagttacgatttcataattgtagatcatgttctcagccatccacattattagattcccaaaacaaaatttgtaagaatcatcttctctgaaaaattttaacaagtgaatcaaa

SEQ ID NO: 84506 - DNA, 705 bp, Cannabis sativa
atattattctaatttatgtacgtatttataaaaggggttttttcaatattatacttaaaattgattttatttataaaaatacctttaggaaaattatttgcacaaataccgatatgccacgtcagcataaataccgaaatataaaataattaccgaaaatagaaaaaaaatgaaaaatctcgcttcctgaagtttcagtgttttgcaaatttttaaaaaagcaaccttttggttgctttcgctataaataatatatcaattagttacctttttattaaaaaaaattaattcaagatatttttttctcatacacatttggttgcttattttgttcaggcaacttaaaatgaatatatataataatttttatattgtaactaattttattatgtttaagatactatttggtaactttataagtttttgtattaacatattaaattttttttattaaataaatttattattagtatactatatcgtaacttttaaatacaaagtaacagaagactttattaagttatgatgttacttgatatgttaaagtttattaaatttaatattttattactatttgttacaaaatataaaaaaggaataaaaaaaaattcttttaatacaaatcgtctattttcggagtcagtaaaaagtaagagagatatctaaatgttagaggaaaaaaaaaattaagagaaataataaatt

SEQ ID NO: 84507 - DNA, 779 bp, Cannabis sativa
ccccacccaccaccggttctggatccgacgagacgcaccagccggtcacccacatcgatgagatgcacagcccccaccagccaccagccacacgagacgcacaccccctccctctccctcattatctttttcttctccgtcattctctttctttctctctgattctataccaaccggtgtgccctttcctccattgtcgttcataatgtcgcagtctagcaactcagtcaatagtggtagaaggtataaggaagagattcaatggagtagacccatctgtggttatgggtttgaatctgtatccgcacttcaagaactgttgataatccaaacagaaagttctatggctgcccaaattacaaggttagagttttttagtttttttatttttcaatattgatattcaagttctgaaatttattcttgaaatccatgaattaaaaaagattatttggttttgaacaaagttctatggctgcccaaagattatttattttccaatagattatttggtatcgttgaagaatactgtggtggtggtgtgggaattattaacaatcatttttagtcaatcattatgtccagtggtggtggtgtgggaatagaccataaggctccaggtactcattaagctccatccatccaataccagcttcaacaacaacatccatgtcctggacatgtaatgctttaactttccacagtttgaataataaaggcaatataagcagaataacaataaaaactattcagaaaatacaagtacaactagacaacct

SEQ ID NO: 84508 - DNA, 1032 bp, Cannabis sativa
  modified_base (317)..(318): a, c, t, g, unknown or other
  modified_base (486)..(487): a, c, t, g, unknown or other
tgaatttttcactaagatatgacttaattgttaagaaataggattttagtgtttatttgttaattaagagactttgtagagtctaattaatatataaatgattttttttataaataatttcaatcattaaagaaatagtttttgcatttataggattagaattgcaaaatatggaatttatgaaataatagataaatagttgagaaaaatagcaaaaatataagtagtgttgggtccaatatgtggtcggccactatgctcctatttttgctattattttattattttttattccatataattcaatcctaaccctnngtgaattagtataaaaagaaaagtatagtctcattatccatatgttaatgcagattttcgttaactaaaattgaacctcatgatattgatttcacacagaaaaaataaatgttgtagaaaaataatatatgaacacagggttttttacgtgattttgcagttaaaatnntgcatagtccacgagtcaatctaattcagatttctgagtatttttcagggcctctttcttatgagttttttcgtcccttttttgatcttctttgtcactatttataattacatagtggacattgaattacaaagttcaccaaaataattttacagcactcatccctaaaattgtgagatttgattacataccacgtagtgtaaatgcggttgatgatttgaaaaccgtataattgtgattttcccacttttactgggccaaaactatcatgtattaaacacgtctttaattgttgaatctggagatgtctcaataaaaacttgattatagtgatcccagtagcgagctagggccattcttcctttcggggtctacaatgtatgtcttgtgtcgatcgcggttatttacaaagaattcttctgactcgcctgggttgtaagtctcgctcctgttagatgggtgaagttgtaggaagtcttcccatagccagatggtcacctcccttacttgttctttgagccgatccgatttttacacttagtttg

SEQ ID NO: 84509 - DNA, 612 bp, Cannabis sativa
tattgtgtcaaggattgaggtgtcaaggtctggaggaaaattaaaatatcgaaagtatttgggatggtttggatccttaaaaggatcaatggcaataatcctgtaagcacgtttggtgatcaagtcattctctgtctctagccaatgtaccattccattacatgaaatgtaattttcatcatccaactttttcccaattaagaagaagttcgatctactccattttctagtatgaaaacaaaaggtcatagttgtatattcttctttactacttcttcttcttcttcttccttccttgttcttattataccataatacaatgaccttgtaccttctcacactccttgtactattcctgaccaatccactacttccctcaagtgctagagaccttttacattcttgtgatgttaagggaaatattgggaactgaatccattgtctagtgagtggattacatataagaaaatgtgtatgtttcttactactacagaaaagtaacaacaaatcatctaaagatgacagcaaaaacaatttgtgtggtggtaagaagttgaggtaataattagctttccacgctgtcgagggtgaaacaaggaaattgatgagatt

SEQ ID NO: 84510 - DNA, 1384 bp, Cannabis sativa
ctactacaagggaggtggatggccaagcaggtagactgggcttcctgattcgaattacatgttcaacgggcctgtgctcggcaggaagcttcttcctccttttgagcggagtcgcctgctcctcttcaacctcgtcttcttgcttagaatgctcctgagcatactgcttttcccccgcacctcccttcaagttagcctcacgcttgagttgaataagttcatcctcctgatgagctccctcaacccagccagcaccagatttcctctttgtctccttcccaggctgaggtatgaaatcctttaggtagagcccgtactccacaaaattgtcctcggaggttaacaaactgatattatgggcagcacccggcaactgagtaagcctctgagctctatgcctgagagcaagtgtgaagagtgggcggtgatatatagggatctattggaaccgagtgtagtggtgcccatgctagccaccatgaaatactcgtcaacaaagtgcccaatttttactaacgggcttgtccccagtgcccgtcaaccacttgtagtctgactgagaaaaatagaagtaccgcgacttgccttatttgggagtagacttcaagtcaaaaaaccaactaacctcatcgggagaaggcatatctaatttctgggaggcgtagagaatgaacagggcagacagatacttgatgcccttgggagtgaattgggtcgaatagagacggaagaagttttccaccttcgtaaagtacgggtgaaaaagtagcaatgccccttgtttagcatgagcacccgaccagacacacatccccctctcagggtttgtggctcgattgttataggcgggaatgtaacagtctaactcgcccagatagccaccctggtcgagatcccgtaagcgtgcctcggtgaccttggacggagggctcacccacctggcgcccaaagtaccctgcctcctctgaggaaccgcagcagcaagctcctcaatgacgtaatctacgccctcgaccaagacgtcactgtcagcgtcaactggctccccaggctcattgtatcccccaaattttgggggtgcaacctcttcctcttcctcctcctcgaaaggactaccaggacggacatcgccctattcctctatctcctagacctcaacgtccccttcatgatctccctcctcctacacgggtggatcctgttccgcactgggcaaggtggcgtgctgagccacgttagggtcagatgcgtccactttacgcattgtctatttggtaagagccatcatcctatggctagacgggaactttgaatcaaaatgttcgtcgcttcaagagggcagactagaacaaagatgaggatgatcctcgtgcaaaagttgaag

SEQ ID NO: 84511 - DNA, 1292 bp, Cannabis sativa
  modified_base (545)..(560): a, c, t, g, unknown or other
aactttttttaaatttttttttttgcgggttcaccagttcggattcgggcgggttgctcgggttcgggtcaaacccgctcaaaatgttcagccctacttagaactacgagatcaccctaaggatgcttttagcatccaagactgacaataaaatcttattaaataagtgaaacgttttagttgtttgctttcaaattgaacagtaaaagttggagaaaagaaattagagtcgtgtagaaaagagttgagtaatttgtggcataaatatctaagtttaactcccagttgcaaataaatatctaagtttaatttttagcagtaataatacctaagttataattctagaacttttgtaggtacctgactattaattgttaagtaaattgcgatgtgacaatttctaattggtcgaagtcattaaatttttatttttttaaaaaaataattaaaatataccaataagaaaatgacatgtggataatgacataatattttaacggttaggtacctacagagttcgaaaaatataacttaggtattattannnnnnnnnnnnnnnnttaggtatttatttgcaactgggagttaaacttaagtatttatgtcgtaaattaataaaaattaataaatcaataaaaaaataaaacaataattaataattaataataaaatgataattaataaaataataaaaataaaacaataattaataattaataataataaagaatcgggcctacaatcgggtccatcggacccaacataaaaaaaaattaaaacctatacaaagtgctccatcaggcctacaatcgggtccatcggacgcaacataaaaaaattaaaacttatacaaagaatctggcccatcgggcctaaaattgggtccatcggacaccacataaaaaaataaaacctatacaaagaatcaagcccatcgggcctacaatcggggtccatcgaacccaaaataaaaaaatttaaaactatacaaagaatcgggccccatcaaacacacaatcgggctaatcggacccaacataaaaaaatttaaaattaaacaaagaaatcggacccataatcgggcctatcggaccttctcaaaaatattaaaatcaaaacacaagaaatcaggcccattggaccccaacccattttttgaaaaacaacagacccgagaaagcatcgaaccaatgcatcggaaccccatcggggtcccatcaggccattgtcttccccaaaaattgatttccccaaatcgcatatctgaccctaaatcgagccctaaatctaac

SEQ ID NO: 84512 - DNA, 891 bp, Cannabis sativa
tgcattcaattactttgctagaaacgaaaaaaaaattataaaatgtgagggaaaaaatgttacatttattacgatatttataattattatagattattaacttgaaaataaggtcatttttgtaatttaagaagcccaaaacaatatttcctcttttatatatttatagattattaataattcttttttttactaataactcactacaatattaatttgaatttaatggtaattaacaaagtaaataaggataattttgtaatttaatgtaggaagcccaaaaccacattctctcttttatatagctatagattataattttgctctaccacataatcacatttaatgctattcaataaatcatatattttaaaaaatatttagtagaaatattggattattaaatgattcctggtgatgtgtgtgttcttttatacattcatgaatctgttattttattttagtgtgtttgtctcaagtttttgtgtattttttccattttatgaatcaacgcagtatatattcattcaatctttaatattcatctttacaatcttattcagcaccaatctccgcctgaccattaactaattacaaaattatagagcatcaaaagatgtaacaagttctggaactctcactactataaaaaaaactttttgcgtcggtcaacgcgtctcaccaaaatggttaattgaggcaaaaaataaagagagattttatgcttcaaagtgtgcctaaagctaaaaaataacaattagcgtcggcttataccctgacataaaaagtataaccgagataaaaggtaaccatttaaaaaaaattatcttttgcattttgcatgagtagaaaattgaagccaatcttttttgcttcgattaaaaattgagg

SEQ ID NO: 84513 - DNA, 786 bp, Cannabis sativa
  modified_base (679)..(685): a, c, t, g, unknown or other
taatattaattattgtcgtaatcgtacttataataaccaatattaatataatatagggatatgattttgtcctgtgatttccgtgatgtacggacgccgtcaaataattagggacttatttgatctgaccgctgacattgatctaggggtaattagggttaaaaagtagaaacgtaccttgacactcatttaatataccccggaactcatctaatgtaccacaaaatacattccgtaaaagtatatcacgagacaaaatcgtgtcccatataatataatatctacaaacttttccaagttaaatgaattgagacaaatttacaataaattgaggagtagtagtattagattttgactccttttattaaaataattaaaagtaattgtaattaataacgaatatccttttcaattatagcaataggagaagcaaattcactaagctgcaatcaaccattaaaatgagatgcaagtactactacaaaaatagctttagtgattcattttaagagattctctaaatttttagtgactattcactgtgaattactaatgtgaatgaatgtacagtagaacctttatttaagaatactctattcaagaataacctctagtttgttataaaaaaatcaagtctcaattcgggccagttatatataaataagaataacctctaaannnnnnntagttatacattttctaagtcccgaactaacaaagtatacctctacataagaataattacatcttaataaaatatatacatatattttgtaaatttattta

SEQ ID NO: 84514 - DNA, 719 bp, Cannabis sativa
ggaaatatgtggtggagccgtcgcgtttgtggtggtcgagcactcttgttcaaatctccctattcagaaatagagacaactatgatccgtcgtcataaaccccaaacgccgatttcgtttcactgcgaatctctccaagcgtttcgaagtcgctgctatgcgccagaccaatcaaaagacgtgcctcgaccgtgttccgatggtgtcggtgaatcctgaagctcccatcatcgatgacgacaaactgaagcccaagctctgtgcagttgtcggcagtttcatggtcgtttaggttcgtcgtcggttgccatcggtggttgcgcatatgaatagtggctgaagtggtagtccgtttttcatgcgtggacgacttggcgctcccttattttttgtaactgctttattattcttattattattattattattattataattattagttaactaaatgtcttccttttattttaactaatcctaatataattatttttctattttcttcaaattttttaaattaaatatttttttttttccaaaataaaatatatttttgtaacgatttttttttacttcaatagtataagaaatattgtcttaatttctacacataatgttaattttaatatcataactattaagttatattttaaattgttttatttttcttataatattacttcttaacaattttttttttcaccatatttcattttatt

SEQ ID NO: 84515 - DNA, 1097 bp, Cannabis sativa
acttggctaagaactgggtacttctcgatgtttttgtagtaatcggcaatgaaatcaatgaccatgtggccttggcgccggaactcctcagggtccagcgggttatcattgcttgagccaccagctatgtttaaaagagcgttgttttggggaaactcaaagtcgccgaggctacccatttgaatgagtaatgaatatgtattacttgtttctttgattggaattagaattatatatataactagagatgtagttgagttttctttctgtctaaaactttgtttcgtgtgtgagagagagagagagcaatattggaatgagtaatagtggttgtggtctggtgggtttggatgcaagaaatggattgtaatgtgagtatatttatacttgggaataggcatatgggcatgggatgggatcatagtatgggtatgggaggaagtttcgttcacttttcgatggagagagttaattagagtagagttggtgaagtagcggagatttgaccaaagactgggtgactgttgaaacttctctaccactgaacaaaatacttgctgattaaagtgttattttgtgaaaagaaatgtgcaaaagctgacttggactccttttcaaaaaaaaaaaaagctgacttggactgttacttttaatattgactcctctatgtacgtatatgtagatattagcatttagtggtttggtttggagcaatataataatgctacaaaaatggccaatcatatacgcatatgttgcacatgcgaagtgaaattattctttttcttttattaaacaggtgggtgagaaataattagtgttaaataacattcaattatttagtatagctatttcttttaaaacatgtgctgtaagaaagtaatcatctatataaatattatgctaattaagggaaagagtgtgttaaatgtttgtgtacaattaaagtcttacattgtttagaaatgaaaaaaaaaaaaatcacaaatatataaagattattaatatctccattattatgatatgagacttttttaaaagatctccacaaataaatccgggatgacttaatatcataaatagtactgtctgagttt

SEQ ID NO: 84516 - DNA, 1297 bp, Cannabis sativa
  modified_base (27)..(49): a, c, t, g, unknown or other
  modified_base (769)..(784): a, c, t, g, unknown or other
  modified_base (834)..(848): a, c, t, g, unknown or other
gcacttagtgcggattggatgttgttnnnnnnnnnnnnnnnnnnnnnnntcggatgaacacccctactcataccttctccggggagcacgtttcttgttgatccttttgattaagaagacttagtcgaattatctcaaagtcttaccccttaaatccacgtgtcatagttgcgttggtccacgtattttggacaaaattaagggcaacagttaaaattattgactttcgtttaattttagtgagtaaagtctaacatgaatcaaaatttaaaatacatgatttggtatgtgaaaaaatttgaggggagtgagattttgtagatattaaagtttggagaacataattttatatatgggtaatcatcgagtaaataaaattgaataaaatttgacaaaaatacttaaatttaataattttaatagttcagattaatttttaacggctagaaaattttataaacgtaatttaatatatgttaaaatttaagtgctaaaaatcttaattagctatttattacaagtaatattatttagggcacttaacgtatttttatttttattgggagtaatttgcggcataacttctttaagtgatcaagtttttacaactaacccccaattctaaaaattataaaaaaaaaaacccgaattctaaaattttggtgtaaaacctcctaaactcaagttatgttagcacttagccctttccatccatttttgactgttaactgccatggtggaatgtctacgtgtacacagtgtacacgtnnnnnnnnnnnnnnnntccacgtaaataaatatttaaaaactaaaaaaaattaattattttaaaannnnnnnnnnnnnnntaaaaaaatttctttttctttaaaaattacaaaattaaaaattaaaaaacctcctcctcctcctcctcctccttgttgttgcaagagtaacagctatgcaaaagttactcaaacattacaatattaacctatgcaataaaaatgtgaagactaaagagaaatggaagagcaatttagtgaacataaatacatggcaatacagaaaccccatcgattttttcctcagtataggtccagggtctatttgcagtggattcagagttagcttccaaggaaggtaacctgagattgacgaaatcgaagctgtcctagagaagaagtcgataatggcttaaccctcaactcctaaagctgatctctgttcatgcataaactccttgaccatctgcatctgtaaggaccgaattatccaacgttttgtgctatgagattattggttggagtaagta

SEQ ID NO: 84517 - DNA, 530 bp, Cannabis sativa
  modified_base (63)..(70): a, c, t, g, unknown or other
taatttttttttatttttttatttcgggcccccggaaagtgtgggccctaggcacgggcctannnnnnnnatgcctagggccggccctggttgtactatggagaaaaacagcggtagttgtgctgtgagaaaaaataactgtagctgaacttgtgagaaaaaataactgtcgctgaattgtgaaaaaaaaaactgaacggagtgtttggtaaatttaaaactttaaagttaagttattaagattctattataataataataattatgttataatctaattcattattatcataaatatttaaaaaaaaaaattatgttatataaaatttttatattctatatattttttaattatttttttatagtagaaaattatatgtattcaaaaaaaattataatatttttaaattatatttttatcacttgtaaaaaaattacaatttataaaaatatctaagttgatgtagtttattaatttaaaatataaaatattttttaaaacaaaataaaaaataagagatttaaatatt

SEQ ID NO: 84518 - DNA, 817 bp, Cannabis sativa
  modified_base (388)..(392): a, c, t, g, unknown or other
tttaaattaagatatttaaaaaattataataactttttcaaaacatattaattaataatgaaagaacaaataatgaattttctctaatgtgtcttaaaaatgtttaaaatttgaatgaaattcagatataaatttgagaaatacaatagtgacagctacaagtgaactacggtaatgacaagagatgcgatatactgatgataacgagtgagatacggtaatgaaaataagtgagatacaatgagacaacaagtgagatacaataataacaatagttttgaatgatcgagatataaaaataatactttatagaaaataccataatttttttctataccaccttatttatttatttttataaaaataatttcttttaacaaaataattnnnnntactacatataataaattttaaatttcttaataaataattctaaataataattaataagattgtgcatttagtttttaataaataaattatttataataatataaaataaaataaaataatatatttataattttactatttattagaattatatttttaaataattattattataatactaaaaaaaattaaattagttgagcgattatattacttaatttatatattatattatataatttgaggctcaaactcctaaccattaacatacactcttctatgctcaagtagtttaaaaaaatttattgtctagtttttaggagacatttatctcctatgagtgttattttaatgttgggattcatgttttgacttagcataaatgataaattttcttatgtggaagaagtttatgtattaacct

SEQ ID NO: 84519 - DNA, 770 bp, Cannabis sativa
atgttatagttcaacctcatcgttcagattattgaattctttttacttattttaactagataactaaatcacgtttcttctcgctatttcctgtctttggaaaaacaaaagtacaaaaaagaaaaagcaataataaacaatcatgttcttaacacaataacaacacagaagacaattgttgcaactagtaaacagatgaagaatgggatacaacttatttttgtaatgcgatagttataatgatcactggatgtattgtgctgattttaaactataaatagagttgtaagaagttaaaatattcgagtttttcgactgacttgacatgaagatttaaaaagaaaaaaaccgacattaatatctgaatactttcacttataattgtgtgggtttgtttcgatgcaggattcgattacaatcgatgaggatctcttagcaaacagtgctaggtcactggagacactggtgtgtgtggggatgaagttaggtgtagcaaagaactcttccaacgttgaactcccaaacttggaaacttttgccataaattagatcgacttgttctcattttctatttagttcatatatggcctcccgttttttgtataataaaatggctaaaacctaataatatattataggttggctcctaccctccaataatttttattataattagggtatttgttatgtattgtgctatacttataataacagtaatatcaataaatatcataatcaagttgtggagggcggattataaatctaaattt

SEQ ID NO: 84520 - DNA, 584 bp, Cannabis sativa
tatttagggcaatagaggataatgaccccaaaatggtttagcaataaaataaatgtcaatattttgaaaatattaagtaaatagccaaatatcacatcctaaggcattaaaattacgtatgtagcctcacttttgcgtgctatattatttttttgatctctcattattctttattaatttttttttcagttttatttttccaacaactctatctttctttttaattgagtaaaatatattatattttttaatttctatgtgaactatatccaacattgatatacaccatggtacaaaaaaataaatataccttaatgttaaatttatatagcatctcttactaagctctagcttaataggtatacaacaattataaagttatattacataattattttttcatggtgattagtttattctttttattgaaaaatatgcaaccttgtatagataaaattagagacaaaatataattctgggtaaataataaaattatttatggtatataagttttataaaaaggtatatttacttttttgtactatgatatattagtttgattaaatagtatatttgtttaacaa

SEQ ID NO: 84521 - DNA, 790 bp, Cannabis sativa
tatacatctattcaagttgttttctagaattttttattttttgataggaaaaaagttattttggagagtttcaattagtattttttaccattcaatccaattcaattgtaaaaaaaaaatagatatctaattataattagattggattggatgttaaaagttagattctaattagattgaatcagttattaaactaaataaagagtgatatttagtttatatgcatttttcttcccatttttaagttaatatttaaaaagagaattttcataaatttgaaaaaaattattggagtttactttttaatagcataaataataattgaagaaaatatgggaacaaaaagaaatcattgatcaaaatatgagaaaacaaaatatatataaatgaaattactttaaaaaaatcattgatcaaaatatgggaaaacaaaatatatataaatgaaattactttaaaaaaaaaaaatcaaaatttccccaaaccaacaaactcgaattctctctcctcgtatcactttccaaatcgcaatcttcctctacaattctctctcaacaattcaatctcaaaaccagaaatttcatcatcttttctcgtgatttctccataattgattgttgtcaatagcctctaacaaaaagttaccatcgtcaatcgtcttccccagctacggtggcttcgttaattcatgttgatcatcttcttcagcaacgactacatgcaactcaaacaatacattattgcttagctaaaaaactagaactttcaatgtgaaaaaaaaaaaaaaaaa

SEQ ID NO: 84522 - DNA, 878 bp, Cannabis sativa
gagattaaccatatttgtactcaagtgtagcaaccaaggaaaaattattgaatggtttactatggtactaaacgaaatatgaaaatctttgagagaatttgaagaatttgcaagggaaagagacaagacatctacttgtggaaatacacaattatcaaagtgtaaacttaataaggaaggagtacttgatttaatggaatgaagccaattcgtagctttgtcatttaaatttgtgttgctcaatcttaagatttttaaagaagggagataagaaagccattcaagattaatcatgatcaatttaccagattggtcaatatcaagatcaagaaactcaagtttggtgagattttgtagctgaggacttttaatagtgtcaatgatgggattatttgcaagattgagatatttgagcttagttaaagaaccaagaaacttgggaattttattgaagttgttgttactaagatctaaatacctcaaatgttgcaattcaaccaaagagtagtgatcaatttcacttcccataaaacatggctccataaaaccatcattgtctaagcaatcaaaattaagatcaagagcgataatatgataagttaagttatcacacctgattcctctccaattacaacaatcgagattattgttggctgtccaagaagagagaagattgtttgtatcaacaaggcctcctttaatggtgagaagagcttgtctctctttctctatgcaaacaccttcacacatggaaataagaacaaacacaagcaccaaaattttgatcatcatcctatattgataagagaattaaaataagtgatgcacttatattaattatatatatatactgaatgcacatatattcagcttatact

SEQ ID NO: 84523 - DNA, 2513 bp, Cannabis sativa
  modified_base (776)..(787): a, c, t, g, unknown or other
attaaaaacttagtaaaaatagtacaattacttaaaaaaaatatgaatcattataaatttcacttaaaccgtagttttgaactaaactaaaccgttcttaagggtttggtttgagaaattttttggtctggtttggtttctgaaattcaaaaaactgttatactggtttggttcaaaaactataaaaatccggaccaaaccaatccgtgaacacccctagatccaagaaaaaaaggtgatgtatggtcatttcttaaaagtttattaagtggtgtagcatcttcttcactaggcatgatggtgatcaattgtgtatcttagtcgtgtggctgctctgataccatgaaagaatagtaattagctagtctctttgtattgatatgaccatatgatatatatagaaagaatagaagacattcatacctttctaaacttacgccctctttaatagctagcctaaacacaagccttaatatcagaatattaaacagttttatattcctaaaatacatgatatgagaatatatgaaaatatataagaatatcccaataagtagaattttgagtttcttttattatatttttattataatgctatattaattttgtaatagtgtaattataataaccattacattagttttttttattgtaatgagtattaccttaaaataattttaacatattctctaaacacatttcttaattaaaatagagagagggattttgatttgtttttgcgaaacttcttacatatcaatatatcaatatatatnnnnnnnnnnnnatatatatatatataaaaagaggaaggttgaaacaaatgtgaggtggcatcacatatattttttattgtattatatattttttcttaatttttatatttttaatttgtttttatacttttagtagtgtgagatttcttttgataaagtctcacatcctttagtaactattgtgggtgttatatttctaagttatatataaatgattgaactttcacttaaattgtgccaaaattattaattttatatgggtgattaataaatttaatgttgcatacaatacatattttttacacacattgagtgatagttttatatttttatctttaaaacaaagataagtttaattttttttaatgatatgttaatttgatttaattattttatttatcatttatttaagaatttaattataattcttattttaatgacctttgaagaatattttttatatatatattacactttcggtatttctcacttgctataaataattattttaaatattaattttaaaaattatagtatatatataagtctaaataatattttttatcgtttatcattgaagaattaattagtttgatttaattattttattatgcatttgcttataaaaaaaataaatatatatatatatagatataaaagaaaatttaaacaaaggtgtataaattatttttttatgattcttaaaaaattaaaagagttattaaattatatatttatcatacttataaaaataaaaggccaaaatttattatttatacttattaattattttttattgaaatagcacattatttaagatataattttattttttcatataattttaattataatattcttaaataaatactcaaagtgtagtctataaaatcaatatcaatatataaatataaaggaaggtttaaacaaatgtgaggtggcatcacatacattttttattgtattaatttttttttcttattttttacatttttaatttgttcttatacttttagtagtgtgatttttttttaaaaaaaaagtcccacatgttttagaaactattgtgggtgttatgtttctaagttatatatagatgactgaactttgacttaaattatgccaaaattaatattattaaattttctatgggtgattaataaatttaatcttgcccaattagttgtaatttttgtgaatgataaatttacttttaagtatttttaaaataaatacaataaatattttttacacatatcagaataaatcccaaaaatacgattggatgagggtgattttttatttatttataataaaataaaaataaaataaatcccaaaaatacgattgggtgactttttatttatatacaatatattaaacccataaaaccctaacccaattccaatttggaagacgcctttattattgaatttcaccgccaatttaaaaataataaagggtactaaataccataaaacattgtcgaccagtcaacagagtgattttctcacgaggcggtggagatgtccttcatcatcttcttcgtctctgtcatatactccttcaagcttatcactccatcagaattgtgatcaaactttgcgaatagtgaactgtaaatattagcaaccacttctggatttgtcttcacatcattaccaaaatcggtctctaccgatctaagagactgaaactctttcagcatttcgatgtagcaaagaacgccatcttggt

SEQ ID NO: 84524 - DNA, 1087 bp, Cannabis sativa
tcgttttatgttgtaagcccaactatcataactgccatctcgatagttatgacagttggtcctccttagtgtttaggttgctataaatactattagactcgattttcttatacagagaaccaaatgtaattctcagcttgtaaagcttactcaaaattaataaaacaataatttttcaacttaagtttttgtggttatgcttttgattttgtggagtacttttgtgtgtgttcattagagttcttgttgtttatgtgtgtgtataaatacattttgtcattagtgtttctcagcaggtggtatcagagcttggagatcaaaaatcagattcaaatgtttaagattcttgaagatcgatctaagaagaaatgggaaataccaagttcgagattgagaagtttactgagaagaatgactttagattgtggcgtgtcaagatgagggcgctgcttgttcaacagggtctacaagttgcacttcttggtgaaagaaatctactagagggattaactccaaaagagaagacatacattcttgaaaaggctcacattgcactcattttgagtcttggagacaaagttcttagagaagtgtcaaaggaaaattcaacagctagagtatggttgaaactagagagtttgtacatgacaaagtcactggctaacaggttattcttgaagcacaaattgtattcgtttaagttgacagcagggaagaacattgaagatgatcatcttgataatttcaataaggtgatactcgatttggagaatatagggatcacaatcgaggatgaggatcaagcaatcattgtactgatttctcttcccacaaaaagctatgagatttttttggataagatcactgatatggatctgtgtgaacaatgtgtttttggaaaattaacaaagattaaatttgggattggaaagcacgcataaagtaacaaattagactacctgtactcagatttctgggggccttgaagggccttttaagaggtggagcaaggtactttctaactattatagatgattataccagatatgtgtggattcatattttctgaaaaataaaaatgatgcct

SEQ ID NO: 84525 - DNA, 977 bp, Cannabis sativa
atattaaaagtgtctatttaacggtaattcttagtttaatatttttattatttttattctgttaactttaacggaggctaacccttccgttaactattgccattcaatttaaacggacagtggattcctctttcttctccctcaaactcaaaatcaaaactattttatgcgatattcttgatcctcatttgttgcgattcttcattccttccgttgcgatttttttcctcttataaaaaaaaaagcacagaggtgcgaagaagaagatgattgtggaaaaagttggaaatgactcttctctcgtccattaccaccatccccacctctgctcttctggtttgttatcttcttcttcttcttcttcttttctcaatttctctaactcacttaattttgattatatgcttaacaacaacaacaacaatcgaagccaagaccaagtacactaattcaatacccattttcatctacaacccacttgacaactccaatcgttagttttcagagcagcaatcggttgacagcgttttgtttcaatcccactgatgaacccattctcaaagatgcattaaaggtgatttctttcttttgctaatttattggggtttttcttgtattgattgcttttatgtttggttgaaattcaaggtcttagcatcgatcaatatataggattgaaataacgtttggaactttgaggatgtgtgataattatgttgttttgctccaatttctcggtaaccaaacagattgagaaagaaactgaagataatcaatgcttttgtttaacttactctgtttttgtccaggacaatgttggtagacaggaaattgacgcaacaaattgtaagacagtgtatctaccagagtatgcaatttcttcaatttaagctctttttagtgttttgcattggtttaggaaagattactctttgttttcttgcttgatttcagttcaaatatcatgaatgaatcat

SEQ ID NO: 84526 - DNA, 618 bp, Cannabis sativa
attaaaattttatttttttttcttggattagatggatccagtctaattcaatacatattggacctaaaatattggatggatttgatccgatctaaaaaatgctagtccaaaatattgaataaattcaaattaaaccaataaatatatatgaaatacatccaacgaatagaaccgatccaatctaacattcagcggatgttggatcgattggatgactggaatcaattggatcggattggatggtaaaatctaacatccaatatataatttaatcggatgtggatagacctaaaaatattggatgtgatccaataaatacccctatgtataaacataaatttaacattcaaatacaccttgtatgaaattaatatgttaatgtaataattattcatagttgtttttaataaattattattcactagtatacagttaagagtaatataatatacactaaaaccttataataatgtgtcaattttatttccctccaattaaccatagataaatcggaacccagaattaaaaagatacattaattagtgtaatattttaatatatattttgtgtgcatgtattattacactttttatttaagtagtgaaaaagatgtaaaat

SEQ ID NO: 84527 - DNA, 785 bp, Cannabis sativa
gggtatagagtgcaatttcctctaattaaatctcataataagagttaccttacttagatttgaaaaagaaaagcccagttacttatttttttttttctatttatttaatttaactcggtaattattactctatttattttaaaaattttacactatatactgaaatttttaattttttttattttttattatagggcagaaaatattgtgtattgtgctaagttttcgcagttgttcaacgattattttttagttgttctactattgttttagttattctattttgttgttttgcatttattttataacaaaacagtatttttgtaaaaaaattcatgtgacagtaaaattaaaaacttttactaattttttttatatatttgtaaaaacccctttattttttgtttatgttttctttgtatcttttctcttcatactataacgtcttaaattcatgaataaagaaacatagataaatagagtgctcacaaaagtttttgtttattaaaaaccaacagaaactctcggcagtagaatctgatagtcttgtatgttggtattgttagaaatagttagaatattgttactagattagttgggatctgttactataatattgtaactgtttacccataatctttttcatttttttcgtattttataagagctactcatagcagtaagcagtgaattgaagcctcctctgctgatgctgatgatgttaaatgatatttgatttgtcatagtttttagagtaatgtttgtcttgatcatatttaagtata

SEQ ID NO: 84528 - DNA, 791 bp, Cannabis sativa
  modified_base (289)..(310): a, c, t, g, unknown or other
ggagcacgagaccgagagagaatcagggtaggggtttttgggtcttggggttttctgggtatagggattggttgttaatttgggtattgggggttaagggttcgttgatggctaatagagatggagagggagagttggaagatatagagaaagagagagattagaatttgaagaagaagaaaagaaaaaggaaaagtaaaaaaaatagtttttaattttttttctgattctttaaatttttaaatatttaattttttttttcttatttttttaattttttaaatatttnnnnnnnnnnnnnnnnnnnnnnattacgtggaccactaaaaatttcccacatgtacaagtgtgtacaggtgagccgtccattgtggcacttaaatgtgattttttaacggagggacagattaaaacagaatgggagtttaggtagttttgcctccaaaaaagtaatttttgtggttaagtgttaaaaactttaaagttcgcgtggtttagctgtcaatatcctataaaataataataaacgttaattaaataagatatttatcaattttaatattaaataataatatttaatatttgaataaatatctgtcaccaaaaatctattataaatatttattttaaatttaaatatttagtttaaactaaatatctaatcgattgagggcatatctcaaccacttgaaaatatctccaacaacatagatagaatctctcaactactttgagggaatatctcaaccatattaaatatttgtaaccatgttttaaatttaaatttaaat

SEQ ID NO: 84529 - DNA, 601 bp, Cannabis sativa
agtagcaaacatacaccttccccaaagctcgaggtgcaacatcatttatatcccgaccaaattcgaggtgaaggatacgattgtttcatttgggaactcaagaaaggttggaagcattacattcttattaactggacgtacatagttcatccgaacgtggtcgacgctctaccggtgggccatccaaaacctacttccacgggctaacctgctgccaattttgctgtgaccattgccaagaacacttctaataaaattcctcctaagcataggatgatggaacagactaaacaaactgttaggaaatgttccttaactgatttgcatattgcctgcctagccactctggctagggtagaaaagacccatcgtgctactgacgaggaagatactgttggggacattgaagtccaaaaagtggaggacccgggcaaggtccgccctactactctttccaatgccaaaggcaatgaggaagaaggggtagctcaggtgttgccatttcgtggctacaatgatgaaggagagccagtatttgagggaggtgatgttttggaggccggcaagggctacattattgaggagtataccgaggctcatc

SEQ ID NO: 84530 - DNA, 1135 bp, Cannabis sativa
  modified_base (98)..(99): a, c, t, g, unknown or other
ggctgcaacattcagcagctggttgttgggaattttcaccagggggcacgaagttgaaatggaggaagtggcgatggtgagttggggtatttggcgtnngcggaataactttgtttggcaaaaaaggagttggtttgcttcaaatattgtaacatcagctagaaacatgcttgatcaatacaaatttgctcaggaaatgaagggcttttcgttgtctccttttaatgatggggagcggacctgtgagcgttggattgcacctgtgttaaacaagattaaagttaatgttgatggggcttatttgaataagaggggcggtttggagtgggctgtgtagctcgagatcatcatgaaaccatggtagaagctttcaagaagagggaaaggttgggtatgtccaacacgaattttttctatatatatttttaattttacatatattttaaatatataactatatggatgcaatattgttaaattattacaacactactataaattattacttcatgataaaataataaaatgagattaaaagagcatgcaatagggctacatcaataaaaatcgttacatataatatatatattattatataggaagtgagttatatatatgtaataaagttatatatagaatctgttatgggtagctttgaagggggtttgatgaacacaacagcgatagtttgattcccttaaatcccaagtcagaaaaattcctctcaaatctgggaataagattctatacattataatatattttatacattttagctttgccagtaggacgaatattatttatgcatttatatggatgaacattataattaatatttatacatttttatctttttaattcttttttcaaaaatttcaaaatataaattgaatatgatttcggatcaattctcaaaacaattcccttgtaccaaatgctaaatattcaaggcatgagatgttgtttcaatggccattaatcaattaattattaataataattattgtacacatagtgttcattatataaaaaagtgacactattattaaatatcagtagtacttaatattgttataaggtgttattttacgggtggttagaatttttttatactattaatttatttaattaaaaa

SEQ ID NO: 84531 - DNA, 4351 bp, Cannabis sativa
gaaccatgggaacgaatctacttagaaaaaaatttcaagtatgctgcaatatgagaagaagctattcctcccagaacaaaagctattaggcagtagtggcaagcacagcagaaaggggctttcctagatgtcaggcaaggaatcctagtaattatatgcaatgattggtctaaatctatcttgaatcgtagcaaaatgatgaaccaaatgggctgtaaatacttgagagatatccccaacacttaaatcacaatgaaaataagttatacaagccaaaccacaattgattaatggaagaaaccgtagagattataatcagtaaagatttcagtactaattccgctcactttgctaactcagattttacaatgcccattgaaaatttacactttctttggaacccagattttacaagacaaagaaaaataagattttatgagaagttaagaatatattctccctccttttattgtaatttcccaagagttcttttacattaacaattttctgaagccaaacaaagcttaatgctgttgggcaatgaagtttgtccaacatcaggaatttttcttcttaaattcaggagcgaacaatatctttgcagttccaatcaactagaaaaattatcaagcgccttaggctagctaaagtagtgaaaaatctctaaaggttaatacaataaatcatatattccttggtcacaaaaacctccattcacactgctaagttactcctccaggaagaaatctactgcatttgaatgtttgcttgagatttctgttactgacagttgaaactccattcgtggaaatctaaaaaaagagaaaaggcattatgacagttgagttcaaaaacatgtataataagtattccttttcttaaatagattgtcccaatcttattctctacaaaccgttgttattgcaacaaaattgagagtattccttttcctaaacagaaacaacttcagaattatcactatcaatctctgaaaaacagagaatgtaagaaaatcctaagattggggaaacttaatatcctaatcccacagactgctaaatcaaatcttcaacaaagattctccataattcacgaaagagaacaagcgaaaccctgctattaataggatgccacttcaggtggctcttaatcaacatatctttaacattgaagaggacagtagggcacacattacaatattttctagggagtggaagagaataaacttaaggaatactcctttaacttactcttatgggatcgaaaatgtagcaagtggagatcccacattggtgaagtacgttgaaagatcaacatccaagtcatcatacatgctgacgaaaggatgcatctgaattttgcatttaaaataagcagaagagatgtcagatccatgtatcctcatagcacgaatctagttaacttttacactcattgatctaaatattgtatacattgcaaatataattaaactttgtacataccaatagctgatgcgctgactgtctatccttagcatctttctttacactgagatagaaaattaccaattggtaattagtaaattcacaaaacctacacgaaactggagcaaaaaaataaagaaagacagctacatttcaattgagtttcctcttggttccgtaactgttcaaacactccccatcctaaaactcaaaaatgaaaagtgagcatttaccatgcagaaataaacgagcagaactcgggagtaaattgatcagaaggtgcactaggtggtggttgactaacaatacaatccatgagctcaaaaaagtttgtccacacgtcaccttcttctggtatatatgggaaccgaccagttgcacattcaagcaacactagtccaaaactccagatgtcacttttgtaactatatttgcctccagtaattctctctggctacaaatatattgaacatatcaacagagatgcagtgagatacatatgttgggaatgcacatatgaagtttcataagtaaaaagagatggaaatgagaaaagggacattagcaaaacatatgaacaaagttactcacagacatatagttgtaggtgccgagaaaagtatttgcctgaccagaggtgctttccagtattgcactcacaccaaagtcagtgatcttaacttctcccctgtggtttatcaacaggtttgaaggttttaaatccctgtgtataatgtgtttttcatgatgaagatacaataaacccttgagcacctacaacaacgagttgaagaaagaagcctgtttcaattgattggcttgaaacaactaagattttattcacaattgatttacttaaatcctacctgtttgcaaatagcagcaagatacggctctggaattgtttttactttcttcagaaagtctgctagagatccaccatccatgtactctaagatgattgaaatggtaccattatcgtaaaaggactggtaacaaacaacaatactcgggcactgtgatgattgattaattttcaattcctgtgcaatcagcttccgagaagactcttcgatattcatttgaataacctgaataagagaaaaacatcagagaaaagtataatggctacattaatgtaaacagttacaccggattcatgacttaatgaagaatgcgtacaaaactaaaaattcaacaaaaggaatattaggattgttaatataatagacaagtccagcacaattagcttccaaaaatggttcactaaaaggctgaagttcaaactcttgaattaccatgataatatcctgaaccacgaagcctttaaaagtaaaagatatatagcataactagatagaatgctaaaatagttacccctggaccaacttaaaccaacattctctaccttcagacgtcaattcattttgtcaaatgggctcatatgctatgagactattcccccaaatcctctattacacaatctattaaaaggcaaccccagatctatgtggctgagagagcatgaattaggatacaccgtacctagagtaactctggaaattagattcaaattctgttcttcactaccattttatccagttcaagaaaattctaaaggtgaactctaccaaacaaagccgagtccaaaaatctcgtcatgacaagaagtagaacattacaatccacagataatattctcaaagtacacaaaacagggaggaaatgacgtttgagaaagaataaaaaagtataaggcaacaaaatgcaatatcaatgtttatagaatatgcagtcatatacctttagtgcaaaaaattggccagtccatttgtggcgaaccaattgcacaattcctccactcccttttccaatgacttttatagtatctacgtctgctaaactcagctgattatcggttggctgaatcggaggtggctgggaaaaaggaattaaaaaaaaaaggcatatttctttatttggagataaaataaacaaaggattcaaaagacaggagagagaagaatgcgcgatttttagctaagaaattcgtcgtgtactccattacaactccatatcacgaaaacacaagtgaaatcaaaatataatttaaagaaaaaggttaaattttcaaaattagaaaagaaatcttacgacttcaacttcgctttgagaaacaacccgaactccgtccctgtttacgagcagatctccatccataaacgttccactttcagtcctgtcatcaaaagaaaaacctaaatcagccattcaaaactcacacaccattcaaaactcacacacacacacaaactcacacacacacacatatatatatatataaatatatggagagagaattacaggaacttagcgaaagaaacttcatcgcgaggaacagtgagtttgagattaggggttaagcctcctttcttcatgtctacaggagaaaagtattagaggctatcaataatggagagagagtctttgggattgggagcgaaaatgtagaaagtgagatcatagtcaaaacagagaaacaatgaacgaacaatatcgtgtgtttatatatatatagatggatattattagatatcagataaaaaaaggaaaaagcatagatagagcagtcaccgttctttctgagctcagaaaaaagcaggaagaagaagatggtgcgaaatgttgaagtttttaccaatctttttacatatttatttgttttatttcttttagtcagcgaacatgtggtcttcttctccagtagtctatacaattaaatacaagtcgccccgggcccattaccttaattattaataattaattaatatcggcaagtacctgacaaatcaaaaacaggtatggtaagaagaatatgcaactat

SEQ ID NO: 84532 - DNA, 939 bp, Cannabis sativa
atctgagacatctacttctggtgaattttttggcgacaatgatttttctaatgactttttcggtgatttttctagaaacaataactttttcggtgacttttctgacgaaacttattatggtttaacaaatataggatttccatatttttgtaaaaatatggcataaaaaagtccatataaatgtaaaaaaaaaaaataataaaaaaaaaacctgtaatatttatttatgctatataaaaaaaataaactcttataatttttccatatatcgtgtaatttctacgtaaatatatctggaaattacataacttatggattttttttcaaggaacttataaaaatattataaaatgagagaaaatttataaaaataatgtgatacgaagttttttacatttttattgtaccaactttacaaaaatactgtgtttaaagttttaaaattattaaaatactgtatttcagtaaaataaaaaaaaattaaccaaaaaacaaccctagaacaacttaacaaacaactatacaacaacaaaaatataactataaaataacagaaaaatgacaaaatattgacctaattacaataagcaaaataatatcaactcctcaatgtgtttttgtattacgaatttttttttacttagttttgacaacttgatttatctgtttgtactaaaacattattttttttcatgtaatttgttgttacaactttattatttcaatttttttttccttttttccttttttttaggataatggaatatatatgagtactgcaatattaggcagagtactgccggcttcataatcccacccatcatgagaggaatcaaaccccattttctctctcttttgaagagatttttctgtaactgaagagtatggaagtccatgttatttcatgacctaccattgattcgtccttagtgatccctt

SEQ ID NO: 84533 - DNA, 1911 bp, Cannabis sativa
ctgctttgcaattccttgtattttctgtatttcgttttgactgtttttgtttgttttattcttttctgttttttttcttctctgtctcttgtttaaatggctttcctccgccttaagtgagggcattaatctatggcagagggtgatcagtctttgactttgatctctcctctttttttcaaaaaaaaaattaataaaaattatgtaaactaaaatttaccagtttaaggacatcatcagatgcagtggcaattggagccgccacagccacgacagaagaagcatgattagccgagctttccccgtttgaaaacgcaccagtagacaagctgtccacagcccaggtttcaacgagagcagatgcactggcagccgaagaagcagaggagctgcccgctgctgcagcagctggtgtacccacacgtttctttgcctcaattccatcgaagtagcgatgcttaagtgcctcagcagccataattctttctgttggattcagacacagcagtttctgcataccaaaaattaaagaataataaaaatacataaaacttcagattttaataagcatatactttcataacacataatagcaaaactcacagaaagaagatcaactccagctggttcaacactcatgaatgtttcagatagatcctgcaaaaaatgtttatatgtataattaataagatataggtttgaattgaaacaaggagaagaaacagagagaaagctgttgcagagattaatgttacctttggggaatgtttttggtactttttcagtttctcatccagatcaatcaccccaggcatagtttgtttagttggtgtgcccaaaagcctacaatataaattaacaaaataactaatcaattatactaacaaattgattaattagtcaaaaatatgttcaatggtaagttgtgattatacttgaaaatgctgcctagttcattttctgtatcgaaaactggtttcccaatcaacatttcaccaaatatgcaaccagcagagaacatatcaacagcagtagataatcgattagactccaacaaaatttcaggtgcttggtaagatggctgtacacactgcacgcatgtagcaaatcaacacttttgtctctatctaatctacatttaaaataatcaaaaaccataataatcatcaaaacattttcaattaccaaatcaagatttgtgatcagcaaattgacatgttcatcgtcattgttatcgtctccgtagttgcttatgagcacattcgtgggattgatattttcatgggaagcgttgacagagtggtaataagcaataccactaagaagttggtacattaggctctacaaaaaaaagttacccaattcagattattaggctcttattcttttttcaatccaaacaaacattaaaacaaacacaacaagaacataaaaatgtaacctttatcaactttgggcgacgggctcttatgggattatccctttggaattttctgagatccacaccaacatactcaaatccaagacgaacaaaatgatcttcagggtgagttcctatatactccaaactgaatttttttccaaattaaaatttattaataattaagtgaaattaaaaaagaaagaaagaaagaaacgaagagaaatataccgagctatattgggatggtggagaatcttatggagggaaatttgtggaattgtgttagaaggaatcccaacttcaatgggttgttcttgacgtgaatttgatgatccagtgagagggagagcttgaagtagttcgtggcagagaatattggtttcacgttgaactattttaccagtttctttatccaaatacttgaatatgggtcgtctgcttaaactcgttccaattcctaagtccagttgtttgaactgcatgcataa

SEQ ID NO: 84534 - DNA, 969 bp, Cannabis sativa
actctaacatcacaatttacttttatccaatcctggggaggaggagtccatgtctctcgcaggatcggcgtagggttgggtaaaagagaatcatgtaactctgcaaaagaagtgcaaatattgtcaatacatttcaacacatcaggaggagtattattgtgtacattttcattgcgcatccatatagtgtcgacaacaattgaaggataaagaaagacttcttcaacccggatccccctatttctaagatcccaaataaatttcacccagtcccagacacgaataccagcatcacaaacaaggtagattcctcaaggtgaagatcgccacaaatgtaacgccacctcacacgagaggaataagtgttcaatagattcttctctcaaaccacacaaaggacaactagaatcttcgatttgaaaacgtctaccaatttcgactctaacagggagcgcattagataggatacaccaccaaagaaccttataaaaggctctatagaacagaaactaataccgatgagatggctttttattttcgctctaatacatcttttctttttccttaaagaattttattgattatttaatttctattttataatgtatactgaagattattttgtaccaagaatttcatagtttgtttgtgtcaattgtgatttgttttatatcttgtgtagtagtatgtttatgtgtccagtttaattaccttgtttggtaccatatttagtggtttgctatacgtagtggtttattttagatttatactaagaatgacgtgaggtagcagtgacaagctatccgttaggtatgtcaaaatgatccattcaattagatcgggtcggagtttcgatccgacagatctgaaatatttgaatacttattgaatctcggatcatatttgctcagccctgcctaactttttctggatcgatccgatccggtttcaatatataattatataaaa

SEQ ID NO: 84535 - DNA, 995 bp, Cannabis sativa
tttaatattttttcatttaatataaaatatatattcctatttcgtacttacttttttttcaattttttttttttttgaatttatattcttaaaaaatgtatacatgaaataaaaagataatatattttaaatattacgataaaaaagttcaaataaaaaagagaatatacttatttagtaccttgtgttttcatgaaaaatatatttagtattctgtgtttttaataatacttaagtgatacctcatatttttaaattgtacatatttagtaccctaaagtaaaatttaatcaatacaattttattaaccaaatagatctcagttatatatgtaatcaaataattaaatttaaattcaaaattcataaaattttaaacactttgatttgtattgattaaatttattcaaaaaaaattaaataagcattattgaaaacacaaagtacctaatttgtatttagataaaatacaggatatcaaatgtgtaaacagtcaataaacaattatatgaaattttattagaaagaaatttaaaaagaaaattatacatgagttaaaaaatatataaaataaattaaaataactattgaaattaacaaaaaattatgtaaaaaaatcaaattagaagatgttaagagtgattttttaaaattaaaaaaaatatatatattaataaaaaaaaaaagttcatatttttgtctaattttgccttaaaaataaaaattccccatataattgacaatttgattaaaattcaccatatttttctttcctttgggaggaatcattgctttcattatttataatacacataaaaaaatgcagggcagattttcagttataaactaaaaaaatggcacaatttcaaatccaatggaaccatatcattagagatggaaatttataccgcgggcatgggtaaccgcggggatccgtccctaatggggtggggatttcccatctttatggttaatggggcggtggtgggggacaat

SEQ ID NO: 84536 - DNA, 2270 bp, Cannabis sativa
gtgacttgaatcttcctatattttcaagtgtgtgactaggtacatatatagactaattcaagcacaagctatctgccttcgcttgatcattttctctaagttatcagaaacaagccaagcctgcaaagaggcacaaagcaaaatttgcccagttaatagattaagtgttttaagaaatcagcaacagaatgttaaaaaaattcttacttgggatcaagcaccagtttctggacttctttaatagctgcactagcagcataaagttatatcttccctacctgaattaaaaagctcagtaatcagacatacatcttatccagacacaaaattaaaggcgcgtcaaaaaagaaaacataaaaaaggtagagagcatataaaaataaggcacagaaaatatcattttctgaccaccaatacttgaagttttgcttcgtgctcattcggaagacagcgaatttcttcagctaattttacagcctcccccaggctttcgggagataagaaatcaagtcctaactgaacattggactgagaaaaacacacaaaaattagtgtaggtaatcaaaagatctcagaccaagcaaacatggactggagagttaaaacataatcaaaagatctcagacaaagtaaacatagactggagagttaaaataaccttgtaagatgtgaattcctatagcatgaacaagttttgaagaactaaaaatttagtctattctaatgaaggaggctcaggcagtcaaaagtgaaattaagtttctggtataaactttcacaatcccagtaaaatgctgcatagaattttatttttaacattataaaaaccaccacatcacacccacttacctgaagatttcgtacttgaaaaggacacccagctgggacaaatacagcttgccccagatgctgttcaaacttcaaaggaccatggctcaactcctgaaacacaagccaaacattctctaccattaaaacatttaatttagaaacatcaatattctacattatcaaaaccaaacaaacagggataataaacagagccatatttgttaacaaaagaagaaccaattagattcagtttcaacagattattgtataacattttgaatcatatgtatcttaacacagttaattacttgcaatgctttcctaacatataaattgtgcaatttcaacaagataatttttaactgtcaatctttctggctcacaatcgcagccaaggattaggttaaaattatcacttctatatctccagtttattaccgaaaattatcagtagtatcagtaaagaattttattgactaattgcagaaatgataatcgcagaaagcaaaataactgtaccaaatgcggttcaattaagagtatcaaattaactaaaacataagcttgtatcgtaccaaattcttccttcagttttcgtttgagataacattgttaggtatgataaagattcaattagcttagacagatgattgttgccccattttgagaccattacagagcagtctatttatatgtaccctttgagttttgctccaattggaaaaatgcaaaaccatggctgagctgaaacagctacattggctgacgataactacatcagttatcaaccttctaatagctttcaattatttttcctttgaatatcttcaggagatttgtttatcattttcaaacttgacttcctatagcatttgaatggatatgacttgtcattcccaaattcaagaaaaatttcttcaggaattttggtatgaagaccataaggttgacagtgggaaacaaaggctcgctagcttaagcttcttcaaaataacaatgaaaatatagttgaaataatttctatatttatcattgaaaatttagaataaatacacaaatctttgtacattatttttgtactttgatctggagaacagaattttcaaagaaccgcagcctgttattaccatgtctggtgtctggcaagaactgtaaatgccacaacgtttttgtcctccaagatctgagcatttgaaaatgtaattttctcatgaaccaccacaaatccatatggcaacctcatgttcaaactttttcctttagatccctgattgtgcaactctagagatcgaacaggagtttgaccccttctttgttgagttaacagtttcaggaaaaccagacctatctgaaggggcgtgggaagaaatatcacacaacatcaccagacacctgtgcctcttcaacatcttcagttaactgaaaaaaaaaaaaaaaaa

SEQ ID NO: 84537 - DNA, 1019 bp, Cannabis sativa
  modified_base (989)..(993): a, c, t, g, unknown or other
ggttctaaattaacctttcaatagcgagaaaggcttgtcacttttctcaaacaaatctagatgttttcgtgtggaaacattcgaatatggtcgggatatcactgcaggacatgtgtcattgattaaacattgaccctaaagtgcgaggtgtccgacaaaagtgccacaaaatggaccccgcaaggtaccaagcgcttaaagaagaagtagatcggcttttggcatgtggcctcatatgggagtcattctacccaaactggttagcaaatcccgtactatagtgcccaagcccaatggctcatggcgcacatgcattgattttactgatttaacaagaaagaacttagaagaaaaaagagaacaaaactctaacgctaagtatctagaaaactctagaaagagtttggaagaacttggaaaggttcaattatttcaaaatcaagcaaatcccaagagaacaaaactctaacgttgatgccttagcaaaattggcctcgcagaacgacttggatgaactaaacttggttccagtggaaatgctaaatgagcctagtatatgtgaaaaggaagacattgagatggtaaatagcttgtacacatggatgactcctataatcaactatctactcgacggacaacttccaactgacaaaaataaggcacgaaaactcttgtatttagtgcctcgctatacaatagtagaaggcaagttgtacagaaggggatacttgatgcctctccttcggtgtgttcttcttgcagaagcaaacaagatcatcaacgaaatccacgaaggcttctgtggggatcatgcaggttggcaaagtctataaaaaaagatcattggacaaggatattactggccaactaccaacaaggaaatccatgaatttgtcaaaaaatgtgataagtgtcagagattctcagatataccttgcgtaccaccgacgaaactaagaatgatgaccttgttaggttttatgccctannnnnaactccatttcaatgtaatctatttt

SEQ ID NO: 84538 - DNA, 1010 bp, Cannabis sativa
  modified_base (976)..(980): a, c, t, g, unknown or other
cttgagactcaaattgatgccttttgaaatgcaattgaccgctgtgatttgcaagaactaaattttattggtgatagatttacttagcccaatcaacatgtgaatggcaccaatgttaaaaagcgtttggattatggattcgttaacacgccctagattacaacattcaccctgccaacagtcactcatttggaattctttggtttagaccatagggccttgaaagtatccatttcttccttgaattcttgccctcttctgatgttcaaaatacgctttagatttgaacgactatggctgcaagaagaaagttgtctccaaatcatctctcaacattggaaaaattcaaacttagatccatttgctcaaattcaactcaatctgtcatcatgtgcatctcaccttcagccttggcatcgtgaaaaatttggagaacttcctaaaaaataaaactttcccagtacaaagtggcagctttaaataattcactagacacaagcatttctcatttcgaagagcttaagtctagtgaatttattcttgatcagctattagcacaagaagaagaatatcgaaggctaagatcacgtgtttcttggctacaatcaggagactccaatactcgttactttcaccaaaaagcttccagcaaacatgcaagtaataccatccataaactactggatgaacatggcgtggagcaatctacactagatggaatttccaatgttgtttaacgctattttcaaagtatttttacatcagttggtgttaatacacatgccttacagtaggttatttccaaggtcccttgtacaatctcaacacaagtcaatcaagctctcactcgtccatacacggctgttgatgtatttgaagcgctctcttgcatgaaatctgatggtagtcctgttacgaaaattatgatcactacgcaagtgcacgcaatcaagtagtatactcacgcaagtgaggnnnnnccacagggaattggattaattattactaaa

SEQ ID NO: 84539 - DNA, 1123 bp, Cannabis sativa
  modified_base (1095)..(1095): a, c, t, g, unknown or other
aaatgacttcaagaatcaaagtgtggagctcaaagaacctctcttttgctggtagaactgtgttaatcaattcagtcctcctaaccatccatatgtattggagccaaattcttttcctacctaagaaagtgattaaagagattgagagtatttgtagaagctttctttggtcagggagaagtaatatgaatggaccaggcaatattgcttgggagcatctgtgcaagtccaaaaaagctggagggataggcttccaagacattgccaaatggaatcaagttacagttgtaaaacatgtgtgggcgattgctactaagaaggataacctatgggtaaagtgggtgcgtagtgtgtatattgaagaaggtgattggtgggggtatgaggctcccagtcatagcagctggtattggaggagagtagtgtacacaaaggatttggtgaaacaaattattcctcctcatcaatttacaacatctgagttcaaaatctctgatgtttataagctaatgatgcaagaacagatgaactttcacctcaacaagcagatttggagcaggttaaatgtaccaaaacataattttgtattatggattgttgtacaaaacaaactaaggacttgggatagactacagaaattcaacattgcaggtgatacaaactgcttgctgtgtaatattgcagtagaaagtatgtgtcatttgttctttgagtgcggtttgcacaacactgcctgtaggaattgaaaaattggctgggatggaagtcaaagaccaattcgttaccgggtgttctgaggtggattattagggaaaaacaaagcaaattcaaaaagagctgctatactgcttgtgtagctgctgcagtgtacaaaatctggtatgcaaggaataaaaaatacttgtgcaaggaggatagcgatttgaagatattagtgcatgaaatcaagtggttagtgaaatatagttcctcttactcctttttgcaccttatagactaacatatagttcctcttactggtgcaaggaggatagcgatttaaatataagttgtggtgtagtctaagagttttaaacacacccttatagactaacntatagttcctcttctttatcttaggatt

SEQ ID NO: 84540 - DNA, 3747 bp, Cannabis sativa
attcagaattgaaagtggtggtaattagttactattgggattttattatttctatgtaaaactcttcttttcgtatgtaacctcacttaattgtcaataaagagtagaaattaatttgactggcttatttacttacatgtttatttgttaataaactatatagaaattctttctcataaatatacaaaaatggcaaaaatgtttacattatttttaagaatttttgttttataaaaatatatagagggtttgttttctgttaacgttgctgccaggaaaagtaacacgatttttttatttttataataatacaaagtgttttttttttcagaataatgttattttaaataaaaatctgtaaaaatataaataaattaaaaatttcctaaaaatataataaaaaatggaatatgttattgtgtgccatgttgtgctttcataaaataaaatcaaacaaaatcaactaccataaccaagccaatgatctctctgccaaaattgccatgggaaaattacacaaacaaacctttcattcatcttttaaaaagagttgcagacaagatatggtgcttttcaaaatcgtgcctttcttttccgagcagtgtattttgtgtctgcaggtacaacattccctcttcttctcatctgttccttcttcttcaatatccattccctgcccttcccttttttcgttattctttgctttttcctcggcctatgcctgtcagaaacacatacctgctaatgaataaactaattcaggccttaaatcacgagaccaaagattgtgcggtattttcgcttagagataagtagagcaagtggtgttctgtaaaagtttaccgtttgattttcttcatctccgctactttcgtcgtcttcagagcaactctctccatccacgcctttgccgtttggaacgcttgtgttaatggatggtgggccacaagtcagaacaaggtattctttccttttcttggcactgtttttaaaatgatttttactcaaatttagcagataataagcaaaaaggaaaaaactaagtttctttaatagtttaagcttgtgtacctgtgaggaaaatcaacaaccacaccaccagcgaatccagcacgcatcgcataatttaaaattaacactcgttggtctatattttcaggatacacttgaaagactgctcttgctccccttgctaaacatctgtatagagatccaaagaatgccctgaaaaaagtatttcagccaacgattacaaaaagatttagtagctagtaccttaaacagtaaaatgagaaaccaaagagaagtaatttacacaatattaattatgataagaatgagtcaaagagaaagagcaacatactttaatcttgctcttggttcgtgtgaggatttatcagcattgcacagccactgtaattcaacacacaatcgggaaaaataagtcagactgctatagaaattgtcttgtaatacatataaataaacgtctgaacagtactaataaaaatgtatgctttgaagcttcgtgatacattccagatccaagggaaaaagagagtgagggattcatatatgatatttcatcaactagttgagcatgaaaagattcaacaggtgaagatttaactacaaaatcatatacttatcttgtagtagccattgccggtggaaaaaatatgtaataagagattcccgtgaattgtgttgctataaacacgatgataaaagcaaacaaatagagccctttccccaatttaagtaaatgaacatctaaaattattcttcaccaaatgccaccattatgataagaaaaatgaagtcgactaacaaaaaaaaactaccaggagagaaaattcagtattaaatataaagcttcagctactctaataattattcctactcacagccattgtcatatgagcaaacaaattttaaagcaccaaataaaatgcagctctgcacactaaagctaacacaatgaattaagatttgagaagtcatacaagcttaatcaatcgtaagagcatagtcacgaaaagttaaatttgctagctgaatgaaattaaagcaacgacacaacaaccggcattttacatgtaaagaggagaggaaaaacaaatagtgaaagaatataaagtagacctgaatagcagagatacttatggccccatcaataactccagaccgaaatcccaatccctgaaacaagatccaatccagtagcttgtcattttacaagttgataaatgttatttctgttcttcatagtagtcattaagttgaaagttaatgtatcacaatatggaaaatgtgataagcacaatgagcatcatcttaggggtaaagaaattacctgacccatgtcaccaagtaatacatcaccttcaacctccctctccaacgcaacatctataatgtagaacaagattagagaaaatactataaatgtatatatgattaaaattcaaatcaaaataaccgagaatataagtttccacatactaagcattgagtcagagatatctaaaccgatccactcatgaccattctctgttagtgtctctccactaagtcctgacccgcaacctgaaattcaaacccgtatgatatgtatgctattcttcaaatcgaaatttcaaagtaaatacagaaatctgaaaatgggtcatttaccaatatccagaagcaacctgggaactccatcttcgggcaaggcaagaagttcgagagctctctccgtgagctctgattggattttgatgattcgagaagaagaggtatacttcctagcttcattatcatcatagaatatctcaggtggcgcttggagttccggccgagatgacatgttgtttagagatgagcaaagaacaaagatttaagcacctataaaggcaatgagttgagaaagatattcaccagtcagaataatattaaccaaactgatccaatgattttagccacaaacaaactgattataaaatttgatgttaacaccttagtttaacaatccatctcatactcaatactcaatgctgatacttcctcagcaaacattcaagcttcaaaatcactcaaacaatcacaactcttcaaccttgaataaataaagttgtagaaacttcactcaaacattcaagcataagataaagtctcaaagtcctaactattcacatactgaatttatttatttatttatctggctaaagttcagctttgaaacttaaacaaatagaaatattgaccgagatagagaacaagttcaataaatgttggagagtcataccgctgccgtgtcgccgagaacaatggagatggaggccggagctggagtcgacggaacgagagatatagaggagggtggtgtagagtgtattccggagactcgcgccagcggaatgagagtgagaactgagaagaagataagatgggacgacggcagagagagctgagcgagatgagagtgtgagagctgagaggcggagcaaaatttaggttaggttttctttttaagtttattattattattataatatataaaattgtgaagaaaaatttgactaattatgtatttattaaaccaattttttttttttttaaatctaaattatttaatatcggtagaatatgtcattttttttcctaaaattccattttacctctctctctttgtgtaaacacgcacacagaggagaacacaatcgacccacaacccaccgcccacaatcttagtcctttctctcc

SEQ ID NO: 84541 - DNA, 953 bp, Cannabis sativa
attacctgtgttaccacatatgagtgcgtagccccaaagccaaataacacagtaaaataggagatgttgacaaaaagatgacctatcaccacagaaggactggctgcagaaccaacttgagtgatagtaaacacccgagcaggtatgggttttgcctttggcttctgctcttctttctttacttgagggcaatccttcttgaaatgcccaaccatgccacactgaaagcatgtctttcagttgcactctcccagatgatgcttcttacaacgtgggcactcagggtaagaataaccctggcgtccacctctgccttggttcccatggaaccgcttgctctatcccaaaccactagatgccggggtagcctttcttttttgatcagtggtggaatcaccactatccctaccatatacaggagtaagaagagttggggtcccaccaacacctggagtcactcaaggaacctgaagaaatttgaccgcacctttggctcctagagccttatcaactatttctacatatgatgtcacttcattcatagtaatcaccaagtcgtgtccaatttttgcatttagacctgccagatatttctccttcttccagaagtctgtaggcacaatacgctaggccaacttggccagacgatcaaatttggttgtgtactctgttactgacaaccctcactctgcaccagcacggtaaattcttttcgcttagcattgtgggttgcctcattgtaatacctggtgttgaacacatctcagaactcttcctggaactgaaaaatagcaacgttaccctatcatttccaacgacccccagaaaattcaaaattctctctatcaccgtgagccattgctcaacatttggacctcccaaaaaaactggaggtgcttgcttgcaaaacttctcatacagtcgctccgtacggttgccagcaataggttgtt

SEQ ID NO: 84542 - DNA, 1295 bp, Cannabis sativa
ataacaaatcagattatattgaaaagagttttatttagggcataaaatcccaacacttatatctatatatatacacaactttgctagtgaagttagaagaggaatgccactgttgttcaaatcaacttcaataatttgtttcgtggtctaggtctaaaaacttcttcaataaatgatgaatatggatatatatatttattttatataaaatgtggttatataataaaatttttggtttaacaatatttttttattttctacattaactttaacataatatactattacttaataagatattctttattaattttatctattttcttattcttttcccttattcttagagtcaaataaaagattaggaataattatgaatataaatatataaatatttaaaaatatgtttttaattaattcgatgaattttaggaaaatattttaataattttttttggaaggttaatataattgtagtatagttatagcatattctttccctcgatgattctcacttttgtgtttttttttttctttttttcttaatttttttaattaaaaataaatatatatcatacttattcgaattaattaaagtatcataccacaatatcatcattaatatagattattaatattatatgtactatcacactgtataaaagatgaattacattattaaaggttaatttaaatttgtatttaattatattattagttgtgtgatttgtgtggttgctttccatagatatgtagcttagctatattactttgtgggggaggttatttttttatattaattataaatttaattaataatatccaaacgaatatatatataaatatatgtatatatatttgtgttgctttctgtataaactaatttggttctaaatcttagcttgctattttctacattaacataattcaataataatttttggattattttttgaaaatatttgcagatttatagattcacccctaacaaaagtaagtttgtattacttcaaatcaattatgtacatcaatcttataacttaatgatctttacaaaccacacccctttaaaacccatacctcctattacacttcactcaacaatctgttaaaatatatgctatctttatcttttattttaagtatatgtagactatactctctttacaacgaatttcagaaaattgactaaattattaacaatttgtacatcttataccagacaactttattttttgccttccaaatcacactctaaaattttttacttttaatcacaacaaaatttgtgacta

SEQ ID NO: 84543 - DNA, 1653 bp, Cannabis sativa
accactccagtaccaacagtcatcatcaaaagtgtgactcaaagggagaccaagaataagagaagcgtctcgggggttgaacatatccatgattaaatcataatcccaacacagagaatcaattgagaacaatgccgaaacattctgattcaagagcctaggattgttggttataacaaatggattgtccttatcaggaagccacggtacggatagtacggcggactccaagtttgagaaggttttgagcactccaaatgcttcgccacacaaagttggggttggagccaaggtcagcactgaggaaatccgagtggggaaagtatcttgctttatagacccgactaacaagagagttaggattacataagaaacgccatccttgtttggcaagcatagcaagattgaaatcacttaaatgacgaaatcccattcccccgaggtctttatgagtagccattctctcccaggacatccatataatcccatttcctttgcttgaactagttttccaccaaaatcgggccataagcttttcaatctcatcagaagtgtcagtgggaataaggcaaacactcatggcgtaagtaggaagtgattggataaccgttttgagaagaatctccttaccagctctagagagatacttatcatgccaactgttcaaacggtttatgactttgttctttaaaaaccccaaaatagcattcttgtttcggccaatgatgttagggagtcccaagtagtgactgcctttggaagcttcgaccatgcccaggatactacaaatactttcacagatagaggagcttgtattcggactgaagaaaatattagacttagaagcattgaatttctgacctgaagcattctcaaaagagtgtagaaatggaggagattggtggcagcatcattggtagcttgacaaaacaagtagctatcatctacaaagagcatgtgggtgatagacggggcacggttagcaacacagataccacgaagacttactcttgattcggcttgatgtatcaaggaggagaatccctttgcacagatgataatgaggtaagtggagagaggatcgccttgacggattcctcgggaaggaacaataggtcctatgattcggccattgtgcacaacagagtaacgaaccaaagacacacattgcatgatcaaatttacccatctgtcagcaaatcccatcttagacatgatagcatgaagacagccccattcaactcgatcataggctttactcatgtctaattcaactgccataaaccttttttttcctttggtctttctctttaagtagtgcataacttcaaaggcgaccatgacattatcagagataagacgaccaggaatgaaagcactttgagtgtcagagattaccttatcgataatatgtcgcatcctattaccaaggacttttgcagcaactttgtaagcacattacacagagcaataggacgaaggtcggccatagaggagaagttcttctttttcggaatcaaaacaaggttagtttcattaatcccaacaggaaaagaaccagtgatgaaaaaatcattaacaaacttgataacatccttaccaacggttgcccaatgagtttggtagaaccctggacccatgccatcaggacct

SEQ ID NO: 84544 - DNA, 694 bp, Cannabis sativa
acgtgcgttaatgttgttttaatgtaaatatgttaaaattttgaaataacataataattttatgaaaaaatcagtgggagaaaatagaataattcacttaaaatctacatgaaaataataaatttaataataatcagattggaaatttatttttcatgaattatagaaaataataatacacgcttagtaatttataatttttatttcacaatattacaattgacaaaattttacaaaaggagcaaagctaaaattatagatagtagggatcaatattgagtaacatacaataagtgtaaatcttagtgattaaaatttatttttgaatagtatatgtccattaaggaaaatatcatagctattaattttagaatttttttttttatttttacactttaaaatatatatatattttttttgtatttttacagaaatttacataaaaactcatatcgcaactaacggggaaatttaaatcgcaaccaaaattcatatagcaaccacatagaaactaccagcgcaatctaaaccgtaaatttgaaaaaaaaaaatggttaaaaatagtatatgagataatactccatatactatttttacatttcaaaatgatttctttttgtatatttatgaaaatccacataaaaactcacataacaaccaacggggaatctaaatcgtaaccaaaatttacata

SEQ ID NO: 84545 - DNA, 918 bp, Cannabis sativa
ggtgtaaggacccaatggaggcttgaagcgggaacgttacaaacataaattagaaagcaaataaaatatgatactacgatattcaaagaatagttaaaggttaatctctaccctcaacaatcatccttaattccaaataatgaatgttatttcgattttccaatcaaattattaatttagcagataaggctaaagtagtcaattatctcactctctctattgcaattaattaaggcgaagcgcttaataagtaattcttttatctaagcagtaaatctatgaagcatacaatttatttaacttagataaagctttaaattcaatggagataaattaatctaggcaataaattaatgaagcatataatttatttaacctagattttattcttcattgcaattaaaaatacatttgacaatattaaaaattgcaaattatcacaaacacttaaaaccctagactattaggtgaataataattctaagatgataatagattaaaataaaacttaatttagtgatcatctaaacaagattaaaacaataattatggcattgaaaatagaagaatagaagcaattcgatataatggaaattaagaaaataacaatcatcatagaaattaaaaattcatgtcttgagttttaaaataacccttaactaaaaaaaactactctgaactagacattataatataaatcataataaaaagtacgagattacggagaagaaaagaaataatgatgtataataattggtgtcgcaatgtccttcttattggtgtcgaaccctaaaagtcctatgtatatcccctcaaaaatctgcaattttaaaaaaaaaaaagataaaaagctttgaaaagtaggaatcatgtcctccccgcagcgagcttcacccttcattacagccacagtcttct

SEQ ID NO: 84546 - DNA, 1176 bp, Cannabis sativa
  modified_base (399)..(399): a, c, t, g, unknown or other
  modified_base (466)..(476): a, c, t, g, unknown or other
  modified_base (1041)..(1046): a, c, t, g, unknown or other
atcttaccataaaaaggaaaaattattttgtcacctaacttgccaaaaaaggactttacagaaaaattaaatatttcccaaacttttcttcttcttcttttttaaatggatatttcctcaaaacattaaaataaaatattataccctttaatgataatctttgagaattatttacaagcattacgtacttttaggcacattgcaaattctgccttgcaaacagttaacaaaattcaataatatgtattaattaaaataaaatttgtggtcaagctaccatatttgattgtactaatagcagtataatcaattagagcattgctgttaggtaccagtggtgcctagcaccttctcgacatgtcgcattgcaattggctagcgatactctttaaaagttantatattaaattatatgggacccgaaacgtagttgaaccaatagcgatattgacacataggagggtgnnnnnnnnnnntggtgccctttagcatttctcaatcaattaatagttgatcggcctcggaagatggctgaaacctattgttaggttatttactattatttatgttatttttagagttaattttcttctttattgtcactttttagaatagaattacacttgttttttgttttttttttatatatgcggtacagggggtactcgcactctgtacttagacaaatttacattttattttggacaaattcatatcctcgcggggatatttaatgtttaacattttcgcagtacacgggtactcgcgttttaatatctattcgactttaattacagcctggtgtactaagtagaaaatcttaccagacttgaaaaaatttgttttttaaacttgaagaattaacaagaatgaagcatttcctttatataatcaatagtacattatggtatatataccccctatacttaggattttttttaatatatataaaatgactaagtataagtacaagacgtacacaatttagataatgcgagtactattgataataaaactttaggctttcgccattccaagctnnnnnnatcgcagtaccatcgagtgctgcgagtcggtatgtagcgtcactgatcttttctgcgatgagatacggtccttcctaattatccccgaagaccccatgcgctgggttcttggtatttggtattactcttc

SEQ ID NO: 84547 - DNA, 566 bp, Cannabis sativa
agagcaaacttagccaaaacatcagcataagtattagcagatcgcctaacatgagtgacctgtgctcgtgggaaaaaggatactaaatagtttacatcttttaatatcaaatgaaaagcagaatgatacatatgtgctatttttaaaccttgaaccaccaataaggaatcagtttctatgaaattaatagataatccaagattgacagcccatttcagagagtgagcaagagctacagcttccatttcttcaggtttgaaacacccttgtattggtttggaaagggcagcaactatgactccaaaggagtctctcaccacagcaccgataccaattttacccaaagctttgttacatgcaacatcagaattcaatttaaatttgccttgtggtggggcagtccatagagcagttggtggtggcaattctgtttcttgagtcactgaaccccgtgtagcagctggtgtagcagtaccagcattgtgcaaagaggaagcctgagcagtttgatatttcagaaggtagtttgtagcaaaatccaatactgcagcagccttctttgatgg

SEQ ID NO: 84548 - DNA, 1261 bp, Cannabis sativa
ctaacagcccccttcaaactcagtgtggagagatacgaaacactgagtttgtctcgaataaatgagaacctattgctaaagattggcttagtgaagccatcagcaagttgttgttcaaaggaaacatgatgaagttatctataatgaagtttaaaccgattgtatggtctaaaatttggatagcacaagcatccaaaaactctaagtgaggtgtgatcagatttattgtgaaataaaatttcaagaagagatttgtatgcaagttttgaagtaggcattctgtatattagaaaaatagcaacattattgtataatgatccatctcatgccaaagtcggtttcaagttgttaggattagttgatagttattcctgttaactgtcctaggtagttacaagttagtttttttttttctatttttgtctctaatcataattgtataaatagttagagtttaattcttcatagcacagccttgtacaatttcttatctctctcttaatgtaattactccactcataaataaaacaacacaattaattcaatttgatcttgctggtttctgagtctttttcttgctggtttgttactagtttgttggaccattgctacaacattcttattgctgctgttgttcttgtgttttgctctttgagcaccattcttgattgtaaaggggtgacgatcgatctcaacaagtggtatcagagcaaggttttagctcaatcaaaatttaaattcgaaggctccaagaatcatcaagaagatggatgcagcaagatttgaaattgacaagttcaatggaactaatgacgtcgggttatggaggaataagatgaaggcattgcttatccacaatgaaatttcagaagcaattgatgaagagagtctcaaggaaattaaagatgagaagaagaagaagaaggagatcaaaactaagacacatagtgccattcttctcagtttaggtgattaagtcctaagaaaggtgtctagtgaagacaaggctttaggtttatggaacaaacttagttcaatataaatggaaaagtccctgaccaataagctttatttgaagaagagaatgtacactctcataatggatgaagggaaagatttgaggaatcacttagatgagttcaacaaaatcactctcgatcttagcaacattggagtgaaactagaggaagatgatctaacaattatactgttgagttctttgccaagatcctatgagcactttgttgatacaatgctctat

SEQ ID NO: 84549 - DNA, 770 bp, Cannabis sativa
  modified_base (253)..(267): a, c, t, g, unknown or other
  modified_base (622)..(628): a, c, t, g, unknown or other
atcagtctcagggtgtgggttcgccttctgggtcttggtctaggttgtgtccgagtcccaagttccaataccgatctgagtctggattcagttctgggtctaaggtctaaacccctatctgggtctagattcgggtctacgtccaagttcgggtcccatgtgccggtccaagtttgggtctttgttcgggtccaggttcgtatccagatccctatctttgtccaagtttgtgtttgggatcgggtcccagatnnnnnnnnnnnnnnnggtcacagttccggtctgggtacacgaccgtgttcgggtccaatttctagtctcagtttatgttcgagtttgggtttgagttcgggtcggagttcgcgtccttgtcagagtttgggttcgggtctgaatttcagtctaggtcttgatcaggctctaggttgggtctgagtcccaagttccaatcctgatctgagtctggatttagttctgggtctaagtacttggttctgatcctggcctggtttcgagtttgggtccgggttcggctctagctttgggtctgattctaggtgttggttttagttcgggtccgtgtctatgtccggttttatgtccaggtctggaccccgatctnnnnnnnggttcgggtccaggtccaagtttaggtcccgagtgggtgtgcaagtttgggtctgggttatgatctcgatcccgatctaggtccagcatttcgatcccagtttgggtcttagtccgagtaagggttcgtatccggatcccta

SEQ ID NO: 84550 - DNA, 872 bp, Cannabis sativa
tatttataattttatttatttaatatattttattttaaaaatatatattaatttttatgaattattttttttttgtttataattttaatagtaattagttaaaaaaataatataataataaataatattcattttttagtagaaataatatttttttagtgtaatttttaaaattgtgattataataaaaaaaatagagtaatttgtagctaaactttttatatttctatttttatacacttaccttctaattttaatgtttggttctgtttgcaaatataaagtatcttccaaacagtgttcactaaatgctaagttggaataatatatggacacgtgtcatattttgattggtctaatttatttaattatttaaatatttaaaaattaaaaaacattaaaagacatcagtagtgtctaacaccttcctatgtgtcaatatcgctattggtccaactaattatcgaatcccatattatttaatgtaataacttttagagagtgttgctagcaaatcgcaggacgacatatctaaagatgctagacatcactgatgtccaataataatgcttttaaaaattatataaaatccttttaaatgttttaaaatttaaataaattaataaaattattataaaatgaaacatattatacatttcttttcgtttcttattttttttttctttcttactcttcatcgaaatcaatcctcaaccccatctccattactagcacaaccaccaccatccccagtcccgaacccctctctttcttccttagttacatcgacacactaagcaagcttggccactaccctcctgaacagttacggaactaggaagaacatggcaaaggggcactgcctcctcctg

SEQ ID NO: 84551 - DNA, 1222 bp, Cannabis sativa
ataaagtataattatcattatatcatcaccatggcctacattgatatagtagtgttaaattaatggtaacattgataatattgaataagaaattgtaccaccaagcaagatcttggaaagtctaagacatgaccacacacgatacttaattattattataacgtgtatattaatgaaaattaacctattttcaatgggaagtaagaaatttttcaaaaattaagagaaggggaaaaagggaggaaagttagaattgagaaatatataactggtttaattatgtaagtgaatgagaactatatatatataagattttttttagaagaaaattcttctaattgtcaatttttttattctattttagtgtatacatataatttttttccaatttcttgttctcattccttttgcaacgtcttcatcagtttttttaatgtgtattagtcatgattttttacatgtggatttgtagtaattccctccacattaacaacaagaattcaatcttaagcctacaataaacttacaattttgaaagcaataatgaacataaatcaattaacaacacaatgaatcaaaaccagaaattaaacaaagaacaatacatgattttatcctggttccggtcctagagatcaatatgatccctggccatacttcagctgagaaacatcaccaattcttcattaatatgtggaacaagagggtatcaatacaatcacaagatcaagagcaatctcagctctgtagtactcaaaacacaccagagaaagcagtcacagttttctctctccctacccgagtacaccccttgttcttgaccctcttcaagaaccaaaactctcagcttaaaaatctaagcaactctctcatacacctctttcttattctcattctttaatggtgaacagagtagactatatatagttgcacctcaccccataaaacaaggtacaaaaccggtaccaactaactaactaacataacagaaagttagttaagttagttggtgagatagaatatatatggtttagaggatcaatttccactggatttttttttttttttttttgcaatgtttagttagaacaacctcaataaagatttataatctatcatttagcaattagtaaaatactaaattagcctgaacaaattaaagtgctatattatttgataatataatatttatatttgtttacccaaatttttacaaggatga

SEQ ID NO: 84552 - DNA, 891 bp, Cannabis sativa
ttgtcactttctctatctcaaaatcttcatctttaagctcaaaattagagtctgaatcttaatgatagctttaaaacgttttgatttcttcttctccacataactactaactttcttttaaaagttattggaaatgtagggctagggggatcatcttcaaaaatttattcttagcagcacctttcttacccattgtcaaactcttcacagtttttagagaacttttttgtgctttttttacaactgaagaagaagaaaatgaatacgaaacagtcatggatagaatgaaacgactatttatagggaaacaatgaccaacaaaagagggagaaactagagggaatatggtttttgaaaaaaaaaaactgaaccgaaatgatattcagttcaccaatttatcaaatgtgtgtaaccacccacatttgaaaaaatatggatgaatttttcaaacaaataaaaaaaaacttaaataataaggttaaaaagaagaagaaagtgagattgaagatgatggagaagagaaatgggttcggtaggggtaacgtgtattcaacttagaaaaaaaatgactcaatgtgactaacatgacaaatattactgatcaacacaataaaaagttagatttaaaaatgaatataatacaaataaaaaatatacacgctataaaagttaattataccgtttaacagtaattaaattgataatttcaatagaatgtaaattttattttttatttggaggattttttcattattgtacaacaaaaattaatatattacaatatggaacaacaccactaccggtgaagtcagggtttcacttgattaccactttggaagaaactgatgaagaaattactgttaatttgtacaagattagtagaaatttttt

SEQ ID NO: 84553 - DNA, 580 bp, Cannabis sativa
gtcccccaaattgacactaaaagtctattttgtagtagtggtacttgattgatctataataattatcttaatttgataatgcaatactatcaactaagtctttctccctagatctctaaatcagaagcagttttattaatctgattatcaagagggtatacgattgtgatgagtaaatatgtatttatagagttagggaagtaacttagctacataaccttagttggactagacctactcatcaaaggtttcagttaactagaaaagtccatatttttacttaaactagaatttatacacacagatgctatgcccattaactattgatcaccagcaatatgagctaacacaacaaaaaaaactatccaatcaactaaaattttgataaaactaataaaaattaatgtaaacctaaataaaagtataagaggttctccccaagatagtttagacataaatcacaaaggtaaaattttattacattaatttggttaaaatagtttctttcctatgtcacccaacttatcttttggttttacctcttatataacactttaatttcaaatatcattcgcgcact

SEQ ID NO: 84554 - DNA, 684 bp, Cannabis sativa
tttaaattaaacttatcggtaaattctctgtaattataagccctccacaaaacaacctacaaaataataaaaaataaaactctattaccacacaatataattaaaaaggtaatgtgaaagaatgatggtaaatcaattcatattgaataaaaaaacttgaaatacttatttgttaaaagtgaaaaagtcgttgaaaaagaaatcatgagcctaaaatggatcacttctcttgcgcattgatcataccacaaaactaccctaaataagtagggacaaaccataataaatgacacaaaagccataaaaagtacaaacgtcgtaaaaggtatcaaaaccataaaaaaaaatagtacaaaaacctgtgttatctcatatgaactttaaacatatattaatacttagtaaaaaagaaacaaatcaaaaaatcatatataaatatatataaataaataaatacttagctgtctcggtggccattgaactaggctataagtatgttttggttgagagtgattcgaaagtagttatcaatgctcttaatgggacggaatctcattgggcacttgagaactatatctctttttgttctgaatcttctccctcttttaattgttgtaatttcgtttttgctaatagaacttgtaattttgcgacccataatgtggctaattgggcttttattaa

SEQ ID NO: 84555 - DNA, 518 bp, Cannabis sativa
agctttggctgtgcctttgtttgtacgtgaatggtttgttcttgattaatgaagtctcttcttcttgataaaaaaaaaaaataatatttaaataatattcttataataaaaaaagtgaacttaattttaaaattaatttaagctagaaaataatatattaactaattttgaaattttttcatacaataacaatttgaatatttaagtaagattattatatagttattaatatttgtcaggtggtatttagctattgggcactttaactttttcgtcattaaccatatatttttcttctcacaattatttattaatttttctgatattttctttttaaatcaattattttatatttagtatcaatttcttttaatttttttaaaatttaataattgtatatgaaactaaattatttagtaataaactaaattattataataataattatatataaactattagtttagtatttaattcaatatgtaacgatatacattataataaattaaaaaaagtaa

SEQ ID NO: 84556 - DNA, 575 bp, Cannabis sativa
acttaggtttagttacatcaaaaagttcttagaatagtgcaagtggtcctatataacttgggcttgtcccaaattatctttgttgggacataatggtgggccttatatgctaacctggattccacgtgtcccatgccgagaacatggataacatttacccccaagcttctagaatgatacatatggtggaatcttgccccattccattactgtggacatgtggaggattagaagtaatattatataactctatgggtattggtcaatcatggaaggtgactccatctttggacatgataagtctacgtggcaatcgtctaatggtagaagagtacatttattgaggaatggctttcctagaaagcttttattttgattattgttcactttttgccgtgaaaattaaaaattagcatcttcatcattgatctccacatgaattctagagagaattaattgtgttgacatgctttgactgctggagtccccaaccattggatgtaattgtgttttttgagatacgagcgtggaccattccatccttttcatgtggattgccaccttggttataaata

SEQ ID NO: 84557 - DNA, 812 bp, Cannabis sativa
acttctaattacacagtaacagtgaaattacatggtcagacaaacatgccaaattatgtaattacctccaattacacacaaatccaattacattgtggctttccaaacgcaccctaggtttctctcattttttgtgtaaaatttgacgcatttaatatgtgttcaatgcttacttgattattagtattttcaaatgttagggatgatatcttgagctcaatatagattacttatattgcatgttcaattgttacacgatgcatattcgatccaaggtaagttgtgcggtttgtttgagtgtttcatgatgcatgttcgatggtactcgatatgcgttcgatgacgtatgtttgatttatacattttgtagatattttttgtggtatttattttatttctttttaaattgatagggtcaactctgttcgactatttgatgtacaatggtgtttgggagcgcaagggaagagattggatttttaatggcgcagaaagtaaaatattcaagttgaagtcagacacaagtgttagagatgcaaataagtgatgtaaagctattgagttgtaaccttagaacattctaatggataagtggtgtaaacctataatataactcatttagcaaaatttatgcttcaatggcttgtaaaatagtaatgtaaatttagcacatagtaaattttgtgctaaatttagcgcaatatttactattgtaaagtttgcattatcataaatgcacaactttattatttatttttatatcacttttaatattttatcagtttatttagctatagcattaaccatgaatc

SEQ ID NO: 84558 - DNA, 731 bp, Cannabis sativa
ttctcgctctcctcccctctccactgcccttcgatgggaccccaccgaaacccacccacgaagcttggccgactttgccaacaacctcgttcgagatgggaagcttgtagacttcgcaatggtggtcgagactgttgcggattcaggcgttgaggcctcacagtttaagtctgcgttgagagcaaattttgtggagaagtgcctttcgggatttcttcgagacgggaaagttcagagctttgtaaatgttttgaacaagttggatgagtttgggtttcctcctttggagatctttagtgggtcggccatggacttgctccggaaggagtgtcgagggattttgaaatgccgtgaccatacatgtctgggagagaccgataaatatcttgccacttactaacccaagcaacttagcagaaaagctcagttagagttaggtacaacatattctacatatttagtctgtagatgaggctgacgctttttttttatataaatttcttatagttttcccatacccaaaccctcccctaaaagcataagttaaatgtattctgttttgtcctaaattttcctttgatgcatgtatctttcttttattttctttgcaggttcaatgattgcaactagttaaagggaaggatagtctcttgcatattctccaatggtaaactattatctgaaagatgaattattttcaaaaaatgatttattatcaaatactgaaagtg

SEQ ID NO: 84559 - DNA, 551 bp, Cannabis sativa
  modified_base (52)..(56): a, c, t, g, unknown or other
  modified_base (142)..(154): a, c, t, g, unknown or other
  modified_base (478)..(503): a, c, t, g, unknown or other
gagagagagagagagagagtgtcgacagaagcttagagagagagagagagannnnnagagagagagagagagaaacacaagagagggaagagagaggggtggtgaatttcagtttttgtcaaagtagagagagagagagagnnnnnnnnnnnnngagagagagagagagagaaccccacgagaggggagagagagaggggtgaacaatttcagattttaacaattttttttttttaaaaaaaaaagtaaaatgggaagttcaagtaattaaaggaattaatttgtacaaattaataaggggtctaaactttgatatggggtattttattatggctgaatagtgaaatttccctttataaatgacttatgtttgtataatctcttctaatatttgagaaaccaaacacaaacaatagtaatatatatatatatatatcatacctttgaagcagtgaaaatatatatctattctatatannnnnnnnnnnnnnnnnnnnnnnnnnggtttatgagaaattcatgggtgtctttttatttatatttaataaaat

SEQ ID NO: 84560 - DNA, 1422 bp, Cannabis sativa
tggtaaaatatattccaacatgaagatcaccaaaggttctttggtagtgatgaaaggtgaaaagataaatggtttgtatgttctccaaggaaaaattgtgtcatctggagaggcaagtatggtgaaaggactagaatcggatataaagttgtggcatcagagacttggacatattagtgaacaaggcctcaaagaacatcacaaacaaggtatcattgaaaatttaaactcttgtgccttaccattttgtgaagcttgtgttctaggtaaaaaacataagctgaagttcactctggcaaggcacacaactaaagatacttgaatatctgcacgctgacctctggggaccatacaaggtccctactcactccgttaagaaacattttctttccatagttaatgattacagtccgtgtgttagacatacttgttaactactgagtgtctgaaacaatttagaaattggaaaactcaggtggaaaactaaaccaaccttaaaattaagaaccttaggattgataatgggttggagtttgttaacttcaaatttaacaagatgtgtaaagaatttgggatccatgggcatagaaccatagtgaagaccccgaagcaaaatggtgttcttgaaaggatgaaccgaaccttcttgaacaaagttagatgtttacagttcagtttcagatttgaaaaactattttggggggaagccttagcaactgcaacctcccttgtaaataggagcccgaatagagtaatagacctaaaaacaccctatgaaatgtggtaaaatagaacccccaacctaacgcacttaaaaacatttgggtgtacaacatatgtacaccaatctattgacaagctggaacataggtctgtgaagggaactttcctaggttatgccttaggaacctatagaatctacatttccaggaagggcgaaccaaaggttatgattgctagaaatgttgtctttaatgagttagattatcctcacttgacctccaggaagggtagtgtgtctccatgtgatgcaggaaatataggaaacaaagacactgcaagtgtggaaatggagtatgcaacaaagctcctggaagaaggttcacgggtgaaagataatatggaaccgaaagaaaatgcagacagaagttggtgtggagctggaagaacaagataacgaagaccaaacataggtgctggaagggttcggacagatagttgtagaaggttattagtttgctcatgatagaacccgaagagagattcatcctctagctaggttcgcggaagcagacataatagcatttgcactagcggtagttcaacagactaaaattgaagagcccaaaagctatgaaaaagcgaattcaggtggaaacaagtctaaatgtctttagatcatggatgaggagatggattcac

SEQ ID NO: 84561 - DNA, 994 bp, Cannabis sativa
tttttgggatgttgaatacaatctgcttgatttccgcctttgtgcaatctgaattaaggatgtctttatgagtcttagtaattacagctccttgtttcaacacttttttgttaactggtagtcttccttgcattttcgttccaagaagtccttggtaatacttcaagaaggcttccgtaatagcagctgggtcctcaatccgttgtccatctccatcttctattgacagaatcttgttttgccttcttctttctcttaggcaactatggaagaatgctgagttttgatctccctcttttatccaagaaactttggatttctgttgtaagaaggaaatatatgctttatgagtcatagcataatgttctcttgcctctttctctcttgctgaaatacaacatttagtgggtcggtctacaagatttcttgcctattattgagatcttctcgagctttaatatctgaggcttgaatatcattgaagcttttgttgtttaattctttaaagacacctttcagtagcttctgtttagagacaatctgaaacattttggagcccttgacttcttgctgccatatttgttttactgctgccttgtactctggatgcatagcccacatgctgaaatacttaaatggcttcttcccacttggaatatttggatacattttgattatcgctggtgaatggtcgaatagaccttcattcagaaataaagcttcggcttgctgaaataaatcaatccacttctcatttgcaagaactctatccaacttggcaaagatcttgttgcgcccttgttgtttgttgctccatgtatatagattgccactatacggaatatcctcttaattacatgtgtgagtgcaacctagaaaatcattgcatatatgattccttactttgtctcctattctttcatcaacttgtaaagttgcattaaagtcaccaagaaccacccatggctcttttgtatttagctcttttaaatca

SEQ ID NO: 84562 - DNA, 1534 bp, Cannabis sativa
tataaattttttggtgacaaaaattctttatatataatttattttgttgcacttaattttttttgtaatttttttggtgacaaaaattcttttgcttcatggtagcaaaaattccaacagttacacatttgatattacattagttcttgagatgatagcactaaaaggacaataaacattgtagcaaaatgtgttgtacatagggattttcatttttcaccgctaaaagaataatataaggatttaagtgaaaaacatttgtatataggaaatttttccaaaaaaaaatttaaatgcaataacatgaaggttaattatccaatatactaatttttaactttttttaatttaccatttgggttgcttcaatagttgctatggtaatttttgtgtggattgttatgtgaattttgattgcaatttaagttactctgtgggccgggtaatatgtaaattttcataaaaaaaaaaaaactattttgatatgtaaaaataaaaagactcctaaaatcaattacataagtatgccgcaaatattcttaaatatattaatattttttgcaaaaatacattaggcaaaaacgtagaataaaaagttttaggctggccgtggcctcatcccactacccttctttagctccgtcgttgttaattagtgatgcaaattagcattgggtagcaaatattttagtttttaagttaaaagtcaatatataccaaattgtatcataataccaatattaaagcaatattagatattttaatttaagagtctaatagcacgtgacatataacaagctgtcatttagagtaatttacactataaataattaagtttaattcttaattataaataaatacttaaatttaaattttagtagtaataatacttaaattgtatttctagaacttccgtaggtacctaaccgttaaatatcaagtcattatccacgtgtcatttttttattggtacatttaaactatttcttttataaaaataaaaatttaatgactcgaaacaatcaaagattgtcacatggcaatttacttaacatttaacagcaagttacctatagaagttcaagaattataacttaggtattattatcgccaaaaatttaacttaagtatttattggcaatctaaaattaaacttaaatatttatgtcgtgtatttataagtgcaattagtatgcatgttatctcacataattatgtggctattgtttgcaatccttataatatatataagttgtccaatatcaaatagaacataagaatactaatattgttttgaatacttaaacaccgtatctaatcaaatcaattcataatttgcataaatgaaaagcagaaattgtttctagcagtagataattcatacaacgcaacagaatgggcactatcaaaaatgttaaatcaaccagagatgcttgaaaaaacaacaaaagaaatcgatagagttgttggcaacaacaccacactcctccaagaatctcacatccctaaactccattacctaattgcatgtgta

SEQ ID NO: 84563 - DNA, 560 bp, Cannabis sativa
gttgtgattaatttgaaaattaaataaaaataaataataaataacttataacctgaaagtaacctaataatttattttcttataaaattaatttaattaagatcaattatattttaaaattgaattaattataattattaattaaccttttgaaatttattactatataaagatcttttagtaattttttttgcacttaaattattttaaaattttatagcaaaactttttataatttaaaattatacatatataatttcataatttaaattttatcatacttataatcttaatttttaattattatacataattatttaatttttttaattaaatttttttaaaaaagtaaaaagtgaaataagttgaacgattttctagaaaaaaaatggctacactcattgaagaattaaatatttaaagtagctcgtgacttcttcccttttctcaaaatctacaaaagtgtctatagtgtgcattagacgatgtgttgtcatcaggtacataacaactctattttagagttgttttgcaacttattgcttgttctaattggtcgt

SEQ ID NO: 84564 - DNA, 1273 bp, Cannabis sativa
gatgtgaaatttgcgagctccaatattcaacttaactcttcttaaatgattgagcataatggaaaccaaggaatgacactagtgcaggtggtagcaaatatggattttcatatgtttacttctccatgaccatttgctcactatattgatacccaattacttgttgcatgaggggtggtggtggatttggcctttctttattgctttgctcaagtattttctcaacaccttgggtagagatagtattcgacaaactttttttttttgaacaagagaacttttttattcaaaaacccagccaatacacacagctaagacaaaactcagcacaacaacacaaatgctgatgcaacaaacaacaacaaccccaacaagaacaactaccaactattaataatactaagtaaatacatatttttttgacaaactttataaggacccttggtcttaactttaatttgcacaactttcttgacatcttcgcttaatctacgagcaacagtacacaccatatcgaagatgcatcagtttctgttcttccaaatcaaatacaaggcagcagctacaactacattcaagactcgactttggaaatcatgaggcatagtcttgaaccttaagagtaactcagcaatagggttgggccattgaatacaaccaaaccatttacttatgtcttcaaaaacctatttagcattaacacaagtaaaaagcacatggtcatgagtttcaaactcaagtaaaaacctgtttagtatttgacaaacttgaatatactattttgtctaccttttctttgtcattttggattaaagtaggctccatttgatactcaaagatttccccacacctctcaaattcttcattgtttttccaagtactttcttcatcatcttgccacacatttttcattttacttggaagtacaccttgtggtctattatgcaactcccaagataactcctcaacttgcttctctagattctttaaggatgtggcattgctatgaattaagacatcatttttagccatatatttatctatcttatccatgtatgtgttcactttctccatgaatgcactcatcattgatattcaatctcttaataaatcatcttcccatggtccttgagtgtcattatcaaaagtttgctccatgtgggtattagtttctcccaaacttggttagttgttgaagaattccagcaacgctcatcatactccgccatgttctctaacatccaataggcttcatcaatagatagttggtaga

SEQ ID NO: 84565 - DNA, 526 bp, Cannabis sativa
ttatggcggtgattatatttttgttcctatgctatatatacatttttttaaccacccatctatatctatatgtatttgtttgtagcttaataaatttttcattttcaaaaaaaaaaaaaatctaacatcatattaaaaaaaattaataaccaaccaaaattaattttatatatattttttttttaaaaaaacaatttttattcatcatcatctcatataacctatttttttttcctcctttttcatcatcatcatcgatggtcttctctccttttttcgttcattaattttttttttgacaacaaaattcttcttgaaatgtctcaaattttacttcctcttataagcatcaaaaaataaaaaacagatataaaatgttaaaggcaatttgctgagtgagatcgttgtccttgacttgacctcaatgccattagagcttgctcccttcaaaggccaaaatagtattattgaagggaatcttataataatattatcaaaaatcatactatcaaaaggaataatttta

SEQ ID NO: 84566 - DNA, 1953 bp, Cannabis sativa
  modified_base (325)..(326): a, c, t, g, unknown or other
tctactaaggattagggctcgagactttccaaaccatccaccaccaatagtcaagagcttcatgctagaggaaactatgactcttgatttcaacgtagagattgattcattgatcaccctcacctgtcgtctttgcaaaaggtgtgctcagcttcctcaacaaaacccagcaatgattagcttggtgtatttgcttccattataaggtatgtatcgattcactttcttgccttttggttgtgttttttggattgattgctaaatattgcatttttacgttctgctttgagtgaaattagggtattctcactgtgcaattgttatnnttggtagatttaggcattataggcaatattgtctttagattccaatgctaggaatttctaaaatttaaccattttgcagcaagaatgttggaaaatttttcctatgcttaaaatccttttgattttgagtattttgttgatgtctattccattctttctcttcatcgttcctgactttccatctggaacgtatgacccttaaaggtttttgttttttgatgatgagtctagtggggacctctccatgcagttcatgggaggactcccctgttccctttccatattaggtagtttgggtagttaattaccttgtttttttttctttttatagagaccaggtctaagaagatccaacaaaatgtgtttgacatggaagaggacattttggagcaaaaagaggctctaaagttggtccttaatgatagtccattggagatggaccaacacgtcaataaatttagcatatataacaacttaaggaagtatgagacccaacgtgggcttgaaaaaattttgaggctgtactggaatagactctccattcacagtgagaggccaagtaagtgcacggatgggggctttggcatctggagttgcacccatgtggagatgggtgcacaccttttcttgggatgttactttgccaatttttgtgtcatagctagagtggcaccgttccaattcatcccctaagtatactgtcttttgtaaggatgatatgtcttttgtgctcagcataacaagtttgcaccgatgccgaaggagatcttatatgttataagattaagttccagcccatgaggggtcataaggagaaggtgggtttctacaagctagagtgccattctaagggtgaagcttgacctgttagttccacgaagtatacacatgacttttagaactactggttctacactttcagtttcctgctaaaaagagtcaccgcatttagcttggactttcatacaacaagtgtttcttctcttcctggatttcacctctcgttttcttccttttgttatatacttatgtgcatttcatatcttctagattatcttctctaatcacccttgactccagagctagaggagaaaatcatgttttacaatttcttattatctaaggaattgcaagtggctcaactggtgaccacagagaatcttcaaaaggtttgcctcattgcttctcattagatgattgacccaatgtctatgaaggagactgttcaggaatcacttagagaggatcctaacaaggtgaggaggctattgtagtcattaccacaaaagaggccttaaaagctatgaaggctgatgaatagtggctcggtgactagaagagcagatttccagaagagttgagtgaagctgaagggctgactatctgtttcaaggacgtggaaatgaggatgctctaggagcgagtacttctagtattggtgagacaccttttcatataattagggctccctccttagtagatttagataatactaactaagggggatttgacccatatttttttagtatagatcaaaataaataatccttgtagtgaattcatagataaaggagattgcattgtaaggaatcctaacaattttgttccaccagtgcatcatcacgtt

SEQ ID NO: 84567 - DNA, 633 bp, Cannabis sativa
ccaacattgcaccaaagccctcaatctcattgtgcttcaaagatcgacctgttcatcgaagagattgtgatcactgatgctcatgtcactttctacaagttcaatatcaagagcaatcaatgggttagtgtctcattcctcttttaactcccattttttttgttgagaatttatataacaagcagaaaatatttttttttttggtgttagatccttagaatcttacgatttgattgtgaaggagctccattttcaagtttaatggagaactctggtggtggtgctctaattagatccaactggttctctcttatttattctcatctgtgtatatatatatatatatatttgatttttctttattattttatcaaaacaatggtggtggtctgagtaaaaaaaaatagatttaagtttttgttggagatttggttcgtgagtgtagcaaacagggttttgttttgttttctgattgtctttgatgtcgacggtggtagttggtgaccgtggctgggaatgggggtggtggctggggatcggcatgggtatgaattgtgtgaagaagacgaagagaaaaaagaaaataaaagagaaaaggaaaaaaaaaattattttatgattttaaaataattt

SEQ ID NO: 84568 - DNA, 592 bp, Cannabis sativa
attaattacttggtatgatatatatgtacgagacaagaagaaagacataagtagtaataaattagcaatataatacaatttctcggtccttacttttatttattaaaatagtaaataaccttgcaatttgtcccatttatatatattataaatattagggcagactcacatagaaacaaaaaaaaatttgaaaaacaatgtatatacattttatagttaattatttataataaaagatatttatagacattacaaaaaacatttatgtacttttaatgacaaatttttagtcataacataaattttgtgactaaatataatgtaatttttagtcacaacaaaaatttatttgtgactaaaatatagttttcaaatataaattggcactaatttacttttagtcacaataagtattgtgattaaaaatacttttagtcacaaaaaattgtaatttttgtgactaatatctttatttacgaacctttcagtcacaaaataagaatagtgatttataattagtcacatgctttttatttttagtcacaaattaataaaaaattttataatgagacataatattaaatttaatgta

SEQ ID NO: 84569 - DNA, 769 bp, Cannabis sativa
ggtccgtcactcttttagattatggttaattatgggacctagataatattagagcacatgataaattaatattgacatatatatgtctatatattaaatataattgagattgtgatcgatcatagatttgaatatatgctttttcttttggttaatttgtttgcctttcatcgagtttactttttcttctttaaaatattatgttaatgaacaacttgggttgattgtgacaccatatgggcaatgagaaatgtatttggaaatatatatatatatatatatatatatatttatatacataagtaaatatattttcctatttaatttggaataataatataagagttgcaaccctacatcattactttttaatctcaactctttttattgtatttccacgtcggcatgcactaacaaagaccttccctcttatgaaaaaaaaaaaccaataaaggaaacaaaaatttgagtgatcaatttgaaccaatagtacatggttacttcattcgagggtattatataaattatatatatatgttcaaatataaaaaatattcacagttatgtcgaatatttttgttataaatttatataatatataataacttttgtattagattggaatacgaaacagcatcgatcattggaagctcaaaaaaacaaattacaaacaaaatttagtatataaattatgtatataatgtgatgtaattaatagaaagaggggaattaagaaaatggttagtacttttcactttagcttaatggg

SEQ ID NO: 84570 - DNA, 1340 bp, Cannabis sativa
atatttgatttgttattgcttatgattctgagcaaattgatatttgatagaatgagattattaagtttgaaaatgagtaaaataacctttacatctggtttcttgttcattgagaagaacaaatttttggatattgcttccctttttatgaattagtaaaatcaacacttgttttaatgtttgatcaggttgcataattatgggtatctttggagaagcagttcctaaaaccattggtaggcttttcttttttttgaaaggaccattggtgggcttctaaatacaatttaagtagtatctttcttaacattgttgtgatcaaattgttcttcgttctgtacatagtcactaattctatactattggtttttcttattgttcttcttattatgatagaattgatcattgaatatcttttctcacataaatttgattgaacgaaaatacttatctttcattgtacgcatttaatcttgattcatactgctctcaaactattcaattttttttaaattaaattacatgtatatgtttatccaattgagatatattcttttaaaattgaaacgaaatagggacccttctgtctggttggttctcctattcactgttttaggggtgagtggttgctttgccaatcacgctttctctgaaactattgtagttaatggagtatgatcgggacctttttggctttaagcagataaatttaaattacctttctcgttattatgttcataaaagctagacaatatatatagttggtcttcacccattattattaatggtgttgccactttgaatagatgtgagtaaggaattagaaaagtaatccttcaaatcattgtattaattgatcgattcttgtaacttttgatctttttctgtttaaaatcttgcatggaatgatacaatctacaaagcagagcttgaatggtcttcttggagcaccaggttagaattagcctttacgactccaagtaacaatactaatcgtgtggtggacatcaaatttgtttgtttactttgccaaattctttgttatggaattattcatcaaatgaaacgatttactatttgccaatctacatgtctgcttgatttcaatcaatgtaaagattcaaatctaagagcactaaaactagcaaacagaaaataaaaaatacatttgtaatgctgggtttggtccattatgtaaagaatcctaataaattgagcatggtttgcttttaaataagcaggtgacttcaacaagacagaagcattgttttcttcaatttctaaatgtagtttattaattagaatgatatcttgcaacttgtcatttattaggagacaaa

SEQ ID NO: 84571 - DNA, 664 bp, Cannabis sativa
acgcgcaaggaaatgcgccgccttgttagcagaacgttttacaaacttaacattaacaaaattcaaatcacttaaacactttctgcaatcttcaaccagttggccaaagtaagagggcatatgaataccacttctaatcgcctgaacagcaaccagacagtcagtctccaaagtaaccccttgccatgcgttgaacttgatccaactgagcgcctccttaatgccaaaggtctcagcgatttcaggagacactcggcctggacagcttttggaaatgccttcaattagtcttccttccgagtctcgagcaagaaagccaaagccaaaacgattttccacttcaaatatagagccatcaacatttaccttaatcatattttccacaggtttagtccaatgctcattctccaacacttggttattataaacaagtaaaggatccattcttctttgttgagcacataaccattgattaagattcgatcttgctgaaaggactacactcgcagctgaacttatcttttgtttccacaaaacgtcgtttcttgcattccaaatctgccaagcaaccatcaaaacttcagcagccacactgttattcgtagcagcagtaacattaacaaaccagttcttgaaatctgtcacattgcctgaaatgcaacta

SEQ ID NO: 84572 - DNA, 1588 bp, Cannabis sativa
  modified_base (597)..(600): a, c, t, g, unknown or other
  modified_base (1197)..(1207): a, c, t, g, unknown or other
aaaataagggagaatgggaatcatcaaaataaatctggagttataggcacaaaattacatcattattgttctaatatatattgggttattgtaatttgcaatacttaattatatttttattttttatttttgttacatgtatttttaaaattttgtaaattaaaaaaaactacttattatttttttttaaaaaaaaaaagataatgtttaaagttttaaaactttgagaaaaataaatataaaatttaaaaatattaaaattcaacataatctcaatattaaaaaaataataatattataaataatttattaatatttatatatattttaattaatagtttaattaattttaaataaataatattaacatttatatatctatcaattaatataaaataaataatattaattatatatatttataaaactaaccctattaacagaatattcttatattcttaaaatattatgttaaattattaaaatcgttagatagccacattttatatataaagagatatacatatataaacattattcttgtttataaatagtacagggtaagtctatagtacatgttaattccatttttggcannnntaattgacaaaaatattttattatatattattaattttggctggagtatttaaattggtttccatattttgtatatttaacttttataatgatcaattcaattttggaaggaaagttctctagctttcctatttatggaaaataaggtaaaaatggtaagtttggtaacccaattctttcttacctaactagctgttatattctgatcttgtgtgagtttcccatttgtcagatttcttgaggagaaaatcgaagcttaactttcctttgctataaaagaaagtcgcatttactactcacaattctgtaggtattcctaggctgattgaagatttattttagggaattttctagaagaagatccaagtctcgaaaagatatcaagtgttatcattgtaacaagccaggtcacttaataagggattgtagaatattgaaaagagagcagaatcaaggaaagaaaaatgagaaagagactaatacaatttccactaaaggtgatgttgtcattgtatgtaatgatgggtgtgttaatcttgctacccaagattgaagttgggtgattgattctggcacttcattccatgttactgctcnnnnnnnnnnnttcacttcttacactactggtgatttcggcaatgtcaaaataagaaacagtggtgcatcgaagattgtgggtattggagatatttgcttagaaatcagtgttggtagcaaattgattctcaaagatgttaggcatgttccagacattcgccttaatttaatatctactggaagacttgatgatgagggggttcataaactgatttggtcaaagtaaatggaagctcaccaatggttctcttgtagtggcaagaggaaagatagtgaatactctctatgttatggaagctaagctacacaaaagagagatcaatgcagttcaaaaagatgcaaacattgatctttggcaccaaaggctcaatcatatcagtaagaaaggact

SEQ ID NO: 84573 - DNA, 722 bp, Cannabis sativa
gtaaatatatatgtttatttataaatatttataaaattatataaaattatgtaattatgtttttttttttgcatattttttataatattgtatacatttgcttgtatataaataaaaattactacccaacataactaacattttttttaaagagaataaaaatagtattattataatatatactaaaataaaagataactgatattatttaaaaataactgttaataataataaaaactaacaatataaaaaattaaaatcgataaagtttagtgaaaacatagttattaaataagataattatttttcaaaaattgatcctaataaatagtaagatataaccaagttcataaaagatactaactgtcttaaaaaaaataataatattaataattgtcacaagaaaaatagataataattacattattgagaaaacagatcaagttttactgcgatattcttacaagcaaaaagaatttgtaagatactctaattagaaaaaaataaaaaaaacttcttccgtgtgaatctctctacctggcttaactctggttttgctagggttttcttccccttcacctaatcctttcaaaatttattgctttagccctcctttcctctgttgacttttctaatcgtgtttccatcattactaaggcaaaatttcaaaccacaaatagcataatccccatttattgccctattacccatttaatgctgac

SEQ ID NO: 84574 - DNA, 744 bp, Cannabis sativa
cacgtaacatctatctagtaattacataatatattgatagtaataaaattattattttgagaattattatcatcaattttataaataaataatattttttaattttttttttatttggtggtcaatatttcattttataatataataaaacatgattattaagaagttatatcttttattagattagtaattcattttatgagataaaaaaaaaaagtatattataagagtgttacattttggactagcattgtcataagtaagaacaattaagatcatagtggatctaaacttgtgaaatgagtcataaaattggaagaacaattttattttacaaggcttatgtattcagaataccttgattcttgggtcctccttttctttgcagaatcactccgatttgggctcttcaaactccttttgctccgtgactggattatattggactctagaacttttactttttggtttgtttgtctaggagcagcactgtatccggtttgttcagatccgaacccgaaaaaactagcttgtgcagatggctgcacggaagtacttggtccataaaccgtaggagttgtgaaggtagttggtggtggtaaatggatggagttgtcatctgcgtagtttgggcatttgttacatcagtggaagatgctggaagtacttcgtaggcttgggtgtaagcttcttccaagtttatgaatccttgggcccttgtcaagaagtcagtcaaagtgtctg

SEQ ID NO: 84575 - DNA, 578 bp, Cannabis sativa
ttcttctcaatttggttggaacttaatatcattactacaccactttggatcagcatagctcttccatttactctataaagtaaacatacgaactcgaatctttcctatggcctcgctcattcctaaatcacatcaggagtgccacatcaacaacactctaataactgttaatacatgaaaactcaatcagcagaagatacttatttcagggaccctaaaaatatatcacacatgcttgttacagactctctcagcatttggatgtaaactttaaatctcaacctgagataatttcttttggagcatcacagggttgaactattcccttgacaaatagattagtacactaatccaccacaaacatattccactatgataaagaaattgtactgatcttatatatcttagttactcctgagtataaagagtatattgtagtatgaaactcatttagaaccttctattcaatatccttatcagactgatacaccaaccttgtctttatattataaaattccttcaaacggaatcaaaaagtcctttgtcaatctggttccaagcctttccttgtacttcta

SEQ ID NO: 84576 - DNA, 705 bp, Cannabis sativa
atcaatttctttttgtgatttattatatttatttagcaatttttttttctacaaagaaaaattctagattttgaaagttatctatatttagcctattcactatatacgtgttacaatgtcaaattattaattttttatattatcatttttctctcttagaaccgatacttatctgttactagatttttcaaaagcttactcacagtatacgtgttacaatgtgagattattgattttgcatattatcatttttttctcttacaatcgatacttatctcttactagaattttaaaaagcttactcatagtatatgtggtaaatttatgtgtatgttagtgatgagtcaatattaatgtcgagtcattatatgtacgtgtcattagattcatcaaaatacaagccaccctcttcttgaaaattagtataagtatactactctaatacgatcataatggtacatcaaattgacagggtataaacttttctttaaaaaaatttacttccatttactctctttggctttatgcttcccgtattatcagtcactccaaaaaggtatctctttttcgtattgttatgttcaatatggatttacttgtagtcttctgtaattttattgcatctgatgctggattcgtactttcgtattgaactattcgtttctcttggaccgtacttatttttgggttttgtccccacttttt

SEQ ID NO: 84577 - DNA, 819 bp, Cannabis sativa
gaaaccttagttgcaaatgtgtcaacctcggcgcgcgccgagtaaatcctaggtgcccaagttggcttccatgttgcgggttcgtgtaattttagctcccatagattgcattaggttgctccatgtcttcatggtacataatactgaaagatagtgagttggattcaagttgttaaagttcaaagttctattccgaagttaacttgggcatagggctagggtcccctgccaggttaactgctatgactcgagtctactcaactcgatgatatcatccttcgtgccatgtttcaaatattgatgtccacatcaccgagaaaagtttctgagttaaaatttgacccccaaatcaactttacacttgtgtagtgttttgatgacgtgcattgagcttgcttcacttgaaactaccagatgggcatcaattttgatattcttagtcaattgtatctgttcttcaagcatttccaactaaattagaacttcgaactcttttgcttagtccttgaaaattttgaaaattaattaacaaagaaaaagagaaaaaacttatctttaacctttttctttgaattttttttttttattattatttttgtcatggaatgaggattaattggattggaatcttaatcctactaagggatggcattcaaaattagagagagagaaaaaaaaaaaaagaaaaaagacttttggtcttttacttatcatttatctttttgttttaattctctaattttccttaatcttaatagtattgggaattattgttaccttctaaatttagattcttattcctatttgcataggaatttc

SEQ ID NO: 84578 - DNA, 974 bp, Cannabis sativa
tatgtatataattttattggcatgctacatgttgacctcgcttttggccaacgacaatgagtcttaattgtaagcgaataatgatataatataattgaaataataagtaaagacacaaagtttttatagaggttcggccccgagcagttcggtaatagtctactccccttgatttgtattgactgaagaacaaagaatgcagtgattcttctcttagagcttttacaatgatatctctgagtatatctcttagataagttttttcgaccccttgcccagtgagaatagatcactatttatagggctacaagccttgagggaaagtttcccttctgtttacaatgtctatatttggtaagattacacattaaatacagaatgtactgattaagggatctggatagcttgccatatctctgtaatataatcccagaattatagggattgcttctgcgattcacgatgcgagtgttgaagttgctaagtgttggcacgctattcggaccgtccactgcccggccaggaaggcttcgttcgtgcagaaatatgcgatgctctgttcggcatatctatttcgagcagatatgtgaagtcgattccacgtgtcaccagtatgtgatgccacattagagtgccaaaattaggataatatttgccccccaagtctgtacgggacttcctgagttgtgcgtagacttcatccaagctgcctttgcatttgaataggtgacatgtgttaggcacgtctgttcatgattcgatgtgaggctggccagacgtctcctcagttttcggctaattaatgctttgacttaatagttgaagtggcctttgttggttagtatccctggaggaacatctagtcacaatactctttccggaacgagttagggtttgctttggaaacccttacactgtcacttctagccttctttgggaaggagaaagacaacctactgttgggttttatgccc

SEQ ID NO: 84579 - DNA, 963 bp, Cannabis sativa
ttgttcagttgtatgtttttttttttgggtattttgtattttcttttaggtgtgttgcatctcttctctctcatgttccagaagttctttttaattcgaatcaaaaccatcaaaggaactttctagcttctcctccaatgagattgatccgtaagaattatctccaatgacctatatctttgtctatatattatgttctgttttttttttaataattttcgattttgttttatttttaacatatggaagaggtatgcattttggtacttggtaatgattgtcggagctaaggacgattgctggccggaggtgttgataatcactgaacactacgagagagagagaaagcaatctactcacacaaagactttttttaagtgaacactaaaacaaaaatactatatatatatatatatgtgtgtgtgggagatctatttattgtgagagaaatttacctttgattattgtcaaattaatccttgagtttgtagcctctcgtctaaaataatttcttttgtgaagaagaagaaaattgaagagctcttttgaagagaagaagagctttaatcctttttctttttccttaaaaaataaaataataataatggcatttaatattccctttaagaaaataaataaataaataaataaataaataaataaatatcacatacggttgccagtttcttctatttttactcttactacacagtacataattcctcactcttagattccaaacatttaatttgttttatcatccaatggtcacaatgtgttgaggtgttgaaaattagtatattgataattgctgcaagaagctacattatcagagaattaaaattagtatattgattaggaatgtcaatggggcagatccagattatgtacggatctgccccgccccgctccgctggatcagatactcggatcggatctgatccgacccgtcttatacggatc

SEQ ID NO: 84580 - DNA, 875 bp, Cannabis sativa
  modified_base (34)..(35): a, c, t, g, unknown or other
aaaaagcgtgttctagggatccctgttataaaannttttacaaaagaactatatatgacgacaccttaaaaacataaaacaaaaatacacagtagattcaaccttaaacaactccttgcaacccagcacctaggctggtgaggtcaatatgtacattattggagaagactgtacaaaatcagaatcaaaccatcacgcattgctcataagatgaaatccaaatcactactagcatctgccacaaataaacatcagagtacagatatttggtaatacaaaaccattataccaatagtagaattcatattcatttaatcatataaattatttataaatatatatttgttacctcataaagtaactattatcccaatttttactctctgatgtggcatcacacgctggtgacacgtggaattaactccccatatgtgcccaaaagagatgttccgagtagaacaccacatatacctgcacagacgaagtccttccagccgagctgtggacaatccaaatagaatatcaacactttgcaacttctgtttttgcatcgtgaagcacaaaagcaatccctataaatctaggatcgtatcaatgagctatggcaagctgtccaaatcccttaatcagtgtactctatatatgtaatgtgtaatcttaccaattatagacattgtaaacaaaagggaaaccttccctcaagcccatagccgtaaaaatagtgatttattctcactgggcaaaaggttgacaaaaattatctaagagagcatactcagagaagtcattgtaagagctttaaaagaagaatctttgtattctttattcttaagtcaatacaaatcaaggggagtagactattatcgaactgctcg

SEQ ID NO: 84581 - DNA, 1546 bp, Cannabis sativa
  modified_base (48)..(67): a, c, t, g, unknown or other
tttatttacattgttttataaattcatattaggatgttaaacaacatnnnnnnnnnnnnnnnnnnnncctggtaaaataatttcaacataatatgctttcaaacagggggtattttctatactatatagttttatttctaacacttcatgtaagttttcttcttataaaatattttaccaatcaaagtgtcaaattagagattgttaattccacatttgacatctttcaatcgataaaaatattttataatttaattattatttttggctgagctttttagtttatttctttaattttatttttatattgattgaattatataaggaaggagcttttctatttatggaaagtaaggtataaatgttaagtttgattactcaactaatttctatctatcgttgtgtatatatgaccctttgtcagtttcctaaaatgtttgattagattttttgtgaagaaaattagagcaagtctttccttttctataaaagaaaaatcgcgcttactgctcacgaatatgtagttacagaacatgaaatttctgagttgattgaagaattttttcagaatgtttccaagtgagttgtggtcttgtccagaccatgtatgggcaatcagtaaggtgtatattaattataaatacaccttataataactaggtaatgtacctctttcacatctttgtatttcattcatatcttgtaagaaagaatgtctttgttgtatagaggagagggtgttcgtctcttcctctgtgtttatgtattttgtattgtctgagtttgtaatcaagtctacaaaagaagaataacagtgctacctttgggagaaggttttacaagcttttgggagataacttttcaagtcttgtctcgagaggaagcaagtactctccaaggagatcgaagggagttcgaacacttaaagttttatcaagattcagttagaaggcggaatacatcaagtttacgacatacaattagagcgagtctatttgtacataagtcaattactttgtatttttgtgatctatctaatgaatctaagctctgggtggactagtaacaatgtctgcaagaattgttgatatcacgtacaaatatattgtgtgtttttatttttctacactgtttgttttttagttttattctacaattatagaattgagttctataactacaaaataactgtttcagtatcatatttattatttcccatttaattatttgattaattaaataataaattagtaatattaatattccttgttcaagcttagtagtattaaaaaattgagttcaggctcctatttttataatttttaaaaatatagataatctattttgtcatttaacaaaatagagagtttacttggtaacttatgtaaaatacaggatctaaaaaaatatttactttactttaaaattatacggggaatgttgatgctgtaaaaatttatagaataaatgtttgcaattaaatattgaagttcttaaaaaaaataaaagaaatttacaactcttttacatattattattattatta

SEQ ID NO: 84582 - DNA, 711 bp, Cannabis sativa
aaaaaaaaataggaattatattgttgacttttctttttttggtggaaccaaaagagacacattatgtactttctatataaaagtttgtaacaatttaattatttaattttttttagtatgtaaataagtgtttagaaatttataaaaaaaaaaaagtagaatatgtatttacagagttttttttttttttttttttttttgacaaatatttacagagttaaataagttgaaaatctagtaataaaatcatagttagctttttgtatctctcatcaaaggtttccaaaaaattacacttatttttcaactaaagtactttaaatagatgctaattaattaactataactaactatatgggctaaaacagtaaaaaaattatttatcaaccatatattaaaaaaaacaattaaaacattaatataagcccccaaaacaaaaatctaccatattgcatgcaaaattgtaaaatatagtttcaaacttaaaaactttagttacaaatttttaaagttcagtttaaaaaaattgtattgttaaaaatttaaaaattttgttaatagaaaaatatactacatatattttgtaatttttatttttatatttcgtatttctttttaaaaaatttccattatctaatttaaaagattttttctattcaaaacatattctagatcatttttcttttaataaaatcaaacccaataatcata

SEQ ID NO: 84583 - DNA, 1215 bp, Cannabis sativa
ttagtattgcccacggttcttcacagttggcaatagctatcccaacggtttttttccatcggtgctaaactgatggaaaaaacctccccttaccttttccatcggttctcataatttaccctcttattaaccgttgggaatagtcctttttgtagtagtgtaaccctaattaattcatgagaatcaaataatagaatatagattagcagaagcataccggagtctattgaatcgcttgaaaaaatgtatgatcttccaattttgcattaaaacttttgaagccttatttttttgaaaatggggaatcatgaagtctagataataatacgatatgtgaagcaatgcaaaaatgaggatcaatatctgtttattaataactgaaaaacagtcattaatcctttttgactatttctaatttggcccctcatcaaattaaaaattatctttatggtatctacatattaaaatcatgacaattatgccattaaatcataaactttattccaaaatagaccacataaatttgacttatttatttgatgactcaacacacattttatatatactattgtgaccacaataaatttctaacaatctcccactggtccacatatgtataaatataatcgtgttaaccttattaaactcataactgtaggcatgtgcaatctcgtctattagctatatcaacataggatcaaagcgattttcgttgtatcaatcacaactaaacccatcaatggttacatatatcaatatagttaaatcatgacatagatcaatcatgataatgtggtatgaaaattacatttatggtgatctatttatgttaatttttaattggtattactttactttatcgagattaaaactttagcttacaaatctgtgtttagggacacacaaagacgataccaaagaaatgagagataaattttctcaccttgaatcttttagttgaccctacttcaaataaagccaatttatcaatggtatttttaaattttgtgagcttcttaaaataccaactagaatctgaattgaggagaaacaccaaaaaacaatctcttttaaataaatataattcactcattttaatcagaaactatcatactttgttgaaatggcccaaaacaaactttaccatcaaagctacatatatgttgaaatttcgtattttaatatttccagttttattatttaattaaatgcaga

SEQ ID NO: 84584 - DNA, 1221 bp, Cannabis sativa
cgccacaaagttctctggtggagcatcctctcacacgctttacctattcgatctctcctcgctaggagattgaacattaattgaggacgtctcttgccctctttgtggggagggttaagaaacgatggggcatctattcctctattgcaattttgcaggttacctatggaggtcgtccccctggggagttattccggtgctcaaatttggagctcgggtctgggactaggtgtagttcctttggagtcttaaaactagaggcggggtgatagttcaagattcgttcctttatgcttcgattttagtggacacaatttggaaagcccgtaatgacaaggtacacaattattctctgattaacctcaagcattgtattaatccaatctctttttgttacatagattatagatcttgtctgttggattcattgaggaatgatagatcttctatttggaccgctccacctgtaaattgtgtcaagatcaactgtgatgtgaaagttggctgtggctcgatgtgtgtggtgactttagctagggatcatacagaggtaattttgtggatagctaccaacaagctcaacttttctgatcctcttattggagaagttgtagcctgtctgttagttgttgagacaacagtttcgtgaatcacccttttgtgatgattgagagtgagttagacatggttatcaggatgcatgtaaacgggaacttgttccagttagagtattggtaactatgttacccaatttaaacgtctctcttatcattttttaagttgtaattttttatctgtctataaattacgtaactttgcagcccataatgtgactaggtgggcttttgctatgaatgtttcgagtatggtggatccttcttccataccaattgatattttatgtaatgatcatgaggtctaactttattgttttaaatctatgtatgccgtttattcaaaaaagaatttagtttttgaatttgctgaaagaagatgtggaagttagtactatacatctttctctctaataatttagaatttggatcttataggtataattttgtttaaacatacttaatatacataatataaatgtttgtaaaacttttttggggagtgctacaacctcccaaagtctacaagtgtccgtttgtaaattcaaaactccaaataagctaatattaaatataagtggaccatccaaggaaattcagtgaccag

SEQ ID NO: 84585 - DNA, 548 bp, Cannabis sativa
  modified_base (40)..(41): a, c, t, g, unknown or other
attttagtataaattaaagtttaccatagtattatataannatatgatatataatccaatttaatataatacaatacaatataatacgacctaatacgacgttccaaacgagctcattctgtgcattccaacacactgtaactttacgagttacaatgttgatttataaaacaaatttactgtgatgatcaatgagagatgcaaggtagataggtagggggtggctgatgacattaataaatacctctttaaattatattcttatccacaaccacaactaataaatccttctcaatttagttggacactgctaattattcagtatttatatattatatgtgttaatagatacatgcgcaatacatataatttaagggtatgtttagtttataggagtagaaattgtaatggtcatcaatatgttcattattttgtttactttcttttctttttttttttttaaattttgtaatccatttcattgtacagtagaacctctattcaagaatacacttgggaccaagaaaataatattctaattgagaggt

SEQ ID NO: 84586 - DNA, 830 bp, Cannabis sativa
aaatggcttgcctctatgactgatgagtttgcttctcttaaaaaggctgacacttgggttcttgtaccatgcacaccaggaatgcatgttattgaaaataaatgggtgcataagatcaaactgaatgcatatggctctctcaatcggtttaaatcaagactagtggcaaaagggtattacaaaccccaggtattgattatgaagagaccttctccccagttgtaaaacctgtcactgtgcgtactgttctttcacttgcagtatctcagaattggtccattaagcagttagatgtttctaatgctttcctaaatggtactctccaagagacagtctacatgaaacaaccttcaggctttgtcaatcctgaaaagccagatcatgtatgccttttaaagaaagccatttatggccttaaacaggcccctcgggcctagaatgacaagctcaaaagctgtctatatcagtggggtttcattgcttcgaagtcagataactccttgttcacttatggctcaggatcgaatcaacttatacttctagtatatgtagacgatatactagttacaaggccaaatatgtctctcatcaccaagcttgttactgacttgaatcatcaattttcactcaatgacttaggagaagtccattatttcttgggtgtcgagatttacagggatcacactgggatgtatctatctcagactaaatatataactgatcttctcctaaagcttcatatggaaggtgcaaaaggttgtccaaatcctgcaagtgccagtttaaaattgtctctcacagaaggagaacccttctctgatattactctg

SEQ ID NO: 84587 - DNA, 657 bp, Cannabis sativa
caacaattttgagcaaaaggacactgaacaagaccatgtaaggaagtttctggggcagccaagcacatgggacagtcggaattaattgggacatgtttagttgtaagctgaaatcgggtagggaggctatttgtgcacacacgccaaagaaaatctttgactttcggaggtaatttgagctgccatagctttgtccatgcaccagaaaaaaccggctggtgattgtttaatttctgctgctgcagaattctatacgcacttcgcaccgtgaacaagcccgaagcctccttattccaaaaccaaccgtctctttcaacgtccgatgacaaaggaatcttccacactaattcttgatcccttaccgtgagcacatcccgtaagacttcctcatcccattcacgcacattatctttcatgagtgagtccaccattttatccactaggcacaattgttgagactcaacaaaggggttaacatcatctaaaagccacggatctttgagtatactcacggttgagccattacccacaagccttcttactccatctcgaaccaaaccttgagcctccaaaacacttcgccaaatgtagcttggattattgcctagtgttgccgtgaggaaagagccattggcaaagtaccttgctttgaaaatc

SEQ ID NO: 84588 - DNA, 1603 bp, Cannabis sativa
ggtggtgtagtcttttaagagaaaaaatgagtctgtagatcaatttattatttatttttttttttttaagtttacttttactgaagtctataggatagactattagctgaattttagccacaggaagactgcttgttgggtcctccagataaggaacaataagatctgcgaggacaatgaagacagtggatggtgtatggaaggaattagttgtgtgtgtttttggttatttgatgttttgatgttaaggaaagtattatgttctctgttttttttaaatgtcttattttgtaaatggggatttcctttgcatgcgttcctatctgctataacttgtcgtctttcttttcacaaaatgttgtttctttaaaagaaatagagtctcagcggacccccttaaggtcgtgcaataactattcacaatttggatcaggatcatttgaaaataggtgtgagaaaaagctttggaatttgaccagcttagcattatgctggtcgcaatggttattataaagaaacagaagagtttttaaagataatcaagttttgaggactcttttactgttctctcttgttctactatgcatgtgtgtatggcttgatggatgttaatatttcatgacaagccatgattaagacaatttatatgttgtatccctttccttacgcattttgttgtctccctatagctacaagactcatttaatgtatgttgccaggcagtacatacatgggaaaatgacatcaagttggaaggcatttggaattcctcttgtagcaaggctttctgattccatatgtgggtctgatatccgcaacctgtatttggaattgcttaatcccttaaaagtttgtgctaaaaaggcttcggacaacctagatggtcccgaaggcactgcatctgaagatcctacacagaatactgtaaatcctgatattagtgggactgtgaatccctctgttgtaaaagaagccaattcacccttagatgacaaattacagttttacttagcagatgagaagggaacaagtagggaatctgagatactgatgaatgagcctgtaattttgtcaaagaggttgaatgttcttgtttgttggcctggaaagtgttttgaacagcagtatgatactcacctcctttgctcgttgcctgaggttttcaagtctgggcttttcgcaaagagacctcaagagtctgtgtctctgtataagtgccttgaagcattcttgaaggaggagccgcttggaccagaagacatgtggtaagtgcacatataccttaagcatagaaaatgtgttgcttgtatatgctgctgttttgtattagattgtgtttgagtttgttgcagctgtaaaatttatggtgagctttatattcgttgaccttttatgttagcacttgcttcctgtataatggtcacttttttcctctattgatttctttcttttttttattttctttaaattcttcgttctcaataggcaaaagtttattttatgttcatccattaccaattgctattttggttacatgatttactgggtattaccttgtttgaactatgctgtgattggtgatttctttttatcattatttgct

SEQ ID NO: 84589 - DNA, 571 bp, Cannabis sativa
aatttagttgattaatattattaaattattggttttaaattaaaaaataatatttcaaaaatataagtattcaaaattatatatttaaatatatataattgaatgttattattatagaatgaagagaaagatgtatatataattttttttttaaattaaaatttttattcaactagatcaactcagtctcagcaataacatcaacatgagaaaggtgattagactccaagaaaatataatcagcaatagcatgtaactgagatgctctagccacaaggtgagcgactcgattagtagatcgtttgacaaaatataaaaaaacattactaaaagaaagtagaagctgtttacaatcctcaacgacaccaccaaaagtggattttcacacattcaattctcgaacaacttgtacccagggccgactctaagtataggcgggctaggctcgtgcctagagctcactcatttgaggagcccaaataaaaatatacattttaaaaattatacatatttttttaaaataatttttaaaaatgctatttatctatatagtaagggccaattttttttt

SEQ ID NO: 84590 - DNA, 743 bp, Cannabis sativa
cagcataactgctagttctattacattgagaaataaaaataatagtaaaggagctccacacttgttgaatggtggtttgttataatagaaattgtaattaaattatctattataataattgctttccttttaaaaataatgtaatagaattacattgtaatcataattatattatacaatggaatctccactacaggagaaaagttatgtaatgaggattacatcacaaaaaactaaataaagtaaaattaaaatgactctaatacctttttttaaataaatataaaaattaaagtactaaataattttgtcaatttatcatttattctaatatttattctaataacaaaccaaacattttaattaattcttattattattcttatttcattgcattactattatcattaccattactattacattccaccaaactaaacatcacttacacttacgtctgaatatgaaagaagccaaggcggagacagagaagcatttcttaaaaaacatcaacagcttgagctacacgaggtactaataatgccttcaaagcagttgtagcagcagagaaaaaaactgctaaaaaatactattggtgcctagtactctccttagtgtaatatcgttattggtatagttaagtattgagtcctatataatttaaaaaaatagcttttaagaaatatcgctaaccaataatagagccccacctataaaaggtgttcggcactactagcgtctaa

SEQ ID NO: 84591 - DNA, 940 bp, Cannabis sativa
tatattaaataaagtgtgcttgttgactctaaatctttcttattaatgcgattgtgcataataaacaagtgtggcaataaggtgagcatttctaatagcacatcattttattaaattggtataaaatttttatattattttactctaacgacatagcaaattatgtactaactttaatgatgttggattttaaatctataccagtataattttattttattttattttttttttgcattctatcctttagtttaatttattttaaaaattaatcatatattttagtcctcaaattaaaattcaatacaaaagtaataactaatttaatatactaacatttgaaaaatacaaaataataatattaaataaaataaaaacaacataacactaagttatgaaactaaaaagaaaataaatgtgattttatttaagttttcttttttaataaaaaatgtttaattaatttaataaatattttattttattaaattattttaaaattttaaattcttactaatagtcatcatattattatatcataaattaattattttaaattattaatgtaaataatataaaatgcaagatttttaagtaaaatatatttatttagtgtgatatttagtataatatttgacgaaaatcactagaattgtttcaacgaaagtaaaaactccacaccaaattagtatagattttatattaaattgatgtaaccattagagatggtcttctagactttggcttttaaatagtttcgaataatcataagtgatttaatgtgatttaatttaagaattttgtagatatttttataaaccaaaataaaatatataaatcaactaattataagttttttttttaaaaaaaaaaaaatcaataatatattatgttaagaggcctatacttagttagtatttatttatttattttagaaata

SEQ ID NO: 84592 - DNA, 536 bp, Cannabis sativa
gatgaagtaactgtaatgcaatacttgagaactgccatcgttgaggaacgcgagttcaagcaactcgttccataccatggagcgtataactcgacgaaacactaataagaatccaatcgatcaatgcaaaaaaaaaaaacaaataaaactccataccatggagagtgaaatggaggagtcggtagcgtgagatagaatgtttgattttgatttcgaacgacctgtccttcgcattgctattgtggtcgtagtagttgttgttgttgtcgttttccctgttgttgttgtcgttttccctgttgttgtaccaattgctgttcctgggttcggccaccaccctagaatttctgtaggagttgggatcataattcttctccatgttcaggtcgtaaaagtatttttagagagaaaatcgcaattacaaattaaattcgaatgagattttttttttgcttaatattcgaataagaagttaaagtaacgattgagattagggttgagagtgagaaattattttttaattttttttataagaa

SEQ ID NO: 84593 - DNA, 1059 bp, Cannabis sativa
cgtatccactactttgaagataagagtaataaacagttatgcgaacttttagctatacacgtgttaaaataggacgtggtcaaagcccacgattcggggaaacaattatctatttcaaattcaaatataaataactgtcaacctatattcttataaatagaaacagattatacagaaaaaggagacgaaaaatcttttagagaggagaggtcactaattttaaagacctttaattctgtatccagaaatatctgaataagatagattcgtggactatgcagagttaactacaaaactacgtaaaaatctggtgtcattattgcttctattattcttctcaaatttcttatagtttctgtgttaaatttattacgataaaggcttattaattagttaacgaaaatcttcattaacagttcctttttaaaggctaaatcgggcgggtattgctcttttatctagtgcagtattctttagaaccggtctttaatagtcaaaagaaattgttggagaatcaagtcaggaagaggtgtgaggattaatgaagacaagtggctctctcgacctcgcacctctactcttcgtattcctgttggagtagccccgaatcagtttttaaatactctgaaaaatgaagatggcacctagaacaaagcttttatagctaacacattctatgataatgatattcttttagtttaagggttggtcccttatgcttccatggctgatgacgatttaatctagcgctgccatcctcaaggcggttataattttaagagtgggtatcatgtggcttctcactctcccaatgctccgggcagctcctctgtagatcagatggagcatgaagcagtggtgacactctttgaaagttagaagttcctcctaaagtttggaacttcatttggcaaattttccaaggttggctcccaactgacaaggttttaactcatcctggaatgaagattgatgaccgttgttgttgttgtaggtcccatattaaatctattcctcatgccctttggttctgctcaattgtcttgaaaatttggaaaa

SEQ ID NO: 84594 - DNA, 503 bp, Cannabis sativa
tttgtggcagtaagaaaatattcatccaataatttctcagacccaacagaacagagttgattagttgacatcttcctgcataagacagatgtctactagcccaagagtgcaactggttcttgatcttcttgagaataaccccacaatcctccgctttccacttcgttggtctcattggaaccccgagatactttaggggaaacatcccctcctcaatctgtaagatgcctagaagatcagatctctctctgttagagataccaccaaagaacacctgagattttgcaagattagctttgagacctgttttgttactaaactcttcaaaaattcgttttacacaagtcaccgagcccttatttgctttgcagaaaataatgagatcatctgcaaaacaaaggttaataatcttcagattcttgcattgaggatggaaccggaattccttctcacttgctccttgctgcaataaccgagtaagatactccataaccaacacaaac

SEQ ID NO: 84595 - DNA, 1480 bp, Cannabis sativa
tttgaaatagagtgagtactcttttcataaaactttaatttaatttttgtgtatgggggtagtggtttatccgtttgtgtactttaactcctttttaataatattaattttacttattctcctgttattttggcgcgtactttcttatccatgcgtttaaacttcgtacggagttctatttcgtatgttgtacttgctgattgtccccttatggttttcatggtttgcgtattctcgtatcgaatgcctttttataaaaggtcttaattatgcctttcgtgaaaggtctttgtattgccttccgcaaaaggtctttgtattgcctttcgtaaaaggtctttttattgcctttcgtaaaaggtctttatccctttcgtttttgacttgattgatattttttcgaagccccttttttcattatttaaaagagagagtacgacgacagttatcgtgaaatttggagttcctagcttttagtttatacatagaattttttgaggtaccttgcattccagcttcttgtgatctcggctccgtccatggtggacagtctgtacgctctgttccccgtcgggcttatcactcggtacggtccttcctagttgatggataacttcctcgctcgggcttcttcggtattctgaaaaacttttcttagaactagttctctcgggaggaagttcctgggcctaactttcttattgtattactttgccaccgcggaatagtagttctgcattcgggacaaggcgcactcctttctttcctcgacgtcgttagtggcttgtagtctcaggaaagagttgtcttcgttacttagctcggatcgcgaagtgggcacttgcgtttccgtcgggataactgcttccatcccgtatactagcgagaacggggtttcacccgtactagtacgtggcgtggttcgattggcccacagtacgccaggcgattcttgggcccatcttcctttagcgttttcgagtcgctttttaatgttgtttatgatgactttatttgatgactttgcctgcccattgctctgcggataacgtggtgtcgagaataagagtttaattttccattgttcacaaaaacttctgaacttttggctgatgaactgggaatcattatctgctacaatctcttgaggcagcccgaacttgcatatcatgtttttccaaacaaacccctccacttatctgtcttttatctgagcgaatgagtcagcttcgatccacttcgagaaatattcggtgagggccaacatgaattttttctgggccggcgctgttggcaagggccctactatatccatcccccatttcatgaatcgccacgggctttggacggtggttagttccgtcgggggaactaggatggatggagaatgtttctggcatttttcgcatgttcgtgagtaatttgccgaatcctcctagactgtgggccagtagttcccctgcctttgcaccctctgggc

SEQ ID NO: 84596 - DNA, 806 bp, Cannabis sativa
tgggcattgggctcagtttccaaggccttgaggttgtggttctctctccaagattgcttgtatctttgttatttctaatgatggaaaaaatgtcatgaacacatttggaaaactggttgaaaatagcacagattgacaatatgtaaacctaggcactgggtctagtttcaggtcaactaaaagttctatttgttccttgaaaatagttgaatcttaatctttgcaaaaaaaaaaaaaaaaggataatatgcttggaagacttttcagaaaaaaaaaaaaaaatcctcaaaaatggcccgagatgacaaaatgtcaacctgggtaatgagcctttgtcatgggttatttcttccttgaaagcatttatttccttgtttttaaggaatacaaagaagatacatgagccatacttccaatctgatgcttcagagtggcctagattgacaaattttcaacctatgcactagggtgctcgggcatcgggtttctgggtgctcagaaatgaaagttctctaagtttgattctgatacctaaaatatgttcaaggtatgtctagttcatgccccaatggaaattttgacccatttgcactaagacgatcttgaaaactaaaccctagttgaggctgtcaacttgggggataagtgaaaccctaggtgcccaagttgacttacaaggtgttagttcgtgtattttttggctcctaaggcctagacttggttgctccatgtcttcatggtacagaatactgaaagatagtgagttggaaataacttatcgaaatccgaacacccattctatgttc

SEQ ID NO: 84597 - DNA, 585 bp, Cannabis sativa
tcatctactttatattattttataacaacacgtatatatacttttctcatattgttatgctaattttagagagattttagatcgccacgtcaccgcctcatacttctcttttataatatataaaatattaatttgtaaatttatgctctaagattccaatttgtgattgtttcattaaagatataatctctctaatttattaattttttttttacttttaataataaagtacataagtgaaaaatctaaattcatgtatatgagaacaaatacaaatataaaaggtgatttgtcattataacaatgcataaattttctaaaattgtaaaagtgattatccaaataatttattagagttcaaaaaaaaaaaaaatcattagagatttacatatctaaagtcattgactctagatcaagagcaatagcctcctatcacaatacactcattaaaaatcataataaacaaaaataaaaaagagcatatcataaaagtgaaaattatctttcttaattcattaagagcctttctatagccttctgctcctatcacaatgcacactcattaaaaaccataataaacaaaaa

SEQ ID NO: 84598 - DNA, 684 bp, Cannabis sativa
caaccacaatcaaacgttagtaaacccagtaagcttttgaccaggagcaactaggttttagtttccatcaatacagcaggtccatttaaaataccatacatctataagcagcagcaacaccataaaaatccacaagctcactagaggttaaagaggaatttaagctgccatttaatagagactaaagaaattcaagacctggactactggccatccaaaacaataaccaatgagaaagaattcaattcagaaattgcatagatcttcaaactagcttttcagtcgcaaagaaagacaggattagataacatgaaaaacagaacttgcaaagaacatccagtaaacaaattaataatgaatcttgtaaactaaaataacaactatgtcattgtcaaggttcatgaaattgattaatggacagcaaacaaaccaatgtcaacagatgaagaagaacccaggaggaacaaaactttcctgtgatctccaataacacaacaaagattgaacagaaataactttacattcacaaatatcacaagattgaacagaaaagaaagccttcttcctgcatatttaccaagctggtatcaatgtaagcaatgcacagctaatccttaaatgcaaccgaaataatacactagggaatggtagaagttcaagtttcaatcaatcacattagaaaaa

SEQ ID NO: 84599 - DNA, 2021 bp, Cannabis sativa
tgtcgtgacgatcttcggaagacaacctagcggctctgataccaaattgtaacactctactagtttaggcgtgctaacgtgatttttaactaactgcacaacttgttgctaatcaacgagtttattaaaaatcgtgatcaattaaaattttacttaattaattatgaacactaaaataatatagttatattaaatcaggattccgtttacaaaatttttactgtgcatatacaaaattttgtcgcctagcgactatacaaaatatgctctaatgtcccaaagaccgtacgctccaggcctaactaccccgacatgtacagtctccatctgcttgctttcacagctgcccaaccttagccttgcccttacctacacttgcaaacaataaatgtgagtctacagacccagtaagaaaagcataaataataacatagcaatcacccagtcgaccggttcagcgtaggaaaacttcaaaattacactactcactcaattcaaccccaaactctaccaaactttccatatttgctatatataccataataaacatataccaagcaacaaaacaactaaacaagctcaaacattgtctaacaaccaaattaagcaactaactagcctcaaattagttcaataaacataattccaacttcagaacacttcagtgaaaacaaagcacaacaacaacaaccttaaccccaaaatcatgcgtaaatcttgcttgaaacctaagaaattacaaagaaaaggtgttaggatatttaacttggattaattcagaagaaatttgctaaacttctagaattaggctgaagaatcacaagccctagttggcttccatggagctcgagagagagaaagagactagagaaaaagagaagttattctcttgaattttttctatttttgaatatgaataaatctattttattctttcacttatctaaagtcatatccagattagtaaagcttaactatagctcacaaaaggacaaaaactaattggtcaaaaagaccaatttgccccccactaaaaccaaaaagcttctaagccacctacgtgtattttggtcaattttaaaatcacgattattcccgacattcccaatgtctaactatattgtcccgctatactaaaaatacaaaaaaatgtgattctaatggccaaacaccgtgttccgatgttgccggccacaaaacatgcaaaaatataaaatttcatatatgacatatataatgcattctgaattcaaataaatctccgtaaaattataattcataactaatgtgcaagtttcataattaaaccctatttatctgctaatttttaaattaaagttaagcgatctttgcattcgggccagaggagcgatgactgggttcagaccaaggaaactaatggtcgattctctaatgaatctgcgtatttagtccaagacctacaacgagctctctagtgtgaggtctccctcactctttggaataggctttaggatagtaaaattcttgagcgtcataagatgctttggtggagtatcctttccaacgctcttccgattcagtctgttttgagtaagagattccacattgatgattccatttgccctatctatgggggtgaggaagaatcaatgaagcacctttttctcaaatgcaatttggcttttcatctgtggcgttcttccccatggggcattttccctatcatggagacatgtatttgtatgtggtactaggtcaagttcttatgaagcttaagaaacaaaggcatcaatgtcgatgagatttttctttctgcatccattattatgggtactatttggcaggattagaataacaaggtacgtacataataataatttgggtaacataaaatattacattgattctattactcattgttatacagattacaaagctactcttactcacacttcttctccgactcctttggatgagtggcgtcatcctcctcaagattggcttaagcttaaatgtgatgttaaagtggggatagagca

SEQ ID NO: 84600 - DNA, 503 bp, Cannabis sativa
ttgagtttatggttggtagttattattgatgtattaaacattgttagtaacaaaagtacaatctcaaactttcctctattatgcataattgaatcactcatataaaatcccttttctctctctttcaccctctgcccttttcatttaaggttttttatctaatcttgcaattcaattcggtatttaagttgttgaaactctaaaaaatttaaattagaaatcacttgcggcaaagttgactccatcgctgaaattcaatcttgcatcagcatatgcccataaaaaatccacttaaaattaaaattctttgtttaataaacaatccattggaaataataccatagtgttgaaggaataaaggattagatatgaaaattttcttttttttaaaaaaagaaaatatggtaaatctctttatttgtttccttttttggtattagacaaccaaaattataaaacaaattgaattaatatccataaaattgaaccataccataaaaaaa

SEQ ID NO: 84601 - DNA, 715 bp, Cannabis sativa
tgttagtaaatctaggtcctggtaaaatatattccaacagggcctaactgcctgtgatcccccgattaattggtgcagccggtgtactgataggggtagattgcaccaattgttggagttaggtggatctagataactgaagtgattagaatcacttttcaagttgttattttgtgtgttaccacctattcctggccctaattggttgaaaattggccaaccagaggtgcaccaccaaagggatgaccgaccaagggttggccaatgagagagttattgagcttgagatccctagcttgctctctaaaccacttgtttatgagatctggctattctcaccatcaaaccttagtgggaaggcttatcctcctttgggtaggggaaggtttttcctggctcctaaagaacctagttggacaatttgttggtagaacctccccgatctgtcgactagtctccctaggagaggatctctgctgatgagatcctgacctctcctaatagttctttcattgaactgccttattaggtccttggcttctttgttgtagcagtcgaactctcttggtgagataggaggatatacgcttggtcatcaatccatctcaaaaaatcccgtctctattgagcgaatacatcgcaatcaacagtgtgtggttcttcaatttagccgacttgggagacgacctccctaagtctggctaactcgagatct

SEQ ID NO: 84602 - DNA, 540 bp, Cannabis sativa
atgaggtgttcgaggagaagacatgaattgactgagtagattaacagcgaatgtgatgtcaggtcttgagagagtgagatatagtaatttgcctacaagttgtcgatatgttgagggttgttcaaggggttcgccttgttgatcatccaatttaattcttggatccataggagctttggctggtttagaaccgatgaaaccattgtcttccaagagttgtaaggtgtactttctttgagatagaaccaagccttcttgtccacgggctatctcaaagccaagaaaatatttgagtgtgccaagagctttgagggagaatttgtcatttaaggtagtttgtaattgatggagaagagacaaatttggacccgtaaggatgatatcatccacataaaccaagatggcaatgaaatcgtcttgggaaccctttgtgaataaagtatagtcagcttgggattgaataaaaccttcttgaattagagcatcagacaattttttgtaccattgtcgggaagattgctttaggccatagattgattt

SEQ ID NO: 84603 - DNA, 569 bp, Cannabis sativa
aaagcaagttaactcggcaagatcaattcaacgagttattactcatgaagatgactagaatataggccgtaatgattgccctgactaagatagctcctaacgtacaagtatctccaataactgacgtcccagagaaagcacatccaaaaaatcttggaacttcaagcctttgtgaagacaaaggcaaaggaatcattgttgaagaaccaaaaaagactcattccagcaagcagcataaaaagtctaaagctgttgaccaacctcaacagaagtgcaaaggaaaccgcacctcaaggaatggtgagcctgcttccagtgattccagtaaccacgctgaggatgttgacaaagtacatctggtgtcagaccttagtagcagaagcctttccacgaattatctccgaagaagattgaatgctaagaaggaaagatccaaagcagaaaaagcaagacctcgcgagaatgatttgagaaaccacaccaacaatcatgtttgcggaagagaatcttcaagtgataagactcaacgcctcgaatgtaaggtggaggagttgatgaaaatcacagaa

SEQ ID NO: 84604 - DNA, 683 bp, Cannabis sativa
ccaacttttaacattattagacaaagaaattgtttcatacctcaaataattcaagatgcttggactaagagacacgggagggtactgatcgactacgagcttggctgagtattgtaagtgtagcagagattcaagtggctaaggttgaagatgactctgaagttgatttttaggtttaggtttcgtaaccgatctagatgaacctctttaaaataaccgtataaagaaatatgtggctaataaaaatatcactcttcatgtaattcaatctgttatctaacctaaaattaagaataaaatattcctttattactaatatccattcctcataatttaaaatcaaactaagtcaaatacctaaactcaatttcacattattacgtggctctctcttccactctctatacatatattatcaccactatagcctttttcttttaaattgattcctatataaaatagaagattaaatctttaataaattaaaacttaactatgaacatgcatatctactcgtacaattataaatatatatacatatttattttatcattaagcttacacaaaaaaaagaaatatattcctacataattatataaaccatcatacttatttaattaaataaatatgtgcataattatatcacacaaataacatagggattatttgaattgaatattaca

SEQ ID NO: 84605 - DNA, 786 bp, Cannabis sativa
ctccaactcatccaacttttacttttggagtgagtagacccattgttccaccaaaacttagccattagaccctcaagctctctgcaagtatcgacaggtaataggaaaacactcatagcatagttaggaatcgcttgagcaactgattttaagagcacctctttccctgccagcgaaagcatcttcccctcccagctattaattcttttcctcagtttatcttttaaaaagtccagaatagaatttttatttcttccaatcgaataaggaagtcccaagtaagaaccattttcatccgcctcaaagattcccagcaggtcacaaattgaatctctcaacccagctgccacattactgctgtaaaaaactgaggattttgaaaaatttatgctttgaccagatgccaactcaaaagtatggagcaactctttgatattatacgcttcctcttctgtttacaataaatataactgtcatccgcgaacagcatatgagaaatagtaggagcttgacgagcaattctacacccagtgagcaaaccattttgttcatagctatgaagcaaacaagagaagccctccgcacacaaaatgaaaagatacggagataaaggatctccttgtctaatcccacgagatgcttcaataggactcagttcgtgccctccattgacaatagaaaatgatactgaactgacacaaaacatgacaatattaacccatctatcatcaaagcccattctttcaagcatagctctaataaaaccccactccaatctatcataag

SEQ ID NO: 84606 - DNA, 1339 bp, Cannabis sativa
gtccacgtgtaatgttgtgcaccaaagtcctgccaagtccagttcttagcagccatgcacccgcaggatgtaggctggctgaccatgtgttgtctagaagttagccggccatagggctggctaggggtggtcgactagcccccttgaggttgctggctatcactcatcatcatgtttgagtgctgggaccccccgttggctagggtgctgagtagatggcttgaccttattgtaggtgagttgtactgccacgtgtcgttgatattggccacgtagacatgccacgtcagttgggcaaaaatcaggataacaattgcccccaagtccctgtgcagacgtatatccggataggaacttaccagctaagttggaactgatgtcgctttaactaagtaaatgttgctgcaattttagtctttgaaatacttgctcttgactatctaatctcatttgttgtagtaaattagttgcattgtacttttacatgctttttagttgagtactgcgtggaggagtggtgccacagaaacgatataagtcttttggagggaaacttctcttcacttttcacttttcattctctcactagaaaaaataaactttgaaaagctcctccttctctctagaggccgaacccatatttctccatctcttgggattttcgtgtcatttcgatgattcaagcttcctattttcttcatcaacaatttcttgttgtgggtaaactttctattcttgctatttacttgatttagttgatttgtccatgaatgcatgaatctatttctttgttttgaatgtctttagattcccacgttacattgtaatctttttggtattttgatccgcatggtagtcttaggatgtgtaatctgtaatttctagacgaaaaagatctgattctgacctttgttgtgattcttggctctttgagtcatgaataacacgaagaacgtgtttgagttcttgaaaaaacacatgctcggatcctttgtacactctggccagccaaggaggtcttgttcaagacctggccggccatggatggtcaccatagggtctggccggccaaggggggataccctatacactggccaaccaagcgagtggctagtattttgtcctttgttgaccttggatagggtctcgtgatggcattagaggcatatacaactgtaatcttatgcgtggtttcccttgggaactctatataagattttgtagtgattctattatagtcaagtgcataacttaggactcactatttgtctaagtaaatgtacttgagacggtacctcgctaatactcagccttatacaatgtgatttacctggaatgt

SEQ ID NO: 84607 - DNA, 1224 bp, Cannabis sativa
  modified_base (112)..(114): a, c, t, g, unknown or other
  modified_base (575)..(579): a, c, t, g, unknown or other
acaactaggctctcacaaaacaaagaaacactctctctcaaataagataaatgcgaaaaatgaataatggaagagctgattcgaattgttgctctctaggtcctatttatannncatagaaaccctagagacagccacaagatcgaatctacagctgtacaaaactttcctaagaaaaatacgatctacaacatcagatccggaagctgacgtaacaaatcaaaccagaaaaaggaaacttgctataatcaggtccgatcctcaattaatacttcctgccataaacagattagatattctgattgtattaagatacaatcgaatttaatgaggataaggcatttaatcaaggtttcctttataaaccaactttacataagagaaaagattctcttacaagaaatttccaaacaaaggaaagttcagcattaaaagcatctttcctaacaaagaaaagagcaactaaatccgaatatacaaggtaagaaatcggtaataaatgcaattcaatcttaccactaaataaaaaatattttgtcaactaacttgccaaaaaggactttacaatctccccnnnnngcactttagatgaacaaaatattttttaacacaaagcacctgcagcttaaagttagcacaagcaaaaaacaactccccctgagtaacacaattgaaaataaaaaaacaacaaaatcacatgctaacttttaatccaaagtagttcacaagtaccaaacacaactccccctggaaaaagggtccagagttgataaaaacaaacagttaaaaacaaatcattactccccctttttgtttatctaagggccaaagacaaaaaaacaggaaaagatagaaatctgtccaacaaaaacataaacacataaaaagaaagaaaaacttatgccccataaagcttgatcaatgtggacaactgcttggacatctcttgctgaacctcctccatggcagcaagtcaattgttcaccagctgaacctcattcttcacttcttgaacatctgcagaagcagaacgcgaacttgcagcagcagcagcagcaccagctttaggatgctttgtaaaagctccatcaaaatactccgagggttgaaaaacggttccagtcagatgaggctcaagagtttcatgagattgggccacatctttctgagaggacaaaatattaaagattaaatttggaaacacaagcttaaaagtgcgctttt

SEQ ID NO: 84608 - DNA, 736 bp, Cannabis sativa
gtataacatatatatttataggcatatagtatactcaccaaaagtggccgatctaaaagtagttaaaccatcaacccgatttctatttcgattctggatatatcattccaataataacccaaaaagaaaaataaaataaaaagccactttattgcatacacatatatgaatgaaatttgctcacaataaaaatccaaaaatttgcttaactagcaaggacaatcatattgtaaagttgtcaaagttggattcaataagaacaatacagaagctaatctttttgtaagtagacatctgaagcattttattcagaacaagaaacttctttcttcaacaaacaaacatttagatttcgaaaaagcaatttaacaattttttttttcatattatgacataaaaacactgttataaagggagaaaaagggactgaaaagaggagcaaggatacctctagtaaaatatctaaattgttgtactacttattgaaattgaatggaaaacttcctcattagttgtcattctaagttactttccaacctgtgaggacaacaaacttattaaaccactataagaagtaacatgaaacaaataacaacattagagaaatacttgtatccgtgcaatggcaaaaagatgtactacggagcaaattaatcatattattcaatattaaacaacggttttaaaagagaataaataaataaaatttcaactgtaacgaccgccttaataaatt

SEQ ID NO: 84609 - DNA, 1094 bp, Cannabis sativa
tatatgtattaagattgcttttgtgtttatatacagttgtttgttggttgttaattagatgtttaaacatatattatggttgtgtgtgttgtgtttatgttttttttaagattgtcgacaatattttgttcatgtccaattgatttgcatatttttttgttaattagtattgttgtgtatgaatatatttgttgccaaataaagttaaaagtcaatttttgtatatatatatatatttgaattttttcttatatagttatttatttactgttagttaattgtttattgttattaaatgtttaactaagaaaagaaaaaaaataaatacatatgtatatatatatatatttagttttcatatgtacatattttaatactgttttttatttatttttgggtactttatagtttttgaatggtattatagtaaacaaatatcaaattaatttttattttatattttaattgattcttatcttaagtataattttttatagatatattttgagttaattatgtttaaattatatatataaatgtttgatattattgtctacttgatttctaattgagcatatttttttattaatcactttatttttttaaaaaattattattttggtgtaatttttatatttatttagtttatgtgtttcaatttttttttatatttattacattaaatttgtaaacattttttatatgttcaattagtagttcttgtacggtgttgttgtcttatttataaattttaattgtgttaatgtaatatgttaatatttaaatttcttttgaagtttgattgttgttaagttgtttttgtgttgttaattagttgttttcgcataactggtgcattgagaaaagaaaacccaacacgcccaaactcacttcgtccaaactgccatgtggcagccgcagagtcactgccacattctgacgttgtagttctgacgcgcgtcagtaaaaaactttactctccccactcgggtgtgagtctcactctcctattctattcacatgtgtatctcactctctcattttctacttggtatttatctctctattgtatttttgtaataaagaaactttat

SEQ ID NO: 84610 - DNA, 1421 bp, Cannabis sativa
agatctttttcgtctagaaattacctattacatatcctaaggctatcatgcagatcaaaatactaaaaggataacaatctaatgtaagaatcaaaggatgttcaaagcaatgaataatgctcatgtattcataaatcaactaaatcaagtgaaataatatgaatcaaaagcttacccactacaagaaaccgttgaggaagaatgtgggaagcttggatcgtcaaaatgatgcaaaaatctcaggagaatggtgcttgataagttcgaccctctagagagaaggaagagcttcttcaaataacaaattctaatgagagaagtgaaatgtaaaaagtgaaaagggttttcctcccaaaagcacttatatagtacatgtgagaccctttcttcacttactacacctactaggactgaacattttgatcgggtttgacccagaaccagccaacccgcctggacccgacccgctcaacccaaaaattttacaaaacctattctgttcgcgggttggttttttatagtcaccgagtttcgagttgaacccgaacccgcccgccaacccagtcactttttattttatttttattacatatataatatatgaaacataaaaaaaaatccgtaaaatctaatcattttattttatttattacatagataacatattaaaaatacaatatataatatattatatatagtttggaacttgacttttgtattttaaatttgaaattaatgcattttttatttcattttaacctaataaatattgattatagcattataaatttataacttatatgcttaattaatatatagaaaaaactacataaaatttgatttcttttaaaaaaaaaataataaattaacaagttgaccgggtcaacccgttgacctggccaacccgaacccgttgacccggccaacccgaacccgtagacctgcaaacctgtgagcccgaaacttgcgaacccgaaccatttcacgggtcgggtccgggtacaattttttgaacccgaaacccgtaaacccgaaacgcggtcaacccgcccgatgttcacccctaccacctacacaatagagaggcaattaaagcagctatttttctacagtaaataagatcagacagtcaaggtaaggtatttcaaaaggctaaaaacgtagtaacttctagttagcaaaggctacaacacagtcccgaccacaccaatatatagctagtaagtccctatccgtatagacatcctcacaaggacttgggggcaaatgttatcccaattttgtctacctgacatggcagtgcttacgtggacaaaatcagtaccacgtggcagtacaactcactaacaagaaggccaagtcagtaactaagcaaacggggaccccaacgctcaaacaggtccagcttcctcacaaaagct

SEQ ID NO: 84611 - DNA, 710 bp, Cannabis sativa
acggtttaaacccgtcgcctataccctgttataggcaatggttttaaaccgtcgacaagtccacattagcgacggttttaaaccgtcgcctagtttggccatttaacgacggtcgtataggcgacggttatagaaactgacgggaatactttaaacgactatttaaaaatgtagagaaaaactacttttgtagtagtattttacaaaaacacaagttattacgaaatggtatttactctaattaaatttatgaaatatttctaatgcccataatattataaagacatgtaatcatcgtcttgaaaaaaccatatattaatgatgcatgatgcatgtacatgtaatgtattaatcaaattgatttcatataatttatgggagaaatgctaaagggcaccagtggtgcctagcactctcttatatgtcaatatcgttattggtccaactaagtatcgggtcccatataatttaaaatagtagcttttagggagtatcgttattggtccaactaagtatcgagtcccataattatggtatattgtcatttaatattaagttttaaaaataaaagctttggaaagtgcgcaaatcaattgagagaaaaatattaagagatattttaagtaccacaaaatataatatatttattttaatataaattttatatattttaatttaataaatgatataaaaaaataataattattatt

SEQ ID NO: 84612 - DNA, 582 bp, Cannabis sativa
gatacctgtacatgctacagaaaacaaatccaggtaaagaaaatatttttttttcaaatatatttgttgaactaaaaaatgttgtttttgcgttgctaaacagttccgtaacagttgctaaaaaagactgtttaattaaaattcaggaacgataattgacatagagaaacaagaagatgatagtttcaaatatgcatttgttgcattgaatgctgctattaaaggttggccaagctgcaaaccaatcatcattgttgatggtacattcctaaaagtcgcatatggaggcacgtttctcactgccaacacacaagatgcaaaattgaaaataattccacttgcatactgcattgttgattctgagaacgataaatcatgggagtggttcttcaaaaaaatgaaagaagcattcggggttcgagaagatcaatgcctaatatcagacagacatgaaagcatcatcaaaacaacaagaaaagtattccctgaaataactcatggctactgcatcttccacctcttgtcaaacctgaaaacaaaattaaaaaaaaaatgcaaagcatttcagaggtccattctttg

SEQ ID NO: 84613 - DNA, 1601 bp, Cannabis sativa
tctatatcaaaattaagaatgaagatatcttgattgtatgcttgtatgtggatgacttgatcttcactggaagcaactcaagtatgttagaggagtttaagaaagatatggcaaaagagtttgagatgacagacattgggttcatgtcttattaccttggtattgaggtgaagcaagaagacgaaggcattttcatcactcaagaaggctatatgctaaggaagtacttaagaagttcaagatcgatgattctatgatgttggaatcgttagccgctttatggaagccccaacaaaaactcatttgaaaatattgcaaagagaatgcttcggtacatcaaaggtacgaccaattatgggctattttattcatcttctaataattatgagatagttggatatagtgatagcgattggagtggagacttggatgatagaaagagcactactggatttgtgttcttcatggaaaacacaatgtcaaaaaccaatcattgcactatcgacttgtgaagctgaatacgttgctgcaacttcatgcatttgtcatgctatttggctaagaaagttgttgaaggatttgaacgtgccacaagaggagccaactgagattcgtgttgatagcaaatcaaagaacttaacctagaacaaaggtgcatcgagatactctgtgatagtcaaagtgctctgcacttatctaaaaaccagatgtatcatgagagaaccaaacatattaatgtgcggctccacttcatcagagatatcatagcagaggaaaaagtgaagctcaagaaagtttcaacagaggacaatgcctcagacatactcaccaagccactcaccactgccaaattcagacattgtctgaatttacttaggatcactaacacttgtgatctgtaattttctgtttacttttattcttttgtatacactaaattaatcaaccaaggtggaaattgttaataaatggtcagtttattcagttagcagttagtggaagctagttatttgttgttaatgatctgtcacatgtaaaccaatttcacacgtgcaactaggagttagttggagttagttggttgttcagttttgacagttaattctattaactgttatttttgatagttttgcattttttgtccctcttagttcagtttatatatatagcttattaactcaatttttttaaagggttaagccttgtacatactctctaattgtaattctctccaagattaataaaacaactcaagattattcaatctgttcattactttctgtgcattagttcttgacaggttttgtagcagtattgttgcaacattgctacagcagcaatgctgttagttgtgttaatctttgcctttgattcctagtgttcaatctcgattgcaaaggtgatcttagatcacaacaagtggtatcagagcaaggtgtttagctcaatcaagattaaaactcgaggatatcaagaaactcaagaagatggctgcaacaaggtttgaaatcgacaagttcaatggaactagtgacttcgggttatggaggattaagatgaaggcattgcttgttcataatggaatttcagaagcaattgat

SEQ ID NO: 84614 - DNA, 811 bp, Cannabis sativa
  modified_base (65)..(76): a, c, t, g, unknown or other
catgattggctacagtatgtgctacttgattagcatccctacaaataaaattcaaaccaattacnnnnnnnnnnnnaatattaatttattttaatatgaattaaaaatatttagtaatttttgagtaatttgcggcgtaaataactaagtttaactatttattgtagataaatacctaagttatatgtttggaactttcctagttacatggtcattaagtgttaagtcattaccacatgccattttttgttagtatatttaaattaatttttaaataaaaaaaaattgactatttcgactaatcagggtctggcgtgtggctattaacttgacacttaatggccaggtacctagggaagttttagaattttagcttaggtattattaccgtaaaaaattaaacttaaatatttatataaaattcagggttaaacttagatatttatgccgtaaattactcatttattttagtatgaattacttgattatatgcttatttaaatgggtaaattgcggcaaaacccccaatatttttattttgattgcatttaactcccaaaatttaaattttggcagtaaaacgccccaaactcacattccgttagcaattagcctttttcatctgttatctgtcaagtttgcagtacaagtgtatacaaggtactgttcacatggacatagcgtacacatagaataatattattggtccacataaataaatattaaaaataaaaaaatcatttaatataaaaaaatataaatgaaaaagtatttttcaaacacaaaaaataaaaacaacgttttctttctt

SEQ ID NO: 84615 - DNA, 2136 bp, Cannabis sativa
aaaaaatatctaagtctaaaccatataatttgtaattattaatcattaaaaaactatgataatattcatttacacaaaataaataaataaataaataaataagcgacccacatatatataaagcaaagataataataaagagaatcacccatataccatttttcaacttattttatttttatttttacagtttgggttacttcgttggttgctatatgtattattatgtgaatttttgtaaaaatatataataataaaaaaaatattttgaaatgtaaaaaaaaaaaaaaaaaatcctaataataaagtatagataataaatattaaattgataaacaacggtgtggccaacacaataaaaatatttaaaagcactcgcatattagatgagcggtatattagtgaaaaaatagagaagagaaaaataaaaaaaaaattagttcagatgagttattttagctcaaattttaaagaatgctacaatattttttttacgtatagagaagcactatttgttttttagataatattttaataatattttattattctgtattttatttatataatgatatttaattgaatgtaagaaaaataaaaaaaaatgatgtatggtgtaatataaaagtttgaaataaaataataataaaaaaataaaataaaattttagtgagctattttaaataatagagtataaaagctaatgtaagtgctctaagctattatcatcaaactaaattcttcaattgagagaaacctaaatctataaattcaattgagagaaacctagatctatcaattcaaaattaattttgcattattccaaaataatttacaacaccttaccattacttcaaaataatttacaacccacaacaccttaatcaaggtttaaattttaaatttctaaaatgacttcaaatctctctatctataatctatttctttacttatttttcctatttgataaaaaataatatggcagtcattttcataaaaataagtagttaactcttgatttattttatagagtaaatctactcgttaaccataattatgattataagtgagatacggtgatgacaactagtgtgatacaattaaataatataactttgattattatatattgaaataatattttttgagttattatttgttatattaatattttttttatatttttaattactgtactaaaaagattaaaatagttgcacgaaaagtaattatattgctttgattgtatatgtattatatagatttatcagttgttatattatatatattttgaattttaatttatataatcaaacgatatatatttttaaaaactatctattatatcgataataaataaattaattaaaaattataatttattaaatttaaataatattaattttttttgtatgattaaaattgaaaaaaaaaaatttgctacaatagttagttatattatttaaaaaaatatatcaaaattttaaatttgataggcttttatgactaaattataattaaacaaaatacaaccgcaccccaaaccggatttgtttcttagttcttagataatcaagagaagttgactccaactccaacattacaccaaaagaatgctactctttaaccaccagagcttctacttggttggtaatgaatgtcatcatgtttctttattttgtataagaaaaggcacttgataatttgacattatgttttttattcttaaaaaaataaagaaaaagaaaaaccaatattattagaataagcagcaaaagttttcaagttatttatctaagaatatcaacttcaacatcatataacattagacatgtcatttcagtctatgaagaaaaaaagagagagaaagggagtgttggaatggtttccttgctttcttcaccattcgcactaagctagtagtgttccttccaactatggtggtacgcgattcccacgctgagaatcaaagtgatgatgattatgattatgattatgattatgatggtgataattatgatgatgatgatgatgatgcccaccagaaaaagaagaagaagatccatgatcagttctaagtcggaacatttcttggcaatggaagttgtcgccatctgtagtatccatagctgaagt

SEQ ID NO: 84616 - DNA, 1260 bp, Cannabis sativa
ctctaagtgaaaatagaacatgtacaaaatatacatacgtatatatagtgtgtgtttaatgctcatcagattcaccaacctctttttgcaacacgtgtttgcgtagtggcattggtttcttaccaaggtgttgtggtggcagacgaggtggggctgttaacttgcctaactacatcactagattcgagctctaccccttctacaattcaattactgtcactccggttccaccaccaggtagtcattttttatttatttgattatacgtttttttttttaaaaaaaactaaaataaatactaacaaaattcataagattatattttgtgcagcaacaaaagaaaaaggaaaaggttcgacaattacaattattgctattgttctcccaattagtatagctattgtggctttcttgattggcttttgatacctctgtaatagaaaagtcaaaaaaatcaagaaatatctctctatttgctaagacagtggtaaaaaagatttatttttgggatttttacactagatgtcaaatttaacattttttttacatttttatttatgtttggttttttaaacttttttataaaaatttatttttcaattttatttttcaaaaaattctttaattacaaaaatacctttattgcttaagttatcttaccccattttttatagtctcttttacatgttaactccttctttttttcttttttccattgtctctttcttttcttcaatttatattgggattagcattttttttttaaaaaaaaaacatgtattaatgataaaagtgacataattattaagaaaaaataaaaaaaatataatatctttcaatattttttttttttatttttgtacaaagtaacaaaaaaatatatataatgtatgtattaaatataatattaactttctgtttttttttttttgataaagaaaaacttcattaaaaaaccaaccaggcaagcaaacacccaacagtattacaaaacagagtacacaaactccaaattaaagaaaccactaaacctctgagaagcagcccaagcagccaacttatgagctgcttcaatgtttacacgagaaacccaacagatagaacaagaactattacaactaagaaaattaaaaacctgcagaaaagtaggataaatcctccacgaaggaactgttgggttttatgccctaaataaaactctatttcattgtaatccagattattcaatatcaataaaataacagaagtatttttcattca

SEQ ID NO: 84617 - DNA, 1397 bp, Cannabis sativa
aatgtgtatttatttaaattttcaatttaattttgatttatggttattatatataatttatacttaatttaattatattaataataaaataatatatataaattaggctaaaacataaaattataaagctgaaaaaaaaaaccataggaagaccctatggcgtcggttattatgatttaaccaatgccatagtgttcctatgccatcggttgttttttcctctacaacgtcacctgaaacagagtcagtagaaaattttaccaaaatgacgctgaagcccttaaaaatcgcctctaaagtctaattttgtagtagtggtaagtaatgattaattatgtcagtccatataaaatattctaacagattttccttcaaaagagaaacttgcaacttttttatatttttaaaagcaatttatctcatacaacttcttttcttatacaagattaagtctatttttaatgctctctttaatgttactatttatacaacttagattcatacattttttctcatttatacataaattttgatttagctaaatactataaattgcatccgctaacacattcttataaatataatattatttttatgacacattctaacatatatttttctaaaaaaaaaaaaattatatgtgtgttttttaaaaaatatatatttatttatttttccaataacaaaaaaagtgaactaacaaaacccattaatttaagccccccccaaaaaaaaaagtttacacatttatacttatataaataaataaatatagttttgttaaaaataaaataatatacccaagttaattgtaataatatcaaacatagcttttattctatgtttaaaacatacatattctctaattaattatcctctagttaattgaatatcttaaatcactcattactaataacatcacataatacaataaatctataatacgttttgaaatatgatcactttattccatatattaattatgcatgctaccatgtaatttacacaatattaagatgttatcatatgttattttggatatatgttagtattaaattgtagatgataaccaataaatagtttaatttatgattatatattattagtggttttataagtttatatagtaaatatttttttattaattggtatctaaaaacataacatgcagtttttggtcaaatttttttatactcaattctatgttatgagatactaattagtagttaacaaaattatttaaatactatttagtaactaatgcaaatatttacactaattaattttttttaattattttatttagatactaactagtatgataccatttaatatataattacatattattattttgaatagtaccaaacctatatatatatactagatagaagtta

SEQ ID NO: 84618 - DNA, 671 bp, Cannabis sativa
aaaaagaactttttatttttcatcaaaataacacataggccttggtagtcttctctgtgaagaaacataacagaataatattattcatgatcactcacttcgagaggaggagaaagaattttaaaatttttaatatgggctcatatatattagtgtactctttaaatttatgttttttatacttataattataattatatgtaatatgttatttataaaattaaatcttgttattgtatattttaagagtgataataaaaatagaaaattgggttttagtgacacatattgagtaactcaaaaagtctatagtgatacttcaacgcgcgtcattaatgaggctgactggaaaagcagtttttagtgacactccaaacgtgtcactgaaagcttttgcactcatttgctgcgcgtcactataggagtgtagtgtcaggttttgtcagactataaatgcaacagccacacacttggagtgtcactatatcctatttttctttttttctttcttttttattaatatttttagagatatagtgacacaccaaatacaataattcacctcaacacaactaataaatataatataacaatacaattataataattaattattttaattcaaattttatatattataagtaataatttatattaattatatacaaata

SEQ ID NO: 84619 - DNA, 1065 bp, Cannabis sativa
gaggatccaatccaattgcggataaacgagctggaggacaagttcaggagatatcaagtgggggaattagggaaactatctagatacgaccctgacgaggaacttgagccgcatcacccagatattatgaatgctccttttcctttgggattcaaaaacccgcatgtcttgtcttatgacgaaaccatagatccggttttgcatttgaataactttaacacaataatgcgagcgagtaatgtgatgaacaatttacgctgtattttgttccccacctcgcttgttggagtagcaagtagctggtttaacaaatttactcatcattcaataatttcttgggagcagctgtctagggatttcaagaagcaatttcaagccactagggataggcgacctgaagcggcctaactaaccaatataaagtagcagcccgacgagacacttaaggtgtacttaagtctttttagcacgactgtcgctagggtttgaaatttggatgacagtacgcatcttacaacccttcggcggggatctctactgatccattaactgcagggggtgagttgtgggatgacttacaaggacgtccggtgagaagtgtcactgagttcaacgaaagggttaggtgtttgtccagaaggaagaagcccaaaaggagatgaacttgtcgaaaacaagtttgggaaacaaacccaacaatgtttcaacatgtacggcttccacgagaattgataactcgggggcttctagtttgaagagaaaggatggaattaaggaaccgctgaaggagagaaagaaataaaagaagcatgacaaatacatgccagtgtatactatttataccaagcttaatgaaactcgggagaatatttacctagcacatgagcagaaggtagccttcggcaaacccgagcctatgaggaattcgaggaacaaaagagatccaaacaaatattgtaaattccataaggatattgggcaggtcaaatgtgtactcccatacctacacagtctgagaatcatcccacttgaccttccccaggcagtgtgggattgcacaactta

SEQ ID NO: 84620 - DNA, 808 bp, Cannabis sativa
acatacctttgacatggtcggggttgagcgttcggccggggttcagagttggtcggggttgagcgttcggccggggttcagtttgacgaaggagtgctcggggtcggggtcggggttgagtgttggttcgttggggttccgtggctgagatggctgcgttttttgaaagggggttcgactgagagagatgaagagagaggaagagagaggctgattctttcaaatgaggggggtagtttaggaaaattggaaaagtggtcatacgtagccaattttaataactttgcatttagggaaaaaattataggtattagtaagtatattaatttaaatttccccttaaataattataacgtacatggccatgaaaaaaaatttgacaaaaaaattatttcgggtgctaaaacaaataagggtgcatcaatgtatctattttaaaagggtgtattgtagaatttcccaattatttatagattcatattttataaattttaaaagccaaatagtgaataacatatcaaaccacatatattaatgctaagtttgtaattaacattaaattataaaagatattaaaaatcaaaattaatacgtaaaacacgatatgaaaaatcatttattataacaatgtcctaactttaatattagtttcgaccctagcctgaaccggtccccggaatacaaaattgtctcccaccccgccccattcaccgcgagggtcaaatttccatgtaacccctccatctcttgcttttggttcctacatttatttctttgtgatagtttatttttggttgaaaaagaaaaa

SEQ ID NO: 84621 - DNA, 697 bp, Cannabis sativa
aaatttaaatatttatctattgaattaattaaataattaattaacttaaaaagacaagaagtaagtacacgctactatgctactataggtaggcgatatctaagataaagatgatgtctttgtcctgacaacttttgtctgaacaattattatcttaacaaatattatcttaacaacttttgtctttttactattcaattaatttgaatagaattatctatttattacaaaaataaataattactattttaccaagttaaaatatattttttcagacaatattatacaattcattatccctacccttgacaatgcttcaaggtggcaatttaggggccatggacatataattttaagctccaataaactagattattcattgaatctcatcaaccaaatattaatgtttattaattctgtaattactccactataaatatagaattgaattcttagtcattatagaattatatttacttagttttactacagtgtcaattgatacaataaattccagtgactagctctcgttgtgtcggttcgtaattagttttggtcaaaatactgttttacccttttaattaattacttctttatcgtaacgttaattcactagtaaaagtataatttagaaccaagattcgatccgttaggaaagtcaggattctataattgtagatctgttcccagccatcca

SEQ ID NO: 84622 - DNA, 744 bp, Cannabis sativa
aaaactctgtcgataaatgatggagaactcatgcaaaatccctcgatttacagaagcataattgggtctcttcagtatctctgccatacaagacctgacatagcctacactgtcaataagctaagtcagttcttacaaagtcccactgttgttcattggaatgctgttaaaagggtgctaagatatctgcagggaactaagacacttggactacatatcagttgcagcaataaacttagtataactggattctctgatgccgattgggcatcatgtcctgatgacagacgctcatttgcagggtactgtgtatatttgggcgaaaccttaatctcttggtcctctaaaaagcaggctgtagtgtccagatcaagcacggagtcagagtacagggcactagcacatgttgcagctgagatctcttgggtagaatcactgctgaaagaactcaaattccctctgttactgccctctatcacttggtgtgataacattagtgcaagtgctttagcatccaatccggtcttccatgctaggacaaagcatattgaaattgatgctcattacgttcgagacaaagtgctacaaaaacaattggaagtcaggtatataccctcacacgatcagattgctgacttgttcaccaaaggactacccaattctagattttcatttcttgtggacaaacttggagtgaagatctcaccctttcgtttgaggggaggtgttgagaaatagaaattc

SEQ ID NO: 84623 - DNA, 875 bp, Cannabis sativa
tataataattgtacttgcacacataatacatatctttattacactaataattaagtaatactaatttattagatttattagttatgtatattatagtgagagaactagaactagagcttgatatgagtgggttgaatatcaatggcgaaacccttattgtcatgttgcttccaatagtcagcctgaggattaatccattcggactcagaaatctcaaccctagacactcccagtgcttctgttgatatgttgtacttctcatctctttctctcaccagctccggcttcactatcccgggactcaccgcttgaggcgacatcatcagtgccggtgcacccattggaagcggatcacctaacacaaataaaaagacaaaaagaaaatttaaacactctattttatgcgtataaaataaataaataaaaaaaatgtataaattgtttaaaatttatttttgatcttttatttcaattttttaaaaaatttataaaattaatatatacacatcaaaatttgttaaagagaaattaaaataaataatttacgacataaatattcaaatttaattctcggttataaataaatacttaaatttaatttttgataataataatctctaaattatatttatgaatttctgtaagactgtaagtaactaattagctattatgtatcaagtcattatttatgttttattttcttataattaatatatttaaattaatttttaaataaaaatataataatctagttggactaattaataagactgacatataattattaacttgacgattataggtaaataaatataattttatattattgttaaaaattaaattgagtatacacactgtaactaaaaattaaattt

SEQ ID NO: 84624 - DNA, 552 bp, Cannabis sativa
ttatatttggaattcacttctcgtagaccgaatgacttataggtttgacagctggtaccctaaattccacgtccagattgactgtaacgagtcatattatggtatagctgagcaatatggcaccatgacagatagggcaagccatatagatgcaaactagaatttagaactaatcgagccatttgatatattcaagatcacaggctgtagggattttagtggatactacggcccttctaccccctcttctagtgatagctcgccttctagtggtttttgtaaatttcttaggtagaaaattacactccacgcttccttttcatttgtctttcaataattttaacactttattttgcctcgcaaacatgcgttttgaagatgttatggaccgaaaagggaagaaaagtggaaccaattcaggggttcctacagataccgaggtggagccttctaaaaggcaaaagaaaaccactgcccataaaaataaaatagtgtttgagcccattgacctcgaggtctctgaaaccaagacccatgaatagactcctcctc

SEQ ID NO: 84625 - DNA, 771 bp, Cannabis sativa
  modified_base (629)..(634): a, c, t, g, unknown or other
acctcgcttttagccaatgacagtcgtctaatttaataagcgataagtagtttataattattgaaagacaataaagcaatataaagacacaggaattttatagaggttcagccccaaacagttcgataatagcctaatcctcgttatttgtattaactcaagaaaaaggagaaaggttccttttctgatagctcgtacaacagtatctcttaatatgaattcttagataatatcactcaagtaaaataactcgaccctttgcccagtgaacatgtatcactatttatagggctatgagcttggagaggaagtatttccgttctcgttacaatggatataagcagaaagattgcatacataataaatatagaaagaatacactgaccgtgggatttggacagcttgtcatatctttacagtctaattcacaagttacggtgattttcttgatgactcatgatgcgaacgctgaaatcgctaagtggttgtcgctctgcgtggattgctaattgcgttgcctcgagcatgcatatgagatatcttgctcggattatatcctacgggtagatactcggtgttgatcccacgtgtcaccatcatgtgatgccacgttagagtgcaaaaattgnnnnnncatttgcccccaagtctgtacgggacttccgaagttgcctgtagacttcatctaagctgcttttgttgggttttatgccctaaataaaactacatttcaatgtaatccattttattcaacatcaataaagaaacaga

SEQ ID NO: 84626 - DNA, 701 bp, Cannabis sativa
gatgacaatgtcaacaacatagactaatatgattgttgtggatgatttggagtgctgaatgaacatagaccggtctgatttagaggatgaaaaaccaagatcagtgagagtggtgtttaatttgtcaaaccaagctcgaggagcttgtttgagaccatacaaggctttgttgagtttgcacaccaagtgaggggcatcgggcaagacaaaaccagggggttgagtcatgtatacttcctcttgcaaatcaccattgagaaaagcattattaacatctagttgtttgatatcccaaccatttgagagagccaaagatagaacaacacgaatagtaactggtttgaccactgggctgaatgtttcagtgaagtcaaaccccggttgttgatgaaaaccttttgccacaagtcttgcttttagtgtggagacactaccatctggattctctttgattctatacacccatttacacccaatagcctctctccccgggggtaaaaccacataagtccaagttttattctttttcagtgcacacatttcagtagacatagctccattccattgaggactttgcattgcttgctttacactagttggttctttgagagccaaataagctttaggctttctgattccagacttggatcgggtctgcatagtgtgggaatttgtagcagctgggacagtggtgtttgatg

SEQ ID NO: 84627 - DNA, 1746 bp, Cannabis sativa
tacattggaaaaatagggaaaaaacaaattttctgcatttttttccctgcattaatttttaaattttttacaaatctgtatagtcacaataattaaactaatgctggtatcgtctaaatatatttaaaattctgtatagtcacaataattgaactaacgctaatatcatctaaatatatttaaaaatatataattaagttaacgctaattataataatctaaatatatttacaaatctatatagtaataataaatcgagatatatacacactgattaacacaacaactgttgtcgctctgcttccgctttcacgtaatgaatctaccaatcatgcataacatttatctcatcatttgtgtatgcagtagagaacatcatgttgggtcaatagttgtattggatcttctacggtcatgaacttttaatgatgacgtaatatccacactgtttgtcgtccgattgttcaggacagataggagtcatccactggataggtcgattaggctgtcctatcatttgattatatatggtgaacgatctatacaaaaagtaaagttaattagtatatataaattcgtaaataaagaacacacttacatattgggatgtttgatgtagaacttacgtgaatatgatgaagtttagatcattcggtatgtcgatgtagcctgaattcaagtatgccaccgtctacgtacttggctggatgagtaccatccagtgaaacatcttcctgcatgaacaaatatgtgtaaaactgttaatatatacataataataaattttatgaagagttataaatactaaattagtcatctagccatttgagtgactagtgctttggtggcaatcgcacccagattcaaaaattcatatactcgattcagcccaccaatgtccaacagtctttctttcatgtacctgataaaaagtcattattaataatcgtcgctattaaaagaacattatcgagtttattatgaagagttagaaattatacttgcaccaaactcctattggttgggctcccaagtattgcatggtgcacaatatgaatgtcacttttaacaagccaaatagagtcatcttcgaccccaaatagctcataagcaacttcgaattggattatggacgacttggaccaccttttgacggagttccaaaaggtaataattgaggaagtttggtgtggttggacataacgaccatgaccttttgccttactcggcctttcagggtgttttggaggctgtgttggaggactcagtaaatctttagaggctattttgcttctcttcatgggttgcttctgaagtttcttggtgggtgggtgtgtatatatatatagaaaaaaaatagtaaagttagcaatgccattaatgaataagcacaataagttaagtaagcaaattgaaacataccaaagtgttatacccgaaattttactgacacttcagaggaggacacatgtcaaccttggagaatacaaatcaacgaatataagggcaattatattaaaggatattaaaatggaataacttattaaatacggagttgataaagtatatctataacgcgccgactgtaaagtcttaagcgagataaggatgtacaaactatagattcatgcattgacgagaaactattttgcgtcagaagacacaatcgcaagaatggcatcaataatataaagcgaggcaccaacctcgctattaaaaagcaattacgagacatgttgattgtta

SEQ ID NO: 84628 - DNA, 1053 bp, Cannabis sativa
tatatagtattttatttaaataaacattgttatcaggtatacatatatattatggggaggcgttttatgaatcattggcaattttttataataattacatatataatatttaattatattaataacattataatattttgtggtagtgttagatattagtgctctaaatatgagttgtattttttaacacgacacaaactgacatgaatttaggaggtacaagcacgaccagacatgaaaaaaatataagtttaggtacgacatgatgttataaattggcacaacacgacaagcccaaaacgtatgacatgtaagcacgaataatctattttgaaagtgtgacatgttagatttatgtgaaacattatataaaaataattaaagttataaaaaatacataattttagtaattatcttattaattacaaaaataaaatgtaaaaaatagagtatgaatttgagctcatacaagaaaccacgtcagtctaagtaaaggccgacataaatccaagcataaaatgaatctgagcacaacacgacttaacttgtatttttatatagcttgacacataattttaaggctaattacgatttttgccccttaaactttgacatctactaaatcatgttccctaaatttttttggcagttaaaaatctcccctgaactattaaaattgttggattaaggacttttgtctaatttaattcaattttactaattcggtgattgcccatgtattaaattatgttcttcagactttgatatctaccaaaccatgcccctcaaactttgaaatgtactaaattatgtcctttaaactttgattcatgttaaatttttctttataaaattagataaaaaattttaaatttaacaattttaatgattcaggaaattttttttaatagccttaaaagttcaatataatttaatatatatcaaaatttgaggagtgaaaatcttaattaacctatttttaatagtataacatgttgaaaatattttactaggatctagatttactacaatgtatgtttcattaacatccta

SEQ ID NO: 84629 - DNA, 638 bp, Cannabis sativa
aaggttaaccgaggagggaaggctggccgccatactggggggccttgagccgctcagggaactgtggaaagacattaaaagatttggtcccatggggtccatggcagaatttctggatcgaacagatggatttattatgctcgagtaggttgttcggtgtgtggacataatcgggcataagaaaggccagtaacatatctcctcggtgggggcacctacgcaatgtccacaatatcctaatagctcaaatctgagcgggtagaggtctaataacagtggcaggcaaggcaacagaaagaagggaaagttcactggaaatggcaaacacaaccctagagaaagtgcctcaaagtttactgccttttctgtcctgattgaagacctagagacaatttatgcaacaacccagtctatcatcccgtacaaaaaacccgctcccatgaagaaggacgtaagtaagagagatacgtccaagttctgttgttttcatgcagattacgaccatgacacaaacgagtgcaataacctgaaggaggaaattaaattctggatcagactaaattacccgcatttgcaaaagtatgtcaagaccgatcaaaaccaaagggctgcgtaaacagacgataatcagaatctat

SEQ ID NO: 84630 - DNA, 1238 bp, Cannabis sativa
tcccaagcttttgaggtgttcattagatttaaaagtttagtggaaaagcaatttaacttaccaattaaagctgttcaagctgatgaagggggtgaatatagatcatttgagagattcttggttgatcaaggaattaaatttcaactctcatatccacacacacatgagcaaaatggccgagtagaaaggaaacatcgtcatgttagagaaactggactcactttgcttgctcactcaggtcttgacatgagctattggtggcatgcctttcaatgtgctgtctattctattaatagaatgcccacaccagtaatcggcaatcttagtccctatgagtgcttgtttcaccaacagcctgattacactattcaaaaaccatttggctgtgcttgcttctctcacttgaggccatacaatcatcataagatggagtacagatctgaagagtgtctatttcttggctattctcccaagctcaaaggttatctatgtgaaaaccatgatggtctaatttttgtggctcgcaatgtggtgttcaatgagtctcatttccctgctcttcacagcaacaactcctctcaggtatctcctactgagcctcttattttgcctactgctaccttttctactgctattaataatcacaccactaatgcatcctctgctgcactcatgattctgaacaagcacctgctactgctgcatctgccaattctccttgcactacttcaattgctgctatcaatgaagaatcattacaaaatgcaccaacttcaactcaaactaatgtttccttagctagtgcaccacaacgaactcatggcatgatcactagatctcaacatggcatctacaaacccaaagcttatctcgccactaagcataagcttcctgaatccctacttcctcgagagccaaaaactattaaagcggctcttaatgatccagcttggaatgcagccatgaataaagaagtcacagcactcaagaccaatggtacttggactcttgtgccttatgagcctcatatgaaccttattgacaataaatgggtacaccgaatcaaactcaattcagatggaagtatagacagactcaaatcacgattggtggccaagggttatcttcaagctcctggcattgattatgccaaaacattaagtcccgttgtcaagccagtcacagttcgaatggtgcttactcttgctgtcacctttcaatgggaagtcaaacaatta

SEQ ID NO: 84631 - DNA, 712 bp, Cannabis sativa
ttatatattgatattctttaattatatcaaaacaatataatattaataaaaaaattgttaaaaaatattattaatgactaatattttttaaaaaatatattataattaaatatcacatctcatataattttataaaatatctttaataatcatgaagtaactgtaaaaaaaaaaaaaaattagagactattaatactctataataaataaatgcatgttacagactcgttttataagaaaatgaattcagatcgacctacgagaatctctctgatgttggagatctttttgtttgaatatataatttggcatgtgatgctcatttgttttattaatttcagcttcaggattttctgtcgtattagaattattacaccattcccaataattttgcctcggagctgatctttgaatcgtggggccttagtataataatatttttgtcaggggccttttcgatataaaatatatatatatttttaaattgagtcttttcttatttagattttttagattgctaaatattatttaaaattttgtattttacaaaaattattaattagactttttattttgttaaataacaaaataaaccttatactttctaaaatggtataaataaaattatgagctgaccttttctcaaaataaaatttaataataatccgatctaaaggtattatgacataactgtttacattttttatatctg

SEQ ID NO: 84632 - DNA, 776 bp, Cannabis sativa
  modified_base (683)..(697): a, c, t, g, unknown or other
tatagcaaaaataatacatatctttatctttgtcaaaacaaatttctctcaaccgttactattcaaattactttcatagttaaagacaccaagtcaagtaagtttgaattatttcgcaattctcactaaaatagaattgtaattcaagtgatctctaaatttattcatgtgagattaaaaatgagtttccttccaaaataaactatgtctctaaaaaatacaagatcaaaaatcttctaacagtatgaactacgttcaatttgatcccattttgggtacgtaggcaacctaattgctaagattaggtatagtcacaaatcctcaaaatctcaaatgagatcattcacctcatcaaatccaaatgaggtcatctatctcaaaaatcccaaatgaggtcatttacctcaaaatattaaagttatcgaagatacaaaatcttttaacactctctgaactgcgttcgacttgattcctataaaaggatacgtagtcaacttagttgctaagactaagtgcagtcaccgatactgcaaaatggtataaaacacacatctcaaaattccacaaaaggtcatccacctagaaatttttctaaatttcttttaaaaagcaaaggattcctgaaaatggtcatctaccggaatccttatatccaagttctaaaataccgtattctgaactannnnnnnnnnnnnnnttcacaaagaatgtatgtaggtagctcggttaattaaattgactaagttcagctgtaactccaaatttaccccaaattt

SEQ ID NO: 84633 - DNA, 963 bp, Cannabis sativa
gaaattcttataactcatatatgattaatttgatcaattcttttttcttgttttgatgcagaatatggatttggctcaatgacatcaacaaaaggagatgtgtacagctttggaactttagtactcgagatggtgacgagaaaaagaccgacggacgacatgttcgggggcgagttgagcttgcataggtgggtaaagattcactaccatggaatggtggaaaaagttgtggactcttctttggtgagagctttaaaagatcaattgcctgaggtaatgaaaatgtgggaaatagcaattggagagttgattgagttaggcattgtatgcacacaagagtcaccctccactaggcctacaatgttggatgctgcacatgacttggataggcttaaaagatacctcaatggagatactaccacaacaacttttgcttcttctttggggatatcttcttccaccattagtgattagattactaacatctctttcttaaaaaaaaaaattagtaaaaaaattttgtggatattgcttttatgattatttctccattgaataataataagggttaatgcttttttaaattatttattttgtaaaatcataaattaaactatgtattttttaaaatagtagaaaatagcaccttgagcttgattttttataatttttttaatacaactaacttgaagataaattttaaaatgaacagatgcaaaaggtgtatctagttttgtcataacaactctaaatcaagttataattaatttttattttttaaaaaaaaaacaattcatagtttatttaaaaaatatagagtctaatttgttattaacaaaatagtttataaaatatatagtccaaaatattatttattctaagtgtaataatactattagtacaattaaatattatatttcacataatttaatttaataatttattataaaatatcattaatta

SEQ ID NO: 84634 - DNA, 1497 bp, Cannabis sativa
tttttaattctatataatttaattaaatgttaatcctagaagggatacatactataaatagataatgataggctcttaacttgataacctaaaaacataaactacatcagactactttgtcacaaaaagaacttctctatagaatttgaattctcctctcttctctattttaatttcataccttatagtgagtgagtatcttttcaacataattctagtcaatactcaatcataatgtggaagattgtgaagaattccatcacctaagaagatctaggttcagatcttagtaatactctacgacagaaaaaaaaataagggttagagatctgaatggaatgaatcattatattctgctgctacataaagttctgtagaaaaaataatacataaagttaagataaatcaggcgcaagaattttgacattacccaaaaaaatcccttttgttgatggcataagtattatgagttgcccccaaaatgttaggatttatactactcaatacccttctctgattgtttcccatctcattcctagtaacaagagagccatcaccataatagctccaatgagctaaaaccaggagaaacaaaatagagaaaacagagctgtgtattgaatgaatgatcaatccttacaagacaccaatgatagctacttataccagtagctaagaagcaaaaaatacagcaaacaactaaaagtgacagctaagcttaactaacatcctaaccgaataccaactaactcataacaacctttaactaatcttgatacaccaagaagccaacatgttagtcaaattttaatcaagaagttgtaatggcattcacttgctctttgtaatttataaatgtctttctattgaagaacagtgttgtgatacccatttataataccaaatctaggtcgccaagtgataagttaatttgtcatatcttaatcgggtctcaattgaatataatggctattcttgcataacttagtaatcataaaataagtcactagccccgagaggggtagctcaaatttttaggcgtgtggttcgctcccacaagatttcacattcgagttccagctggtacgtacatagtaatttttatagtttaacagtctttaaatattataaggctagatagagatctggcctagtatgaaaaaatcaataaatttggactaatggggagggaaattaagaattgagatgagatcattaatgtttgaaccttgatctcttggtaattaaaaaaatagtaaatcacctattacctcaaatcaaagttgagaagctttatgcaataattgtatgtttagatatatttctaaataaccctaccttgagagtgtgagaactaagcaaacaactattagatagctataaaataatataagagacaagattcaatctcaaagtgatacaattctggccactaatcaatggatgagccatggataaattaatatgaacctgttgggttttatgccctaaagaaaa

SEQ ID NO: 84635 - DNA, 778 bp, Cannabis sativa
tggttgctgcctgcagaacaagcagtgatctttaggaatgatacttaaatgtttcagtcgctcccttgttctgagtctattttggattgcagtccatataacaaagctatgtcgttggatgttaagtctactccatactccatgactctaatttactttcttttgagggggacaaacaattttgtagccattggagatcttgtaatgtgtgcttgtgaactgttgtacatccattctatctctgatttgatccttgacataaatcaattttttccagtaccaggttgcctgttgtggagcttgataactccaccaatctttcccatttatatagacatagtgaatctatttaatccacaagttgtcttctttatttgcaattgcccaaacatattttctcattactgcaatgttccattttgctattcttttaaggcctattccccttacagccttcagttgacagacattttcccatgcaattggcccagaaccaagagacatgtattgactctttcaaagataggcacaacaaatggcttcaatgtcctttattgtcttctttggtgagaccatgatttgactccaatagaagtgaatggacatcaatactgaatttaccaaaatagcctaacctgttagagagagatttcttgaacaccatgatcttattctagctatcattttttcagctagaacaatacattctttgccagagatacgtttagcaaaaataggaatgcctaaatcttccatcaatgatgcgttgaatttcatt

SEQ ID NO: 84636 - DNA, 591 bp, Cannabis sativa
acacacactaaaaaatatttttgtgagcaatacaataatttttatgtaatatataaaactataaatatatattagtgcaatacaaatctaaataacttctaaagatgaatttgtggacaaaaaagaaaaaagaaagataaattaaagtattttaacaaacacttacttgaatttagtaggagatgacaatcatgcaaactattcactcacatatatatactattgttttacgtggaaattccctttcttttatatgtatacatatattctgattttttaaaattttgattctattttgttaattatatatgatgattctatgaagggaaaattaaaagttttgaaaaaatttattaaaaccttaatgtataattatattattagaggacgtgagttactcaattaagcaattaatatatttgatgacaatacagataattatttttaattattattactatttcttgtaactatagcatttacaatcaaaatgttatatatattaatatatagattattattattatttatatgttatatttagtagcatctatgagttaatgaagaaatgagaagacaaagctaaagaga

SEQ ID NO: 84637 - DNA, 559 bp, Cannabis sativa
ggtgaaagcatttcaagcacaccctcacctgatccatgtattggatcaatataagtccattccaatctcaatatttcaagttggctcttctccagtaccttcacttgatgtgatgcctttgtaaccacattttctaacttcttaatgcaaagctctccatgtagactttgaagttctgccaactcttctattttagcgccactatcccaccccacaacaaaagttgtcaacatttggagattcctcaatttacttatttggcttggcatctcaactagtctactaactctactaacaataagatgtctcaaattaatgagatgatgcatatccttgtcatcagaaaattggagacaactacctattatcttttcttttcccaccacaaacccagaaaatttttccgattctactgctttttccaacattctcccaagcacatctactaccaacgtgaacagaactgcgtttcgataaatttccccctcggtcgtccattaataaatatagagaaggaataagcatcatttaatacactttctccaagtgaatccaaatc

SEQ ID NO: 84638 - DNA, 804 bp, Cannabis sativa
gatcttcacacccttaaaagaaccatgaactctcgcccattgagcatcaaagaatacgacgtaccaccgcataagcaaactagagtcgatcgaggttataattttgaagggaagcaaagacttttttcatcaaaccagttgataaatataattttgttttatatataactaaatatatatatatataatatcttttttatcaatgtatattgtatctaattaaattaagtcgagttttaattagattttgaaagtgtcatctaataaccgattcagtataagtactagaatctaacaattcatttttaatccaattcaatcctattctactatatatttataatttgattggactgttgtctataattattggatagatttgaatatgttggccctatatgtgcacatatcactactcatcgaatcataattttataattattacctgttgttatatttgaacacgtacatatttatatatgaactagaggaaaggtgttatatatgtgtgcctaattaaaatgacagatggaaaaaagtcgtgggtccaaaatcttgactttcggagaagttaataattaacaaaaagtcaaggtttttcctactaataataataaagcaatgcatgaaaaccactatctatactccttttgggttggtgtgttctttataaaaaatataaaaaataaaataatgagtgtatatatatactatatagtacaaaaaaccttatagactatataatttactttgtaaataaaaactctattaatatcaagtattgggttagttaggaattagttc

SEQ ID NO: 84639 - DNA, 2071 bp, Cannabis sativa
gtaatatccttgtcaaattatcttctttgacaagctttgccaacctgcatgatctccacaaaagcccttgtgaatttctctgatgatctcgtttgcttctatgggaagaagacaccgcaggagaggcattgaatagcccttttgatacaatttgccttttactattgtgtagcaaggcattgaatacaagatttttcttgcctcgtttttgtcagttgaaagttgcccattgagaagatagttgattatgggtttcatccaggtgggtgagttatctatcatctaaacttcttccatttcacatatacttgctcgtttaacacttccaccagtaccaagttcaattcatccatttcattctgtgaggccagtttcgctaaggcattggcattattctattgggatttgctcgattttgaaataatcaaacttttccaagttcttccaaactttcttaaggtatttttccatttttaaacccttagcctggtattcccctaggacttaatctataattaaattcgaatcactatggcatataagatttttaacctttaacacttgagctatctttaaaccaaagatcaaggcttcatacttagcctcattgtttgaagtgtcgatttgaaatcttaaggcatagtgaaacttaaagccttctggaaaaataagtatcacccctgcccccgagccattctcattggatgctccatccatgtacaacttccaagtgtccgcgtatcaccaaacaagtgaatttttgtttggagttattccctctatcaagaaatctgtcaaggcttggcccatgatggatgttcgtgggtgataagttatgtcaaactgccctagttcaattgaccattttatcaatcttccagaagcatctgattttgataaaacttgtttcaggggttgaacagttaacaccttaatcggatgtgcttggaagtaaggccttaatttgtgagatgcatgaattgggcataaggcaaggttttcaagaaggggataccttgattctgcccctagtaaccttttactaacatagtattaaagttgctgcactaatcgcattttctgagacagccaagtagaggagtaaagtttttccagttattggtttcgttaaaattggaggtgttgacaaatgccactttatactgttaaaggccttttccaactcttctgtccattcaaactttttgttgcctcgcaatacattgaagaatggtaggcacttatcagttgatttcaaaatgaatctgttaagggttgttaaggcctggacttccttcagttttgttggtgatgagatttctatcaaagccttaattttctcaagaattgattcaatgcccctcgtgttgactatgaatcccaaattttttcctgaagaaactccaaaggaacactttcttgggttaagtttcatattgtactttctcaatatctcaaagcactccgcaaggtcttttgtgtgatctccactttttattgactttaccaacatatcatcgacgtagacctacatgtttcttcctacctgtctcacaaatatttcattcactagtcactgatatgttgtcccagcatttttcaaaccaaacggcatgactttataacaataaagtcccatgttgggtacgaagcttgtaggctcttggtcaaggacatgcattttcatctggttatatccagaatatgcatccatgaacaatatgagctcgtgtctagcagttgcatccactaactggtcgatccttggtagtgggaagcaatcctttggacacaccttgtttaagtatgaaaagtcgatataagttctccaagtttcatttggttttgggacgagaatagggttggatatccaccagggatcaaatagctcacgtataaagtcgttaactaacaacttatccacttcctgcttgagtgccccttgtctctcagaatcaaagtgtcgtctcttttgtctcttggctgggtaatttgggtcaatattcaagaggtgacagataatcttacggtcaatccctatcgtatttgagtggctccaagaaaattgatc

SEQ ID NO: 84640 - DNA, 730 bp, Cannabis sativa
gggggatctaatgcttgactatttttcaaaaatatttactgctgagcctggaaattgtaatgaagttcttagttgtgtcagccccagagttactgaagatgataatgcaatcttaacccgccccattgaagatcaagaagtaaaggatgccttgtttcagatgcacccggataaatctccgggtccagatggaatgaacccaaagttctttcaaaagtattggcacattgtcggtccggatgtcattgcttgcgtcagagaatttttcttgaatgaagggatgcctgaaggtttgaatgacactaatattgtgctaattcctaaaaagaaaaaaccagatcaaatgagtgagttgcgtcctatttcattatgcaatgtggttgcgaaagttatcactaaagtgttggctaataggctaaaaggtattctcaatcgtattatctctcttaatcagagtgcatttattcctggaaggttgattacggataatattatggtgtcttttgaggttcttcattatctcaagagaaaacagattgggaaagatgggtgtatggcgctaaagctggatcttagtaaggcatatgatagagtagattggcacttcttgactgcaatgctatctagaatgggtttttgtgacaagtgggttcggctcatatatggaagtctttgttcggtcaaatatcatattgttagtagtggctataccatgggtccgattattccc

SEQ ID NO: 84641 - DNA, 959 bp, Cannabis sativa
ttaaactcttatgcggattggattggatccaaaatatgaaatccgtacttagtgcggattggatgttgtttgaccaaaaaggtgcggattggatcggatgaacacccctaatttttagtataatatttgaagataaatctttatttcctttatttattaaagagaaatttatggctaaaccctcttatgttttgattgttacacacttaatcccctcatctttatttttggtggcaaaaccccctttagtattattctgtttgtaaatctaatacacctgttaaacttggctgttaaatgccaactagaattgccactgtgtacacatatgtacacgcggcataattttattggcccaaatcattttaataattttaatattacaaaataatttaaaaaataataaataaatatttttttctttttaataatgagatttttacttttgtattaataaataaataaaaataaataaaactctaatttcaaatcccaaatcctcatctacgactacgcccttctctctctcttgctcttcactttctctctgaacagaaggctgacgccgccgcctccaatcactggcgatgaacccgccgtcgtccagccaagagcccgatcttcctcactctctctccttcacgccgcccctaatcccccatcttcactctctcttcatgttgccatgaaaacaagacctatatgtaatacctgaagaaactccatcttcgcaaccttaaagccagacactaaaagagattcgcgagagaggaaaggggatttggggggctttgagatttgaggtttcggctgacctttttattttgagattttaatttttttggttcttgattcagatctgaaattgtgtgggtttttttttttattatttattaattttgatgatatggtggtggaatggtattctgtggtgtggtggtaatggttctttgatgtta

SEQ ID NO: 84642 - DNA, 638 bp, Cannabis sativa
acgttgatgtactatatatagtgcaagcttcgcaaattatcgatgaatattgtaacaaaattaggtcacattgcaaaccaatagttaatctaattcttttgacttgttgtaacatagtgttgcaattactctttcaccaatcactaaaaaaaaattaagtgacaattttttagtcataacataattttttattgtgactaaatgtaattgttagttacaacaaaaagctattgtgactaaaacataatatttaaatataaattgtcataaatttaattttagtcacacatcaggtttcgtgacgtataaaaacgtatttagtcacaacaaattgtaatttttgtaactaataattttacccagagaatttttagtcacaatataggaatgctaatttgtaattagtcacaacttttttatttttagtaattataaatcttattgtgatgaaaagattttttttttttttttttgtagtgaatgcattaatctgctttgttttatcatcgcggtttatggatgattgtatgtaaaaattgtcaacttaaatatcaccgtccaaaatcgtggatagagggttttcatgtcgaacaagggtaggcatgcataatttgtcttttttttttttctttttctta

SEQ ID NO: 84643 - DNA, 1734 bp, Cannabis sativa
aaagggctcaactttagtcaaaatagactacagggctccattccgatgtcattgattaatttaagaaatctcgaaggattagacctctcttcgaatgacttgagtggagaaattccaagcaaaatggccgatttgacgcaactttcttacttgaacctttcatacaacaaattagaaggacaaataccccgtggaaaccaatttgaaacattcaacaatgattcatacaaaggaaacatagaattatgtgggtttcctttgtctaaatcatgtaacacggggataaaacgagaagatgatcatggcgaggagcatactgatcacataagtttggattggaaaattgtgatggtggggtatggatgtggtctaataattggaatatctttgggatacgtagttctttacggtgaaaggtttgattattggttacataagaagatcataggacgacaacaacaaaaaattgagcaacgtcgcaaaagaaattctcgtttacgaagaacaagctaaaatatcatatgagctagcttgtgatcaaagaaagtgaagtaacttttggtaagcttagtgacattgcaatatctttttacatttgagattagttatattttaaccaatcatctaatacattgtttgtttatttgtttttggattttacaaggagaaggaggctcgtgatcagccatgtctttcaagtcctatgtgttttctttaataatataaaaataataatagaataaaattatctttgtattaatatatgtgatacaaaataaatagtatttttatttcttctagttatcctaaattattgtttttttttatataattttaattttctttgataaaactcctaaaaatgaaacttccccttatattaattgcaagaattaaattttgaatgttacagtactgtacttatattattagaaatgaagtgtattcttttaataatagtaaaaaacattatatatatcaagcacatgcattctgtttggatgtgaacattaacatgtgttgattaatgctcagccaagggacacgactaactaacacaaactgtggtcctctaaattctctactaattgggatatattttacttcaatcaaaagaaaaattataattacatttattcaaatttcttaacaagtataaaattatatatatttaaatttaaattgtacgtttcctattttaattaggatagtcttttgattatatatacatatctagtgttgttaaaaaagataacgtgagtgttgtagatacaaacttgcttaagctttgtaaaaaaagtgtgaatttgtaaaaaaatgattataaagaagaagagtggaagagaaaaagaagaaaaaagtttgttaaaaaggatacaaaggagaattggaagatggggatggatgaggggtaggttgttgggggttggaacttctggctctgtttttgaagcgattatccccggcaaagctaattctagatcactacagttcaaagactacccatcacttttggttgtaaaatctgctcattatggttcctattaccccgagctcataatggaaaaggaagagtttgcttatacatctttggggtccaacgaccacgaatataccttttctgaagatcaagattgtggaaattatggcagagtcagttataacttatttcttgaaaatgtcttaggtaaatcactgagtgacttcatcgagagaacaagagttgggttgcgt

SEQ ID NO: 84644 - DNA, 788 bp, Cannabis sativa
agttccactcagcttccatgcatataatactacataaatttattggaagaaaaaaaaaattgtaaatcagtatagtcggtatatataattgacttagaactactttacaattaatgaatttcttggctagagtactacttaatttgtacatgtaagtctagtttacctattcaatcttagtcaaataaaagaccccaatctatctaattaagtagtaattaacaatttaattatttaattaattacacacgcaaatgctcgttattgtacatatttaaaaatagaataaggaataattccagtaaaatttccaaaaacatagagttgatgcagattaatttttcagtttcgaaaattaagagcaataattcctaaggtcactattttcattagtctattagtctgtagttaaatgatatatttgttcatttaaaaaaatatcacgtgttgacaaattatttgtccaaattataattttaatttaaaacaatttttttaaaaaaaaaaaatgagtaaattattttaaaaattaagtttaatctttgttttttctttttctcttttccgtttttattctcagcatcgaccatttctcttctctcttttttgttttcttcattctaggcctgaaccttcatagctactatggccagaagcttcgaccacccttcgatcgagctccacttctctcaaatctgttcgagttaaactaccccaagatcaaatgccccatgctttccttcacaggccgtccttctcattgcacaaatttgaaacattttgagcaa

SEQ ID NO: 84645 - DNA, 846 bp, Cannabis sativa
gccgacaaatacaaggaaattaatcttgaaggggaagcatagcccccgtcatcaaatgcgtttggctctaagctccgaagcctccgtaattgtgattgggcgtctatgtataggggtcccaaattttaattttgtcttaggccccatataccttaggaccgaccctgctgtatataatatatacatcttccaatataacaaaattacttcaatgtaattttcttaatagcttcaatgaagcattataataagtttggctcaagaaattattagatagcattgttatgcttaatcttaatgcttctacgtatatacttattgcttttagattaaaaaggtacaaacataagtataagaatatataatgtaattttttttttacgtattttgacatttaagagagagagtctaagcacatcaatctcactttacatatatttatatataatatatataaaggagtctttgattttgattttttaagaaagaaaaacattacccacattattctctttcaacttagtttaaaaaaaaaatcaccacaaccatatacactaagattcatagataattcggggtcctccctctttttttcttttttctcttttcagtgtttatttatgctttgaggaagagaaaaaaaaaaacaaatatgaatatgaattttttcttgtcatgtactgaaaaattgattttttacaaatgccaataattatactaaatttcagtaaaaatactactgtaacagtctgcagcagcagaatgttattctgtcactgcagaacacaattttacaaaaaaagaaaccagaataaatagttcagcatttaaaaacttgacacaaga

SEQ ID NO: 84646 - DNA, 958 bp, Cannabis sativa
  modified_base (593)..(619): a, c, t, g, unknown or other
ttgaatataaatttacaaaagtcattgttgaatatacatataaaatcattgaatatcttaaaatacaaaattaggtgtaaatatgattacataaagattttgttctactatgtcatttaatctttcataataaataacattgatatgcagagttttagtttaggcatgttttgacaaatttagataaactcttcgattttttttttaaatgttctttgattttgttatatactcgtaaaattacgtctaggtaaatatttacatattatctatgacattttattctgttttctatttaactatgaaaaaaagcacatcttgaggagcacttgatgagtaaacttctagggacaggcaaaagtaggggctcgccaacttgcaatgaactacttggtcttgagttgttcgggcactccaacccttcgttgtgtgttgttgaactgcttcctgaactccgacacccttgcttccgaagtcgagtaccaacaattatcaacttaaattgccataattcttgtatcctaatgtaataataaatatcaatattaataatagagtttttcaacacaagatacaataataataataataannnnnnnnnnnnnnnnnnnnnnnnnnntaataataataataatttacattaatcatgtaacagccaaaaaaatttatattatgctaattaactattttttattatataactaatttttcaattaatttttaaatgaccattgtaatattaattatttgatatatataactttttaattatattaattatatacatttgtaatttaatagtaattttcaaaaaaaaaaagtattattttaatgatttaacataatatatataaattaatttaaaatcactatgtaccattaaacatttttttattctatttttacaattgaacaaattatatataatacatgtattaaataaaaaaaaatattttat

SEQ ID NO: 84647 - DNA, 610 bp, Cannabis sativa
ttctatttttttgaataaatgaaataaaagattggttttactaaatcaatctcagccaaaacaatcactacaagaaatatgttctttatctaaacattttttctctacaaatatatatatttgtaagtaaatatataccttacatacgaatattttagaattcagactatttgtaggtaaaatatattgggaattattatcacactgagttatttatgattcctactgataaatttctatgtaaatagttttacctccaaacatagtggacaaaatttaattaaaatttttggagccaaatttcccaccaaatttttgtaggttctacattaatttttatttgttttacaattaataatgtcataaagcctacatggcaaaaaaatttgacaagtcacagtaacatgcaatatgttatctaaccctgacatcttatttgattatgttttgttcttcatcagtcgcctccctaccctttgaagctttttccatcaaattcaagggccaaagttttgacccagagctttttcagttttgcttttctgagatgtcacctgactacatctcgtgccaaaaatttgaagtgcgagctctctctctctctctctct

SEQ ID NO: 84648 - DNA, 513 bp, Cannabis sativa
tacttagtagcggtggacaacttgtttggaggaatcgaactgagccggtcgcagggatgagaactcgttggagaagatgagatgatgactgatctattcgattcaggtctttcttcttctcttctatttcgtttggggacgagtcgattaggatttatatttactaaatactaatactttttacttatttaggtttatttactatttattagggatgaaaaaatatttttttttaaaaaaatatttattttgtcgagtttcgggtggagacccgagttccacaatatgcattttaaacacccgaacccgatacccgtatataccattttcaggtgagacccgactcgaccatacgggttttcttttttttctcggcttttttggcaacgggtcggggcaagttggtgggtttcggggtccaaatattcagtcttatttagtactattgtgagatgtaatatcgttattagtgtaattcaatgtgagttattacttattttattttaataaaga

SEQ ID NO: 84649 - DNA, 1283 bp, Cannabis sativa
  modified_base (410)..(411): a, c, t, g, unknown or other
attcattattttgataaccacaaaataaataaatttgctaataacaaccaaatatacacaattatttaagtgaatcttaatctttccctcctattagcattttttttattaatcctttcatttttttttttataatcttctataatagtttttctttataacttaaattatatttttaaaatacttttttttttaaattaaaaatttacttcaatcctagaaataatttatttattattttatttaataaaaaagacaataaaaaaaaatgggtaaataccatttggatctcgtgttttgcaaaaattagctattggaccatctattttgttaaatgacaaaatagaccgtatattttctaaaatggtaaaaatataggaccctaacctcaatttttaacaattttattnnttaatataactaactttaagacgatttctaacacgaatagatactataaatgtaactagttttgtcataacatctatagatcagattattattaagatttattttggtaagaaatcaatttaaggtcctatttgtacaattttaaaaaatacagggtctattttatcatttaacaaaacagagaataattaataacttttacaaaatatagagtccaaaatagtatttgctctaaaaaaatatacatttacttatacaagtgtcttttatttattataaaaaaaaaaaaaccaaacttacaaatttttaaaattattaaaatttatatataaatctacatttaatttgatacgtgtatctcccactagtattaaaataaatcaataatagtatactttgacaccaatgtcccacaatatttctcataattatatatataaatatataaaatcagaaaattattattttaaaaaaaaaaaaaaaaactcgcaaatttatagctacaagtggtttgcctgtctaacaaacatccttttgtcctttttccacagctaaacaaacaataaaattttataattacaaaaatatattttgttcaataaaaaaattaaaaaacaactaaaactataaggaaaattaattttacaatacttataaatcaactataaattttttacaataattataaataaattataaattaaaaaaaaactatttaatattatttttacaagagatatttttataaataaaaaaatttaaatattcaaaaaaaaaaaatgatatagaccctcaacttttttactatatttttattaaaatattattattattatttttttaattataataggaattacattaattttgat

SEQ ID NO: 84650 - DNA, 1133 bp, Cannabis sativa
aagaaactcccatttcaatctcaccataacatagcctcgactatttttgatcttgtccatatggacatttgggggccatattctatcacctctgttgaaggttataaatattttttaactatagtggatgatcactcaagacacccttggttatattttttaaaagccaaatcagatgccatattggcaatacagagttttttcaaactcatacatactcaatataagaccaatatcaaagcaataagaaccgataatgctaaagaactcactctcacttccttctatgcttcccaagggactatacatcacacttcctgtgtaggaagaccacagcaaaatgctgtggtagagaggaaacaccagcatattttgaatgttgcccgagcccttgcctttcaatccaatttacctctccaatattggtctttcatgatctctactgctgtctatttgttgaatagaacaccgtctatcctcctcaaagaccaaacttcttatcaattattacacaacaaaccaccccaatacaaccatcttcgaaacttcgattgtcttgcaaacgcatctcacgttagcacctcaaccaagttttcccctcgagcaagagcttgtgcatttattggttatcctccaaacatgaaggcctacactctatcaaacctacaaaacaaatattccattcaagagatgttctcttttacgaaaatatttttccatttggatcagattctgacactcagactatagactaattttttctacataatactgagaattacccatctcaaatacacaacactccccttgtcaccactgagacaatttcacctcagctacatataccagacagttcacttactgaacattcacacactaaattcaatcagtgcaaacacaaaaatccaaataagcaaaatgcacaacaatgcactaccaaatccggtcgtgcacctaaaacacctggttatttaaaagattaccaatgtgactctgtcacaacaaatcacagcactcatcaccccttgataaactttctgtcataccataaattctctccagaatttcgtgctgcaatattatccattagcttaattcccgagccaacctcttacaaacaagcttccaaattc

SEQ ID NO: 84651 - DNA, 684 bp, Cannabis sativa
atgagacctttgtggataatagtaccctctccacagatccattgttggcaccagtaatcaatggaggagttttgaccaccaatccaaatgctatgatcagctatgaagtccctagttgcccaaatgcctctcgccacaggagaggctttagggggaagagaagtagataggaatccagcatcattgcagtattttgtattaatgacctcagtccaaagagacatagaaccagaggctaggagccaacctaatttaacgagcaaacagaagttgatgtccttggctcgtctaaagcccaatccgccacaagacttaggtttacagaggctatcccatgccttcaaagataaatatctgccctttttacattggccagtccaccaaaactttcttataatggcatcaatgctatcagtagtctttttggggagaaggaaagttgacattgtatagatgggaatagaagcaagaacacttttaattagagtcaaccgcccagcttgtgagagcatattagccctccaaccttccagccgagagcttatcttttcaataacaaagtcaaaatcagagcttcgccttccattaaaaatgattgggttgcccagaaatttttcctcccccaacatctcttcaaaacccaactcctgaaggaattcttcacggcatctgtcagggcagttc

SEQ ID NO: 84652 - DNA, 594 bp, Cannabis sativa
agatgtcaccttaaatgtcctcttatcttcttggacatgagcatgaacaagccatggacacccatttgctttgcatttggccctaaacttcctactgtcattgtttatcagaacatactctttacacatgaaaatgaaatgttctttgagagcagttctgagttgtgttatatttgcaaattccattcccaaagcaaactggaaatcttctattttctgagttggattatattccaacttgtaaccacttgcttcgtcatcttcgctgtgaacacttctcaaatcttctgcatcttcaaccataatttcctcctcatccctatcatcaactctcaattcaggcactctaattcttcacactctaattcttcctcagcaaacaccatgtaatcatcttcgtaactaacatctaactcttcctctgattttgattcgatttcagaatcagatgatatattaataggactacatgttgcagaatttacttcatcagttgaaccatgtgctaatgcatcaccccatttcacaaacatgttgaagaagtagtcatcagtgcttatctttcccgatggattaacaacaacatccacttcc

SEQ ID NO: 84653 - DNA, 5318 bp, Cannabis sativa
aacaatctcaatagttcaagagacatttttaacgaccttaaaagtttagaggacataatttggtacatgtcaaaattcaaaaagtaaaaatcataattaacctaaaaataatctctaccgttatactacacaacacatggtagttactgttaagagttaaattgagttcacaccacaaaatacttttttaatagtcaaatgttaaaaaaaaaaaaaaaaaggtaaccttgcctaatcacacaaatagataggggataaaacaatactacttgaattacacatttagttacactcaacaccacaaactgatttattagtggtaaaactctctaaacttcacttctgttagttatttactcctttcgtttaaaactttattaaatgtcacaataaacatgtcatagtgtacataagtgtacatgtggcaaatttttattgatccacatcattataattatttaaataattaaaaaaaactcaaaacaattaataaaatatgtttagagcaatgaatagtattttataaatgtagagcatgactattaaattttaaaataaaaaagaaatttagagcacttttatagcgtatttttagtacggttttttaaatatttttaaaacttatatattttagagaaactattgttattactctaactttttatacaaggagcattacacctgagtttctaaaaagaattacaaactaaataagtttgtaaaaacaattgttattaactgaataggggtgacaaaatgtgtcatcgtatcgtattcgtgttatatttatttgatccgtttttatatttcgtgtcaggcgtgttgacttttttttactcgtgtttaattttctcaaccttaattcaaatctaaaaaatttgtgttgtgttcgtgttgatccacttttacgtgttttactattaccgaagctggaactatagagaaaataatagatttagattttattagaaaattttattcatctatatatatagtttatatataataaaaattaaaaaattataatattttcaattttgaaaattaaattaattattttttaactcaacaataaatcactaaacatatctttttatataattatattattattaatatcttttttattttattttattaaaaaaattgtgtcaaacatatcaaattcgtgttataagcaggttatttcttgtttgacctatttttattttatatcgatctgtttttaatccgcgtctaattttcttgatcctaacccgtaatattaatttgtgtcgtggtcgtgtgtcgtgtccaaactagttttgctacccctaattccaaatgaataatctaactacaagggtaaatttgaaaagctctctaaactatgtgccttatgtggaaataagtaataattggggactgaatatacaatttgatcttctaatattttgctgtagtaacctcttccccactccactccgtacagaagaagaaatagcttaaaaccctctgttagggcttttcaaattcacagtaatctttctctgatttcaaaaatggtgaaacaacagttatcaccgacacggccatggatactcgaggcggttccattgatggtggtcattctcatagcagctcatgtcttcgccttggtactatcgatcttagttttttcttctttaggtatttgatttcttttatacgaagctgatctttgagattgagtatttgattgttcttgtttcaggtgtattggatttacagattggctactgaaagacagccacagaggagaaaagcacattgaggatgatgaactctacgatttggagaatcaaaaatgagaaagaggaggaggttggtggaataacttaatatttatttgctctaaattttagaaatgagagttgattagattggttgtagagcgatcgatatgttactgtgctttacttgtttgtgattgtgaactaaattcacttgatgtgtattctatatttacacgaatttggaagatttcagtagatttgagtatatgaataaaccatgattcgatcctttctttcattattttctttatagctagaatgtgcataatttgtcatgattctgtcagtgtgtttatatgtgctaaaatctccatgatgctcaaatttctgtttcattttaacccatttggtcgttttcgtttattgaatagttttagaaaaagaaaagtaagggtgcaattttcttgttattctaagcccttatatgtttcatgctcggcttttgttattaaggaaaatgatttcattaatcaaaccaacaagaacacattacaacaacccacatgaccaaaccagaagctgctcaattaaccacagctacatgttacaaacaaactcaaacatggccttaatcgactgtttaatcaacctatctatacaagtagtcatataaacttttccataaaaaaatgctatgatttctattaatccaaatataattaactgtagctgccatagcaaccgaggtaatgtccaagagcaacgatctctgccttttcatgttgagatatcctagccaagcatcatgatccacagccaagtagagtgccccaaccaattttggacttgcgaaagtacactaaaagaagactatcactaccatcctcacaaataggacacagctcagagtcaatataaacatttctaagcagtagtaaatctcttgtcaaagatggttattagaagctttaatgatgaatctatgctttggggctgtcaatttacacaacacaactttgcagttatccactttgctgtattgatttgagtattgtgtataagaggtttagggcaaattaagttcaagatttgggttaagcatcattaactatatatatcaccattgttggggctataaaggggtataaataagagtttgaaaccttatgtgctttactgaaatataaagagaaattagtgaatgagtggttgaacttgatgatctattatagttggtgtcttattctcttatctttattgttttgaatgcagtttggagtgttacagattttactggattcatgtggttgataatatggtatgtgcttagctcctttggccctatattggacaataaagtataggttccctagttcttgctacgagtcttgagcatgccccatgtattgtgtgtcgtgttaacaattcacgctttctgcgaaggtaaaatgagaatgtttgtaaacgatacttcctacttctatatgtagcaattcgataatttcaaaaagtattagaatgattttcttgtatgctttcattgtttctaaagtagaaacaatccccataccgagcccttcgttgagaaacttttctaaacaatactccataattcttttctgcagtaattcaataaattaagagattgatgttcctcttgtatgtttttattgtttctagttactgtagtgcattagcccctaattgatattagagatttcataggtagtgttttcacaagcttataatttcaataaaagcctttgatgatctaagttcaaggctgttttagaatagagatgctggcgtttatccttctggtttgttaaagtggggcaggttctaggctaaggcagactaggcctatgaccccctttgtgaagcttcaacctatttcttccctttacaaactaaagaacttcgaacttttgaccattagtactttaaggctatgtttggtagaatggatggagagtttagagaggatagagagtaggaggaatggagaggatagtctccttccatctctcctctcccttctctcactcttaccaaacaaattttttttaccactacaccaaaccaccataagtgaccaaaaaaaatatttataggggtgccaaaatttcattttacatattgaaatgaattaaaatcgacaagggatcccaaatagttttggaccggtcttaacttagagatccacaagtgtaagtttaatggttggacttgtgggcttaatagtaattgtttgtatttttggtatgaagtatttttcaccttggaatatattaacttccaagttttagttttactatttatttggtaaccgatttgcattgtactccattcatgttgacaagttttgaattttacgggaagaaaataaatgaagactttacttgaatagaagaacttctttctttataatatctttgaacatagttttgtggctttattacataaaaaatggcatcgattgtataaatgtgcaactgtatttgtcagcatcttcttgttctttttactcttaaaagtgataaaagaattcaattacaatttacaagtgaagtgtgtttttagagttgataatctttttcagttggtgttacttgggtcacaagtcaacttaaaacataaaagtgcaccacacactaatattgtttaagctctcactaatattaatttgagcactgttaaaagatatcgacatagtgcaatttaatatggtgttttgtacatttgaattttaattaatatataggatctaatattaaataacattccctcaaataataatagtaataattatagggtattggccagccggtcttacggtatatggggtttaaggtacaaaattaaattttagggttcttttaattattatcaagatgatagtattagtgttttagtgtaatggtaaagtttttaaaagctcttagcttaaagtaagaattttactactacactaaataatatttattatattttcttattattcaatattttatttatatattaataattttttttacaattttggggcctgaacatttgaatatttgagacgcacgcttagctcgcctactcggctttaagtgttggacattattggatgcctttagcaatttttatattaatttgctagtttaactttacactattagtttgctattatttctttgttttttctttttctttttgagaaaattccatactctacaaaatatgggtcacatgtggtcatttttcttaataatgcaagctcgaagataccaacaaaaatatcatattatttttcaattaaattacacaatttcattttctaataaataaatccagtaatgggtcatactaaaataaaacagaaaagcacacatcatttattatacattatcattaaaaagaaaaagaaaaaaataaagcatgcttgattagttgctagagattcatataaatacgagaatggctaattaggctccctaaactttaacatgtactaaatcatgctctctgaatttttttggccgttaaaaattttccctaaactattgagattgt

SEQ ID NO: 84654 - DNA, 695 bp, Cannabis sativa
  modified_base (244)..(263): a, c, t, g, unknown or other
  modified_base (339)..(346): a, c, t, g, unknown or other
tatacttaggggtggactatactattgaaatatgtagttcattttgaactctagactatattcaatacaccaaaacactctttgtgacacatattttaaaaaaacatggatgaaatataatgaattatcaaattatcagaataaattcttgatcttgatttatgttcccttcaatatattactgttgtaatataaattgatactaataaaagttctttgacaatgtatcacactaccttaattnnnnnnnnnnnnnnnnnnnntctttacccatcttcattttgttggcacttgtgataggaactctagaacactactgagaaagtaaatctaaccatnnnnnnnnatagaaataacttatcagaattatgacaataagatagtagaattcttgcatagtctattcgaatgacttgggcaaaaattcctaatcctcataaaattttatgggatctctattgattacttaatctctagcaagtattttaaactcaagttaaaatactcgattgctatgttggtgacttagtctcaaaggaatttacaatttcagattaaaataatctgtcacaactagatatccctcaaaacaatagtaagaggttaaaagtacttccatgtatgaatttaaccagactcctactattgagtgggagccatctgagatgtaatcaaacaaggaacattaagggaca

SEQ ID NO: 84655 - DNA, 1021 bp, Cannabis sativa
ttcttcttcttcgattctcacagtgatctactccgaaatacaaggtatactcttcttcttctcatcttctttttaggtgtatatttactttgccattttagattttttttttctgctatgcctctcaaagaagagaactttttctcataaatcaaaagcacagaaagaaaaaagctctaaaaatcaaaaagcttttctgtgattttggaaaaaagaaaaaaagaaaaacttggaagtagaaataaaatctatttgaaagatgagaaaggatttatttatgaagagagaaaaataaataaaagaaaaagtaaagaaagaaaaagagaatgtgaagagaaatggtggtaataattgaagtatattaatatgtgtttgtgagaatgtgagtgtcaaagtctttgaatcaaacttattttacacaacaatatagctatctaataggcggtttggttaggaccaatttaataaaaatatattgagaaaaaaaaaataaagatgactacttttattgcttataagtgaagatggaatatatatatatatatacataaatataagtgaaaatgatttgtggagagaatgtataaggatatattgcttagggatgataatgtagaaaatgtgagaaatgtaagtatcaattcaacattatgtctttttttttttttatatatagttggataattagatcaatcatatatatgaacatatatatatatatatttattttattgtaaacacacaataaatagacattttttgggggtttgttatcatacattactatttaaaattaaactgttttcaaattcagtttaaaccaatcacatattctgaatttgttatattttcaaattctgtaccaatcacagatttataattttaaaattcaaaaacagtttacaaatactgaaccaatcatattttcagaaacatattttcagtcacagttttcagattttcatttcagaatcacagtttttaaaaatacagttttcaaatactgaaccaatcagcccct

SEQ ID NO: 84656 - DNA, 659 bp, Cannabis sativa
attatcattgtttagtgtgctaatccacttctttatatttatttattttgtaggtagttttggttcatttggttgtttatatcagatgcttctagaaggtagtctcaagttatttgtctaaatttatgagataatttggtcttatataagtcgctttgtttgtagtgactcatattctgactttgtatatttttggctagacaattagcttgttaacttaaaatttttctgcgtcgacgattgtgatagtgtgattcatatcactctttaaaagaaataaaattaaaataagtaaattaatattgaattataccaataacaatatgtcattttttataatatttgctaccttaagatataacttatcatttctctattatctttatccgcacttatatctattttaagttaattaagatttttatgtatagaattttaacataaaacatgcatctaaagttttttagttaaaaattctcaaaaattgacggcttctatttaattctattcaattttaagaatgtaaccatttttttatctcaaaaaaaaaataataataataataatgtaaccatattataaagcacaaccacaaccacaccaatcacattacttcttcttcatcaatcttcatctccatttctatggacttcttctca

SEQ ID NO: 84657 - DNA, 904 bp, Cannabis sativa
  modified_base (832)..(852): a, c, t, g, unknown or other
gtattagtagatagctctcatagagctagcctcgcttgatatgaacttacgagagaatgtgactgacacagggtctagtcgcatagtatatatcacaaagtcaaaagaatattaaacaggatcgggaggatttaatattggtcgcacatatactgagtatatgtgatgattaagtaaacctctcctgtgactagtaaagatagcttatttacataagtttggtccaactgactagtgtgttcaatgactcattagggactcacatgttccacaatatcaatgcatggaatgtctgattatgtaatcatgatgaacacagacatccaaaacgattggactaaaggacatcctgcgcaagcacaacatcatagagcctacgagctcgtgtgttgggatatgaacatgcaactcgcggcttaataagtcgcatatgttgttgcacttactacaagaacggatcaaaagttcttcatttattatttaaggatttattttgagtaaatactctaatttattataaaaacagttctaaaccgatcagttatgtaatcttaaaggacacttgctttttatataaatgagtgatccgaattaaatagaccaagctaaaatcattgcaacagtggactaagtagacctagctttggctgaaccactataactctcttattttctctttatttttactttcattttgtcagtttagtagccaataatttgagtactcgctaatctaagtgagtgctcacacatctacagttgggtattttaattttcttcaaatactcgtataaatttggtgttgtctaaatattagaaatattttaccagnnnnnnnnnnnnnnnnnnnnnatgttgaattaacatcctaaatataaattctctaaaataatgaaaataaata

SEQ ID NO: 84658 - DNA, 1118 bp, Cannabis sativa
tgagtttataaatataaataatttcagattttcaataatcatgggttgattttttaagatacgtgtttataaataaaataaactttaaaaatattttcagaaataaattaagttttttaagtaaacttaatatttttttaattaatttaatatttttatcagaatttctaataagttttattaatttttcaggatcaattgaacattataatttttaaattattttgaaaaaaaatagacaaaattttgtattggtcaaatttaatgcataaaaatacttatttttaacggtaaaagaaatagaccctaacagtagaggtataattatgtaaatgtcatattttaaaaaaaaaaaattcaacaagttgtatattttaaagggtgagttcatgtaataatgttgaaagttgaagatacaaaaatactaattattccaattaaaaagaataattgaaaataaaaatggagaaagaaagctaaaacttttgaattaagcaaattaataattttttatgtaaaattgtcaccaagttcattggttgaataagccaatgaataatgaaattaattagcaattttatttaacccaaaatgaaaacataaatattataaatttataattaagaaacaaaagcattgaaaacataactactaatgaatgaagcctcgaaaaatcatgatcaattattaatcattttgacttgaagcacccaaagtattctgtaggtaactagggtttttttattttcttctttcttttcttttcctatatacatttattatttatcattatctatatttactcaaccaaaacttaaattatacatcatgatcataattgagacaccaattttaagattttgttattactattttgcttgaaaaaccttttattttttttgggaaaacaatattgtttcttcaatcggtgtcccattaaaacctatgataaagtcattaaatgaaaaattatctcattataataatacaaaaaattcaaattaatcacttaaactctttaagatctagctaaatgtagttatagtcatgcaatatagtctaatatattgatgattatatattgtatgcagttatttttcttttaaatctagagtctc

SEQ ID NO: 84659 - DNA, 1327 bp, Cannabis sativa
taattttgtttttttttttttgaaatattaattttttgatttttaggtaaaaaaaataaaaatatttttcaaaaacatattttataaaattattttcatttttcattttttttattgataatttaaaataaaaaaaaatattactttcaaaaaattttaaacagtttttctttaatcaatattttaaattccaaccccaacttgcaccttgcgacggctacagcccagactcaaacttagatccgacttatataaaattaaaaaataaaaataaaattgaaagttatagtacacatttttgtttctatttttaaaattaaaaaacaaaagtggttatagaacaaatttttattttttaaacacaaattttactttcatttttatgattaaaaaattaaaaacataaaagtgttatcaaagaccctcttaatttagaaaaaaaaattatgtctttttttttatttatttatttttttagagcatctccaatcatgttctctaaacatattccttagctaaaatagagagtgagcttaaaaaaaattatagcgagtactctaaatgtaaggagctccttactttttttactaaatttttaatagtattataatcaaaagcattattaattttttattattttattaaattaatttatatttgataaatttaaattataaatattattaaaataatcaaacactaactgaaataggtagcatgattagagaatgagtaaaaagaatgactcctatttaatctttttaactattttaactaaaatctggctaaaaaataaagaatgtagctggagatgctctaactctaattatatgtatttcttattaaaattaaactttcaaacatactttaagagaaatattataaagacacatcacttaagttgtctattgttattagtgcaattaaatattagctcttagggatgtttatctaattcaattggcattattttgctcatagtgcattagatctgcattaagtttgaatatcatattttggatctaatccaatccgcacaataaatcaaattcaatctaacctaacgcaaaaatgccaaactaaatcgattattttagattagttacattaaattatttaatatttattaaaaaatattatttttccacataactaataacaaaataaaataaattattattattttgtgtctttaataacaaaataaaaataaaaaatcaattagcttgtgaccttaatttttttttttagattagttagtgttataaatattatatattgcatatttaaatcattaagttagatatcttaactagttttttatttt

SEQ ID NO: 84660 - DNA, 564 bp, Cannabis sativa
aagttttaatttgacacgattttcgagtaagttctttgattagcaaagatagcactgtaattgaaaaatcactgtagcgcgccttatcattagggcgttacaagttctatgccttgttttataaattttagttggttttaggttagggttttgtgtttttgtggctgtaggaattaaactgggattgggttgtgtttaggctagatttttgagtatgttggagattgatttgaatggtttccatggcttttttttatgtgaattgtaatagatgaagctaaaattgagtttccttcacttgagcatatgattttgattcaatgattgaattactgtattttgaagcttgggatatgttgtatttgtgttattacactattttagaatgtttggttaggtttgggtcgaaattgaaggagagaatccaagaatacctggtctgccagaaccggacgtgtaacgccctaaataattaggcacgctactcgagttatttacgaaaccctaatatcctaagcaggattactaatcaaaatagcgcagaatttaaacttttgaaataaa

SEQ ID NO: 84661 - DNA, 825 bp, Cannabis sativa
atatatatttatatatagattaaggttgatatgagtcaaaatattgtgcttttgagtctcttttctatctttgctaattgattgtgttcagttgaataagaacaaagtaactaattaagtaccttgaatgttatgaactccatataaatatctctattttaaatatagacatatatatatatttataaattaaaggttatgtcatattccttttatattcacatcatatcacattactttatatttctaccaaaattataagagcaccttctccaattctatctttactactaactaaggttgaaccagtagttctagagaattaagaaaatccaaccagcgacaccaaactaaaagatcatattctatactcactatatgcataactggactttatgtagaattgggcttagttattggattatagagtgtttgaggttcaatgggctaagtccaattgttaatggcgtgtccaaatagaccattcatattattagaaaaatactacaactatttaccattccattatgttctacactcacatggctcttgtatgttataatctttttcaactaagtagataaattttctctcttataaatattgattaagatgtaaacttattaattatatatttcctctctaagcattatatatgttttatctaagtagagattcaatcatgcttatctatctttgctcaattgtggtagattcaatgttatctatctttgtttgtacagttcaaacaataacaagacttgcagcaatgaggagataaacgaaatacatgattatgagccagttcatgaagccttatatatt

SEQ ID NO: 84662 - DNA, 1006 bp, Cannabis sativa
  modified_base (657)..(662): a, c, t, g, unknown or other
atacatcctggtggtgccaggatgcaaggagtatggagtggtatgagcctcttcaagaattttatttctaagttctgcaccactttgaacacaaaccctggtctcaaatagcagcattccactgtctgacactgtaaaatctctgacttgaccagcagaaacttccccgatcttcactaattctggatcagttaactgagcagctttaattcgttctaacagatcagattgcaacatcaagttatgaagtttacctacaacaaactcgatgcttgatctgaccatgtcctctgctaaccgaggtgaaatatgaatcatactagttacctgccagggacccttcctgctcagggcatcaaccaatatattggccttcccaagatggtaaaggatctcacagtcgtaatccttaaccaactctaaccaacgcctctacctcatattcaagtctttctgggtaaagatgtatttgaggctcttatggtcggtataaatttcacttctctctctgtagagataatgccgccaaatctttaaagcaaacactaccgcggtaagttctaaatcatgagtcaggtatcgctattcatactctttcaactgacgagaggcataggcaataacctgattgacctgcatcagtacacaccccagacnnnnnntggatgcatcacaataaactacgaacttttctttatcagaaggtagggctaacactggagttgtgattaatctctctttcagctcccgaaaacttgcttcacacttatctgttcacacaaaacgctgattcttttttattaagcacggctaagggtgttgaaattttagaaaacccttttacgaaccaacgataataaccagccagacccaagaaacttctaacttttataactgtttttggtgtcggccaatccctgatggattctatcttccccggatccaccttgatcttgtcttggctaataatgtgcccaagaaaggacacctgagataattaggcacg

SEQ ID NO: 84663 - DNA, 826 bp, Cannabis sativa
acgagctttacctcctttatgtggtcctccaattaaacttacaaatttcgaaagattgttaattaacttatgaaaatcaaatgtcaacttgttcatatgattgtttgatgtgaagggcagaaaagctagagatagactattcaggaggactctagcttgtgtctcttgatcaaaaatatctccatggagttcaaactcgtggaaatgctgacacactatcaagtaggtgatcatagacatgttgatttggtttcatccatgcatttgtacagtttctagtagcatcaaaacaagcttgatctgatgtctttccaagcaatttattcaactgattcatatcctcaggtatcatgaaattgctagcaaaccttgctatcaaggtgtgtatcatgcttgacagtataaaaaatagagctttattgtgactttctcccaatgctcatatcattctctatcaatttttatagaattttcacctagtatcttaggtcattcttcaatttgaataaacaatgaattttcacctatgagaacaatattgatgttctctctccaattgaggaagttagctccaatgagcttattttcaaaaatatgtgacacaatttggttgcataaagacatagtgggcactacaagtatcaataaattgaaatcaattatatagttcaatataaatccatacacatgtaacgccacgatttcccgagacgtcacacttactagtatgtttaaaactatttatgataaagacaataaaagacttctttaatgaaaaataactaaccatgagatctcattatttttaaaacaaaacatttattta

SEQ ID NO: 84664 - DNA, 584 bp, Cannabis sativa
tcacccatatatatatatattaatcatggatttctttatgaaataataactatgttgtttgattttgatggagagttaaaaatcatgatttattatttctggtaataattaattcgagtgatacatctcagatgattggtgtagaaatataaatgaaataccaccataatttatagtttaataatatgattatttacttattttgagatgcgggtttattttttgttttgccccaatttctcattgttcacatcattgcagctcctgaggtggttgaaaagccaggagataattccttagcaaaactgaagcatctatatacccatgctaaagatctttctcaaagtgaagtaaggtatgttagtttgtaacttcctaatttaagtgaaattgtaaatgcataattttttcatgggctgaagttagcttcttgtaagattatgtttattggtttatcagcatttgttgtcattattaatttgcaccacttaatttcaatgtcatgtttagtttcagtgtttctaatatatgttgatgaatcaacttgatgccctggttctttctggaactcaagggcagcaacg

SEQ ID NO: 84665 - DNA, 1301 bp, Cannabis sativa
atcattctactttactatttagcatgtacaaactacactcaaataattaaaatttaccaagcatggtaccatattaatttttatagaatatttaaagttaaatcacaatacaatcttatcaattatttagatccaacaatagccaaaaaaaaaattcaaatcatgcaacataaccctagtattagtatatcatcagctcataaagtgacaacttgactcataaaaacaaacaaatctactctttactagacataaaaatatgtaaagtctttttttggcaatttaggtgtcaaaatactttttatttatggtgtaatttctttgtgcaattaaaccgattttattgccttaatattatgtatttattgttcttttctatcaaaggaaataatcatttttcagctatcctttttcttattttataagcttcttgtaagagaataaattctcttattgtaaggtatatggaaaactttgaccattgctatttctctttaatgtgtttaattgtgtcttgatcaaatcagatctagcacattatttttggcaggtatctagtccatgttcatgatcggccacctatttggaaagtttctttttctagtctggtttgctgctgtagaacctgattctgatgttgcaaagtaggtatcattttataaaagtttgtacagctatggaatcgattatgtggctgtctctagggttcctatgttctataaatagaacctagagaccagccaatcggttaaactcttctagctttctttttctttttgcatatttttatttgtgaagagagagtttttttttttttttgtgaaaacttagttgttcatctagattagtatttgtatatttgttcttatacatgtattatggtcggtttgaacaacttgattgaacaagagaaaggtcttcgggaaaagacttgttcaagccttacttcgggaggaagtaagtactcacacctcaaagatgaagggagttccctgtttgatggtggttcaaaaataagattcatgaattgtgttacaaaagattgcagcaaagatttagagggagtttaaacttttataagtcaattatctttgtaattttttgaaactttactaattgatttctttctctaggcatgaccatgtggactaggagtgttcgaaagaacactgataccacgtacaaatctcttatgtcaagtaattttatttttctgctgttatttttatttctacttaatttattgttctggttctggtttatttctacaaaactgtattttgcagtaacagaattacatt

SEQ ID NO: 84666 - DNA, 771 bp, Cannabis sativa
ttcggtagatcttttatctgtttcagcatttagagaactttttatcacaatattttttttttttctataatcgtgtattttatatttattaaggattagtatttataaatttttagaaaattctaaatactttatagtgccgataataaagtttatcaacattataaactatatatgcatggaaaaatatatattaattgtacatgaactttattttcaacacagtaactattaagatttttctaaaaatttataggtggttctaaatagttataatgtatgtaattctgaatgtcaaacagatagagaacattcctttatttttaaaaaataaaaataaatagacatatcaggcaataattcattacatgatcactcaaataggagaatcatgttgttacaacaaagactttttataaaaatactagattttggataaaaatttataattttacaatcacatagaatttttttacaaaaatactgtatttttataaaacaatcgtaaaacaactaattataacaattaaaataatagtggaacaactaaaaaataatcgtgaaacaactgtaaaaatttaacacagtatatattataaaacttatatattacttttgaaaaaaaattccgccccacaataatttttttttttttaatatataatgtaaaaatcccttacaaaaataaaaatgaaaacactaataataccatcagcttcagacttcaactataaaatatcaataaaccattagcattgaaacatcaaacaa

SEQ ID NO: 84667 - DNA, 1554 bp, Cannabis sativa
aaataagagcttgcataaccataaaaaatatcagcatcttgacgcaaatttattcttaatataactcaagcaaatgcctttaaaatcattagaaacaattttatatctttgcaatacatacatgccaaaaacaacaagattatccccttaatccaacacacatgcaaagatgaacatattcacacatggaacataattttcaatcattttacagcagcttgcaattcaaaataaatcaattaaaatggctatctcaacacaagcacaaagaaaactaaacaaagctttgatccaagaaacaactcacacattcaatcaaagaaagaaatagcttaagagggaaaggtgttcgatttttgaagaagaagaaacccagaaatttcagcaacaaattcaattagaaagtaagaaaagctacatcaaatccaagcaagaacaaagtcccaaatctccaaaactaagcttactaccaaaagcaaatcaccacaaaattaaagctagaaaaatgagttttgagagagagggaagggggttcagctgctagggctggaaaaatgcaaaaattaaaatcccatttgcttaatatttctcttttaatgactcaaaaaccaaaatgcacaattaccccattactcttagggccaaattcccattttcaagcatacaaaggcaaaaatataattctcacatggtgataacaatgattttaaaattaatgagtttttaataaattaatcaattttttatattgtttctgaaatccaatttaatttatgcaaatgatagatttatttattgaaacttataatataataatatttctataattaattaattaattttcatttgttcagtttaaaataattaaaagaattatgactctaatttatttttctcgtgttattagtagaatagttactcatgctatgaaaaattatataaaaaatgtcaaaatttagaatttattatattttatgacttaacaatatatatagctccaggctaatttaattttttttagtacaataataaaaatatatataattctaatatatagtaataataaaatcatattatataattctatattattaatttttattaagaagtttaaaacttattcaatttaaaattctatatagaattttgaattgttttatttttttcaaacaaatttttattgtaaaagtaggtaaatatgattgtggagggaaaaattagagttttctccataatatattgtttttatgtcccaatattttaaagttattatcataattaaatctcacacgttattattatcgtatctcacatcatgttgtctcaccatatctcaccaattgtcatcaatacattaatcttatatcttagcttcccaaatctcaatattaatcttagattctattttgaattttaaactttcatatcaccgccttagtcttagctttatataaatatatagatttatatagatatataaattattactcatccaatctaattatatattatacccttttattggtaagtaaataatattcaaataatatagtt

SEQ ID NO: 84668 - DNA, 711 bp, Cannabis sativa
caatgtacatattgaccacaccggcctgcgtgccgagttgccagaagttgttttgggttggttgtatctgctatgtattttgattttgtggttaaatagttattgtatacaattctttagcaaaacttttataacagggatccccggaacacactttttatgccgttataatgtccgttgttcatattttattttagtctagtttttaattatatcacggttattaataattaattattctactagtattaaactagtttataaaatcacacacgtggcgtccctatatattagggagttacaaaatgaaggtccaaattttctctaagtatgatcggcctgatgatcacagtacgagaagctggcctataaatacccctgagtagaattagatatgggtaactctctgaagaaaaaacattatattaacaactctataagaaattcctatcatgcttcctcttcttcaagaggaacgagaggaataaagagtttcagtctattgtataccaatttatattattattgtaatgccttaatgctaaggcacgctgcattaatttttcaattacagtgttgtttttgctaaccaaagaattttctcaaaattcgtgtaacattaaaacttttatattaaatattaaactttataatctttacataaatatatacaaattcgggatcctgtttttaaactttttacaacatatt

SEQ ID NO: 84669 - DNA, 740 bp, Cannabis sativa
taagcaaaaaataaataaataaattgtatttcactttattatttcttttttattttctttgaataataatattatttcactttactattttattttacttaaaattacatttagtttctcttttcagtactttttcttcacttacattttgttctacttaattttcccaaaaaaaaaaaaaaataataactactcttgcacaagggtctattattaaaatcctaaatgttacacagaccatacagatactcttgtgcagaatcaaaatctgtgtctatttcactatagtataaccaatacgcacttctcaaattttgcattagaatcataaacaattaattgatgatcagataattaaaagaaattaaatataaataaattagatgcacatataaaattaaggaagaactaaatcatattaaaaccgtaataaagtgtcaaacaatctccattaacaaccctaattaaaaatctagctactcatagttgaaaaaattgataacaactaactaagaacatgaaaaataaagtagaagaaagaactcatcgaataaataatgttgaaagtctccagagcctccttttgcctctaatttgcgtctctcaaagttttgttctcaaaagtgtcaaagatcccttttaaatctcgaaattagggtttgcaagccttaatttttttcccttcagatcagagtggtgttggaattattttactaggatctagatttactaacacgtat

SEQ ID NO: 84670 - DNA, 549 bp, Cannabis sativa
taatcttattcctttctgtccatattgctcaggaacacataattaattttccaaaggcatctctttccaccacttcagaagtataaagtaaaacattctttaaattaatctcttcttttacttcatgtagaaaagagaattccagaagattccaaatgacttgtgaaacgggataccagaaaattgcatgagcattcgactctcctccaaaaccacatagctggaaagaagtactagaggaagtattccgtctaaacaaaccattacgcgtagctactaaattcgtttgttggcggctaaaagcttcttgttcacttcacccaactaaacccttacagtatcgacctccttcttagccgtatctagggttgagcaacagttggtttggtcggttttttacacaaaagaaatccaaaaattggttttcaattttcatggttataatccgaacaccgaccgaccattatataaatgttaaaaactgaccgttttaatccactgtttggtcggtttgaactgaccaaaccgagcttcattttttttttaaaa

SEQ ID NO: 84671 - DNA, 794 bp, Cannabis sativa
  modified_base (754)..(769): a, c, t, g, unknown or other
gttggaaggttcttgactaaaaggcaaattgattttgaggccatgcaacacttgatggcgtcgttgtggcagccgaggaagggggtgtttgttaaaaagctggatactaatcgatatctctttcaattttatcatgagattgacattcaaagtatgatgaaccgtagcccttggacttttaataagtttttgctaatctttaagaggttgcagcgaggggaggattcaagattggttaccttgaatgaagttgatatgtgggtgcaattacatgatcttagatcagggtttaaaaaatggctacggttgttaaggataacggaaactacattggaaaatttattgaatcggatgaaaggaatttcatgggcttatggagggattatcttcgtgttcgtgtcactttggatgttacgaagacactaaagagacgaatgaagcttcgcaatactgaagggattgaattctggattaactttaagtattaacatctccccactttctgactttgtttgtggtattatggggcattttgaaaactttttgtccacgacgtttcgtggttggcaagggtctgttaattaagtcgtatggggaatggaggagattgaggcctttacgtaaaaatcacatgattggagcgtaatggctcaagcaatgcagagctgccatggatgatgactctgcagcaaccacagtttctcatagttcagaacctcaatcgatgatgctgttagaatatattttaccaggnnnnnnnnnnnnnnnnaagtatgtttttaacatcctaatat

SEQ ID NO: 84672 - DNA, 6758 bp, Cannabis sativa
ggggccaatagtagtgggtacgacataatagacccaaccctccctcacatgaacaagcccaattgtgaaggcccatttgtcttatttaaatcagactgctctcaaattagttccctatttatataaattattttcgtatcaggatcgtcaacaagggcgttctagtatgttgtagattcttatccaaaacttgtatcatttgattagaaacatgtgaagtgtatggctaacccataacaaaagtttggtaagggaaccggagcaagctaccatgagacaaaagatttctttcagtaaaaaacttgactttaagaaagaagtgttgataaatgtccaatattattttaatagccaaagtcaaattattggtatcctcatagaacaagagactatcatcagcaaagagaaggtatgatacggatggagcatggaatgttaagcataagccctttagatttcccattgattcctcaaattgtagtagcctagaaagtcctttagaacaaataaaaaacaaataaggggacaatggatcaccttatcggagccctcttgttggttgaacatggcctacggcttcacctttgagcatgaatgaaaaacttgtagaacataagcaactttgcatcaatgcaatccatttgttgtgaaaccccatcttacgcattacctcttgaatctataattactctactctatcaaaagctttgctcatatccaattttagcactgagtaacccctagccccacatgatttatgtttcaggtgatggatcaactcaaaggccactaatatattgtctgtgatgagtcttattgagagaaaagcactctgagttttggagatgacaaaaggtagaacttccttaaatctgattgctagagcttttgatatgatcttatagatgacattacacaaactgattggttgaaaaccactcattccatgaggaagtttgatttttgggataagggtaatgagtgattgattaatagattccatactgcaaccttcatttaagaccccttgaatgactttggtaacataatctcccacgatattccaataattctggtagaacattgctgacattccatcaccaccaggcttttatcaagactcatagattttagaacagctaggacttcattgcttgtgaaaggcttgatgagggagtcattcattataggtgtgactgtggctggtatagttacaagagtaaaatctaaagcttcttcattaatctctaaagctacaaacaagttagcaaaataagatgatataatctcagatataccctactttgaagtgacaacatggccattccatttgtactaaccagtgatttgattgtattatgttgtctacgtgatgatgcatatgcgtgaaaaaaatttgtattttgatctccactttggatccaatccactcgagagcgctgctgtcaatacatttcttcttgcactaacagatcatctaaaacattctcagaatgctttagatcttgcatagtttttggagttcgattgctagagttattcaaagttgtgacacacttatgcaattgtgaaatatttttttgtaatttccaaatttctacttacgccactgctgtcgtgaatcagtagagctctttaaattcgtgaggaactccataatggcatctctatgagtagaaggatgccaatgtttctaaataagggtggtagcttcttcatgttgcaatcatattttctcaaaacaaaatctaaagcgccttagttactgctgacctacgaaattttacagagaaacttggatagcgatggcacggtggtcagaattatagtagtccaagtaaatgaatcaccttcataaggttgttcatacaagtgacaaaagtcaaggacatgcttaaatttatccatctgtgattcattgtctaaggctccacctaatttgttttggttggataaaatttcattaagtctccaattaccaaccatggtaacaaaggtgcaccatcttttaacctttccaaaagagttcatttgtggtgacaattttgagtagctagtgctccataaaaggcagtaaaatgccattttggaccttttcacaagccatgtagaaatcaaacatatttatattaaggtttaaaagagttacatctacataatccttccaaaataacaacccttgactaagaccaacacgtgggacttcaagtcccttattgaaatataaaatttgatgaaaacgagaaataacattaggacttaacttagtttccataataagtattggggatttatctttgacaagaaaacatacatgacagaaagcactcgagtttcccaaaccacgagcattccaactaacgattttcatgactggttgcaagggtgaccctcaacctccgcggtgttgtctagagcaccagaataatccatattatcaatagaaacatcttggtgttgttcatcttcagctgacaagggagaagcgaacatgtttgatttattacccctgcaccttttcagtgtttgtcgcagagtaacaccatataattgtctcttaactaggtaattaggtgacaaattttctttcataacaagcttttgtgcagcagtagagataattgaaggtgcacaattgcctggctgcaaggaatttgaagattgagttagtttttgttgtgtgtttgtatagatgggtgaattggtgggtatgtagcaaagatgttagaggacatctccatcccagaaagcagagagtaaatcttaggcagattagagacaacttctttaaggtttggctatgaatttttatggaggatttcaccattggtttttggtggcttattaacagaaaatttatggctatgtaggaacattattgagtaatgctggtgcaaaatggatggttggccttgatgaaaagtttgttgttttcgaaaccacacttgagacatggatttgttttttgtaagttcatcatgggtcaatgatgtagaagatccagtagtagcattgttcagactagcatattcagtatgcaagccttgtgtaccaatctgattcatgtgttgcagaactccgtttattgcagccataaaaatttatgcaggatttgctatcatagaggttgtgttccaaattgtgctcgtgcaatttgaagtactggtaccaagtattacagatgtattgatctaagtttgttaagaagattcacccatgaataactgtcttggttgtggttgactattgttgttcaaactaggaatcgtagaattcaaatagttctttgccaaaagagtgaggagtggccaagcattaccctttgagaaatatgttctatagtgataataatctgaagttgggagtgttgaacctttcatggttggcctatattctagtttcggctcttctccattatcaagcttttcaagtaaaccagacacttattgaaggggtgacccgactcccacactccatactattcgggcaatctttcataccagaattcaacccaaaacttatcttttgtctgctgtaaagtgataattcttcctctcattagtggctttttgatattaatcttaacccgaactcgcataataggttctcacccttcatttagtgtatcctcataaactttcataaatttaccaactatatccccaagtgcttttgcaagtcctcttgtttttctaagaaacgagagtctataaatttggactgaaaaggtttgaaaatgagtctcagaggtaacattttggccagggtctggtgtatgcaacagtatgtgcatattctagaagtgaaaaggttcacgatatttgtcacctgcacaaccaatatttagtaaacacaagtttgaagcttcagagattttgaaaggatatcttccattccaatgctctgcaatctaatttctcaaagttgagagccagacttttctgttggtgaggacccttgcacatagcacatggtccaaagtggaatgaatatcaacaactacatcgtcagcaaattcagatacagattcttcctcctcagttagtgtaatagtagccttcattttgtgtgtaagtggatctatggagtaaactagatttttggattgaagggaggagttacataaggtttgtggatgaaaatcaaaataaaaaaaaaatgtagaaagcgttaaatgattaaaaactacctcagagcacatattgcaacatacactttttacttttggatatccaattttctagagttgtttttttatattactgaaacgcaatatttttgtaattttgaaactttaacactgtattttttaaaatttaatacaggaaaaatgtaaaaaaaaatgtgatagaaaaaatgtaaacatgaaaaaaaaaattgggtatttttataagataccttatattattattattattattattattactattattatttttattattattattactattggaattttttatttttacaacaacaaaagatccacctcaaaccttgggcgcttttctttttgttatctttctctctattgtaaatctataaattacatgatccatccacagagcttacacctctaatcaatcgaaacttggtgacctactccatcggtctttaaaggactcattcaaatacaggctgctacttctgtccgtactgctaaacgacgtcatttcatcatcatcaacatccagtaatgcaagactcaaatgcaactctgcacttgaatttggataaacttcatcatcttcttctccttggttctctgatatgtcatgttgttgacaaatgttttttgagtttgcccacttctcaatatcttcttctcctttcaatatcttcaatatctgaggatcaaacaaaaaacaaataaaaaaatggttaaaagaacaaaaactttcccaaaaaagtgatgacattggtttacaaaacgatgtagcattacttggatgatgctagggcgaagcctagatgagcgaatgaggcaaagagttgctgctagaaccattctcttcatttgaacttcatcaacttttccatccaaatttgggtctaataaacttttcacatctctactctctaatagtggctttgcctataaacaagtatttcatattagtcaaataagaagggaaaaaaaaggtttctaaagtttataggatagatttttgataagttttcactcttacccacatgaccaaactctcttgtcctttaggagaatcagaaacaattggtcttcttccagacaagagttcaagaagtacaactccaaatgcatagacatcaatcttgtcactaacttttccatacatgaaatattcaggtgctagatagccaaatgttccaaccacatctccttgggttacaaaagatgaagttatggggccccatatggccaatccaaaatcagataactgtcacacaaaggaaaatacaatcaaacattattagtttattattatcaaagaaagaaaaccaagctatgtgaatgtttgcagactaacctttgcttcaaactcattagagagaagaacgtttgcagacttaatatctctatgaatcacaggctgaggactttctttgtgaaggtaatggagagcttccgcaatcccaatagctacatcatatcttagttcccatgacaaaacaaacttgtcttccttcttacctaaataattattcatatagtttgttcagtttgtatagatgccatcttaatcttatgctaatctttaatgtagagcaaagtagttaaaatagaataagtaattttggactaggagttaaactttaccatgtagattttcttctaagcttcctttaggaagaaaatcatagacagaaatcagagcattatcctcaacacaaattcccagtaaaggagtgatgtgtttgtgtttcaaagaagatataatgtcaaattcgagggcaaaatctttccacccttgttttgatgattcaagaatcttaattgccactaactttccacattcaagagttcccttatacacacggttacaccccccatttccaatcagattttctatcattaaaagaggaaaaaaagactttcaacatatgcttaagattataaattgaatgatacaacctttagtagaacagaagataaaaaacctgaagcaaattgagaagttgacgctttgagatcatcaagagtgaaccatttgtagccacgtgagttggtgagaagaagattttgcaacccttctggtatttcactaaaatcagataatttgatactattattagtgtcattatcaaagtcattgagctctccttccatgttgggattctctactattgttggacaatgtaaatattgcattggagaccgatctggcaagctcatcacccaatgaaccactgagatgttccttgccttcggggtatgtggggcccctgaaattgattttctaagcaaaggccaaccaagcttttggtccatagaaaaagaatcggttgaaagaagagaatctgatcttgaaaggcttcttctcttctcttgatggcttattagactgaatgagtcagtactcctagtcgtttcacaaaaggataccacagtttccgtctccgcttcagagtcgccaaattcagacacagtttcttttgttgtaaaaggacttggtttaagttctttccgatcattcgtcgcagtgtctataaaatagaatcagaaaacagaaatttatttattttcttcgagataattaatgcatcaaatgggg

SEQ ID NO: 84673 - DNA, 2427 bp, Cannabis sativa
  modified_base (59)..(62): a, c, t, g, unknown or other
ttttttaagttatgttttgtataataattaatatattaaataataaataatgtgtaatnnnntaatttttatgtaatttaataatttttatgcacttaaattttgtaatatgggttcatatttttctagtatattagtatcatttttataattctttaagttatgttttgtataataattactatattgaataataaataatgtgcaatattttattttgttgttttacttaaaatacattaatataattcttatgttaagtattagaatcaatgtttaggatatatttgttaattcttataaaagtatgttaaagaaaccatacctaattctactaaaatttcaacaatataacgactataattgaacgtttctaaaaaaattaaagctactaataacaacaaaacataattcaaaacaatataaaactatcacaataatatttagcaatacaaaaatttaccaatcatccgaccatagtacatgtattcgtagaacctacttcattacgggtgaatatttaagatattcaaactcatttaacatgcatattattctacttatcgatcttaccgtagtataatatatcacagaatctactaatttactagttagtaactaactactatatactaaatataatttgtaactaaccagtaactaattttactctaaattactaactatataataaccggcgctactcacgcatccatgatttttccataacgaaaagcaacaaaaaaaatcctaacaactaagtttaagagaaacttatatcaaataattttatcctaaatctattgaaattttaacaacatagcgactataattgaacattctcaaaaaaatttataaggctatcaataacaacaaaaaacaatctaaaagaagataaaacaagcgatgatgacttatatgatttctaatcatcattgcattttttattaatattttaattcgagttttatgagtcaagtgtgttatagtataatagaatagttctagaaacataattatctttactttagtttaagttttatgatatatctttggtatgtttgaattttatgtgatattttattcatccttaggtgttctaaaatattatttcaatataatttgtgagacgcgtcaaatgcctcgaggcttacgaaattaataactagtgactaagtatagtatactaaattactaactagtaactagtcttaattctaccaaatttcagcagcataatgactataattgaacgttctccaaaaatttaaagctattaattaatagcaacaaaacacaatccaaaataatataaaaataatcacaataatatttagcaataaaaaaatttaccacccatccgaccgcagtagatgtattcttagaacttacttcactacggatgaatatttaagatattcaaactcatttaacatgcatatcattccacccatctgaccatagtaaatattaatatttaagatattcaaactctactaagcattcataattaattaataataaaagttaataaatgtatacctcgcactaggtagaaatcgatcaataccaaataaattggatccttgtaaattgatctcacaacctacaatataaagaaatattacaaaattaaaatttctttatttaactacttattagttatatatttatgagtaactagttactaactagttaccaatgagtaattagttagtaataaaaatacatcaatgagaatgaaaattagtaacttgttaagtagttgtaactaactattttactagctactaaaaaattaaaaacacataaattaaattgaaaagagaaaaaaaaatgataaaaatagaattaatttctaaactttttttaaaaaattaatttctaaacttttaatttaacactgtcctatctcattttcattcacaatatttaataaaactattagtttaaaatattcagtatatacatatacaataaataaaaaaaatacaatataattataatatttatatacatacatataaaaacaatatatatacatacaatacatatacatatacaattataaaatatatatacatacaatacgtacatttaataaaatacaaaatacatatatatgtactattaaagtttagatttttatcttattaccaaaatccagccatcatgcacaactacaagaacacaatcttaacaaagaaaaatcctaaaaatcaaaataaaaaataaagcaatttacattactaaaattattagagattagataatttataccttaatggacgttgagattcaacgatttctccaccaaaagcggcggctggaactacaaccaccacaaccaccacctctaagctcgatttaccctaaaaaaccaaataaaaaatgataaaactccggggatatatttttgggtatgaa

SEQ ID NO: 84674 - DNA, 676 bp, Cannabis sativa
ccggtcaaggccagcaacacaacacaaggctgaaaaaattcaaccatacactctcccacagtatggccagctagaccctagcacactcaagcctataacccatccaaagagggtcaatcaatcaagtctctacagcaacagatacttctgtgtaagcacagttggatcaaatgaggaacattatcaagggcctagctagtccaaaaccttcaaaccttgagctagataggttgaggggatcactattcatgacatacataaataccttgcccttgcccaagttcaagatgccaatatggaagatgtataccggaatagaaaacccactataacacattaagtacttttgagatgtagctttatctccagaagattactggtgatgtgtaatgttgcatattcctagaaactttgtcgaaaacaactcagtaatgatacttcaagctttccccaggaagattcgattcctaaaatgagttttcccaagaattctacacacaattctcatcctcaaggcttataccatcgtggctagaagaccttgttaaagtcaaacaacaacaagaagaatctttgaaggatctcaattaacaacatgaaggagttcctcgatagagctgatgtaacgtgaaaaaccgtgtttttgcaaatgtcaactatatataagaaaatataa

SEQ ID NO: 84675 - DNA, 860 bp, Cannabis sativa
  modified_base (540)..(544): a, c, t, g, unknown or other
ttttttctttttgtttttaaaatgataatcgaagagtttcaattacacctttcaattcttttggtccacatgaaaatgacataattacactactattattattagataattaatgttacttttttaatataattacaactcttttttgctattttttttttagccaaaaaattaaattttattaaatcaaatcaactaccaaaatagcttccaaactagcagggacaaaactcccacgacaaacacagctagaaataaaattttaaaataaaaatttgtatataattcatttaaaaaaaaaattatatattattattacaatattcaaatagtccttgtattttaaaatatattgagtgtagaattttttacaatttttgcgctgaaaaatttcaaatgcattaagaagaaaataaaattttaataatcacatgaggattcaccatttaaaattgagcattgctattaggcaccagtggtgcctagcaccttctcgacatgtcgcgttacgattggctagcgatactccctaaaagctannnnnttaaattatatgggacccgatactgttagaccaatagcgatattgacacataagagggtaataggcaccactggtgccctttagcatttctctttaaaattgacaaaaatcattgtaatgattacaaaaatcccacttaactaagacttgggctgactcatttaaacttctatcgagaaaactaaatagttcatttttttttaaagagagaggacatcgatgtgccatacgacgagaaaataatcaattgtgcatgcaatcaagatgaacaggtaaccattcttcagagaaggaccctaatgagatcgacttgaga

SEQ ID NO: 84676 - DNA, 748 bp, Cannabis sativa
tttcactagtgttctactggtattttttagttgttctacagtaattttgagttgttctattttatgttctactggtatttataaaaatactgtatttttaaaaactttttcgcgtgacagtatttttataaaaattaatccaaattctaatatttttgtaagttaccctaataattctctatcgttaggtaaatcaacttgaaaggccactggcccatcaatacctctccggccggtagttaccaaaaaaatttgaaaaatatggccacttttttattctttataacctttaatatcaatttatacatatatatttatatgtataaacaaacaaaaattatcatcatatattagaaggacacgcgaagaaaataaaaatataattagtagccgctgtgacttatcacatttggagaagtaggaatcaagtattttagtattaaagtgtgcaattttttcatgtaaattaagtttgagataaggagtggaattcatttcatgttatagataaagaatggattactcgattgtgtatatagatagatctttttcaggcccaagggtgttgttagtttgtacataacaagttgtggttggaacatatactcatctcattcaccaaaaaaaaccctaagttattcctaaaatcaaatcaaaattatttctattctatataaagtgtgcctatataactaaatttttgctttatgaaaaattcatgggtgtgaatttttatttatatttaata

SEQ ID NO: 84677 - DNA, 1193 bp, Cannabis sativa
acttacatttcaaaaattaaaaaacatttaaaagtacggtggggcccccctgccgtacaacggattccaatccgtgttttgcatatatgggcacaaaatcggctgactatatatatatatagatacacaatattaaatgaattagtataatatgtacaaatagacttgagtaattaatagaaaagggtatagtgtttaatctcacaagaaaagctttcatgaacaagttggagtaaccatgagacttaatgaactctcctaacgtttcatctcgctctattatgtctcggttgttctcaagcatatcaacatagctaatatggtcacaaaaatcaaataaataattataagcaaaatgaaaatagagtatctataatattttatgtagactaagatcataatggaaagatgtaaaagttaagctatattttatacaaattaaattaaaagtagttttataatatttttacatcaatttttattattgtactccaatgcataattataaatcttaatgtaaaatttaatatgttatttaatgttcacttaataatttattaaaaaatataaattaataataatacaaaattaaatgtaaaatttaataataaaataataatataagtcatttatttaatgtaaagaattatgatagctaaaatttaataataaaataatattaaaaataacataatgataaatataaaaagtatttattgtgatgcaaattttgcatcatgttatattataatgcgaatttaaatcacttttgattatgtgagatttttgcatcatgatttagcacaccattggaatagactttaataaagtgagctatattttgtgcttgcattacttatttgcatctctattaattggagatgctctaacataattaagtgttgctcattcagtgtcagtattaacatataataataattatataatcggtaatgcattgtattactattgggccataataggatggacataatgtactaatacgctcgggctcatcggcgcgctctaaaatatttttggctagtcttttgagctaagacaactatttttctcacattgaatatatataatatattgggcccataataacttataaagagaattgtgctcgtgattggtatttcaaggtagaatgggcgtggtcaggcctagctttgggcataagtgagtta

SEQ ID NO: 84678 - DNA, 800 bp, Cannabis sativa
cattttattttataatgatcaatctaaaattgatttaaatttaaatgtgtatgaaatgacttgaatatccttgtttgagaaaagatgtgatattttggcccttgggggcaagttggtcttttggccaattaattgaattttaattaaattgaaattttggcaaaaatgaatagatttttctagctttttctccctctaactcgatccttctctctctctcaaacccttctttgtttgaacattgaattgaagttaagtgcttgggaaattgtttaaagaagctttgattcttggtgcttggttgtgcaaggaagtgaggcagtgttcctactgttttaatttttgaatccttgctcaaattgaaaatgaaattatgattttaaagcttttgatgttcttggtatgcatgagttggatattagtataatcttggtagttcatgcttgtttgagtaggaatttgtgtaggaagtttctcttgtatctattgatgtaatttgtgggctgattttatgtttttagttgggttataattgtgattttggcttttgttagttgctggaaaataatgggggttttatgagttgaagctcaagttcttgagcttgagttcttgttggtttaaagcttgattttgagtttattgtgcaatatgaaattgggggtttaagttgaaatttaatgcatgatttatgtattttagctctctaatgtttgctagtagctctatttgtaatttgagattttgattaagttttgggggtgttttggttgagtttggaagctgattttcgtgtaaag

SEQ ID NO: 84679 - DNA, 845 bp, Cannabis sativa
tagtctttaaacgacatatttgataaagacagttccattcatatttgtccttgtcatatataatctctattatataaaacactttcacttaatatcatactacatcagtgaaccgtagtagcaacaattgattaatgatttcagaactttaatgttgatggctattttattcgtaggtaagtgatcttagatctctataaaactacaagtgtcaatctcataaatgaataaggaatatcctaatatttataaatttttcaataataaatataaataatttgacattcatgcatataaaaaaaagtttactcttattaataattaaaaatgtctttagaggctatttagggcataaatcataacaatctcccagtagtcctaaaaacaaattaggcttctccttttgttgacctcacttttagccaacgacattgagtctaatttgaaagcgacaagtagtataataggaagatcaagtaataaagcaaataaagacacatgaatcttatagaggttcaatcccgagcagttcggtaatagcctaatcttcttaggttgtattgacttaagaataaggagaatggttccttttcttacagctctcacaataatatctctgaatatgaattctaagatagatttttgaccctttccccagtgagtatggatcactatttatagggccttaagcttgggagggaagtatttcccttctgattacaattgatataagtggaaagattggaaagtaaataaagaatacactaatcaagggatttggacagcttgccatatctttgtgatctgatcccaaagttgtagggatttcttcggtgactcacgat

SEQ ID NO: 84680 - DNA, 950 bp, Cannabis sativa
attttttaattgcagtagcatatttaaaaaaaaaaagtacaaagcaaatatatatatgtccgcacaaaaaaaaaaagatttctttttctctttttgttaaactttttttttttacaaattctttttttttttacaatttttttttttctaaacatgatcttattttttttttctatgtttttcttatcaattatatttttgaaaaaattaatttatttttcatgtagaaatttttatttacaatttttttttaaaaaaaaatgatcttatttttctttgaagggactcggaaaaccagagttcatgagctgagagaaaggtgagatggaaaatagaaagaagtgtaaaacagatggaatgaaaagtgaagctcaatcaatcaattggccttgttgatctctttatttatataggtggattgatacaagaagttagttacaatgatatccaaaccagttgtacaacaacaacagtaaaaagataactaacttactaacataaaaattagttagttatgaacagtcttaactaactaaccgactaaccacctacatctctaataccccccctcaaatgacactaggtaagaccaagtgttaatttctctcgaaagaacaaaaaaggagatgctgccagaggctttgtgaagagatcaacgatttgattttgagaatctacatatcaaatatcaagttcttgagctaagcctttgtctcgaacgaaatgaatgtcaatttcgatatgttttgtgcgggcatgaaaaacagggttggaagctagggaccctgcttctaaattatcacaccatataatggggcaagtaggaactgcaatttgtaattcacagagcaagtagcctctgtacttgaccttgctacaacagtttgtttctttgaacactagctgatgagatttcccccaaggataatgcagtagcccgaagtagattt

SEQ ID NO: 84681 - DNA, 999 bp, Cannabis sativa
tcttcttggtgaattttcactaagtgttctctaattcttgcatcatttatctctaatttggatttgggctctaaagctctagggttgtatgggatggcaagttcagtaggacactctatttctaattcttcaagacgataaacttctgaaccagattgggacattgctgcaaggagaaagcaatcccaattcctggaagaaatttatcaaaccagaagttggtagggtggagatctcgaaaacctacgttctgcctaaaccttaacatttacccagatacaattcaaccctaaagtttctaaaaccaaatgaagtaacaaaggtgctaactaagaaattagtaatcaaacccagaaatgcaaaattaaaatcatgtaagaaaataaggagaaaaataacttagtgttcggagttggattttgagacaatgagcggttctgcaatctacgaaacaccgaacgtcgcgaagatccctctgaatgcttgaagtctaaaattaaatcggatgaaactcgcagaaaaaatgttaatgacaaagatggcatgcaaggttttgggtaaatctgggtttccgcataaaagcttgagaaacttttagagtttttgaaatggcaaagatatttaaaaaatggtttcttttttcgttttatactcttgggtcaatctctgttagatcagggagacaactgatctaatggatagaatttgaaaaaaatacgaaaagatggtcattaaatgctaatatacttcgaaactacaaaactaccaaaatcagaagacataatgctaccttattttaaaattaaataaataaaataaagaagaagtatgtaacaaaaaaatctttagaaaaagtgtaagaataaaattaaaaaatatatttttttttttattataaattggatgctatgcagattattgattgtttctttctattgaggttgtttggttcatttttctttatttttctttaatcaaagtaagaaataatttgtattt

SEQ ID NO: 84682 - DNA, 1967 bp, Cannabis sativa
attaggtgatgcaatatgctaggcattgtaccttattaggtacgggtggtagtgacatatgagtaccaggcataggtacggctcgtctgattatgcaatgcgatatactaatgccatgttgtggcacggactcacctgattaggtgatgcaattatgtgatatatgggtgcaggtttttggcatggactcacctgattaggtaatgtagttatgtgatatatgggtgacaggctatgacacgagcttgcctgattaggcaacgtgatgtaatgaagaaggttactttatgaggtaacttatatttataatttatatgattaaatgaagatgaattctattattggtataatagttttgtattaccaaatatctgtatattgatgtttattcgtggtagatgctagtagtgatttggttttcatcttatgattaatgcgtgaaggtttgattctggttttgtatgaatgacagtatccaaataattaactatatgattattattaatattacttttcttgatgagtccttgtgagtcacgggtgctatgtggtgcaggtaaaggcaaagaaaagctagatcaaccatgaggtgatagtcttatccaacaatgtacatattgaccttgctggcctgcgtgctgagttgccaagaattgtttttggttgtatctattgtgttttttggttttatgtttttgaggcatcgtcatatatagttcttttgtaaaactttttattacagggatccctagaacacgctttttatgccgttataatgtccatttttagtgttctattttagtcaagttttaatattatcacggtttttaataattaattaatctactagtattaaactattttataaatcacacacgtggcgtccctatagattagggcattataacttggtatcagagcagccatggttcaaaaggtcttgaagactggtcgaataagtacattactgcgaagataggtcgactcatggtatagtaagtgcttatattatttgctattggattaccttcctagactattataaagtatgttgggaaaagttatatagtgatgatgatgataaaatatgtggatggcatatgcatattgatgttgatatctgtctgagttctaaatgcttggaagatgtggactaaatgtgttataaattatgcagtaagtgtaagggtaatcgaattgcctgattagtgagctgtctaggctaggggcaaacagtaatgaagagaatcctttattgttgtaatactagaagaatgtaaattctgctatgcaggatacgattagaaaacaaggggaaacagatccgagatctgagagaataacaagctcgtcttgtgtctattcctgtaccaacgatacttcttgttgtaccactggatgtggtgaaacttatggaactaacttatgcgcagatcagggagcaaaaactaaatgaaccaccaattatggggaagaacaaaaaggctccaaggtgacctgaatagcggtcaaggtgagaataagaaatggcgaccttattctgagtgttcaagatgcaaaaatgtgtcatttgagccagtagagccagatcttgttttattgtggggtagtgggtcatctgaaaagaacctacccacagttaagaaagactgatgttaaaggagaaaagtatacgggttctgcccaagtgctggttatgactcaaagggactcaagtatcggtcctttggccgactcaaattagaattttatgggaaatattacaattgttcttttaattgatatcgatattaaacattgtacattcagttagggacatcgagaaatctgaatggactgtgcatgtatgttatttagcggtaactcatttgacggtgtagacaaattagaaaaatgacaacatgagttaaatttgctggtattcccaagtggaatataggacatgagtagttaatggaggcatcaat

SEQ ID NO: 84683 - DNA, 959 bp, Cannabis sativa
ttttccattgatatacacctcatctggatttggatgttgctgttagggtcaagaaaattatctcttcttgaagtgtgtgggttttctatgacctgcttcatcactatcataatattctccaatgtcaaggttaacatcactatctacataatcaccctcatcttcatctgtatcatcatcttcttcactgtaatgccttcctattttccactctaaatcactatcatcggtaggcgatgatagtgtctcacccttctttgtttcaccttgttccccaaaacgtaatttttttcttgtctcatagttgtgtctagcagctacacttggtcctgcaacatcttgagcaaaaccttctacaattcccttatcagcatattgaacttgtaatgcattcatctcaatggatttcaccatgttcaccctatttgcaaatacaaaaattaagtacatgcatttgaaaaataatacacaaccagttagtaaagagataagaaggcttaaaaatgtttttatagcaattgacatcatattgtaaagaaaaatctagtttttctttttttttttttaattttatgattcatgtttattttaaataaagagccaacaaaagttttaatataaaatacatgctaaaaactaatttttactagctatagcaattagttagatattccacaatatatatactagaatatatatactcaagtgttaaaagaaagagacacgtactggtatactaaaaataaggaagcataatcaaattattatatacttttactggtatgaatacactaacatacaaatacaaagcttaattaattaggaataaagaagattgcataatattaaagcttattggcaatactgagagaaaaagacaaaccacattacaatacacaaacagaggcaatcccaaacaagcaaaaaaaaaatatcatcaaactcattaaatacccaca

SEQ ID NO: 84684 - DNA, 612 bp, Cannabis sativa
ctaagactagattggtaatttgtttttgtaattcttacaaaaaaaaaaaaagtgacgggtactcgttgattatttgtagttactaaattgataatctttgaaattatgtattttataagagaaatttaattttacaagcatgcattaggctaaaaataaaaacttaaacccatgttgaagacgatatgtaatctaggctgatttttaaattttattttcaaaatatccctctcataagttaacatcattttctcttctctttttcttttctctcttttctcacttcactcttccactcattttctatctttctccctaaccaaaccccactaacatcttgctaaaaagtgaagatttaagctgctccaagcttagatcggaggtggattggaggtgggatgatttttgctgcaccaagagccaagcacaatgcttcatgtgaagcattattttgagcaatgggtaaatgattttttaagaatgttttttaaatgttcaatctgtgggttgttggtgttttttgctaaattttttatgtgaatcgttgtttttcaaaaattcttcattttttttttttgattatgagtttttctattaagctcgatggttttt

SEQ ID NO: 84685 - DNA, 1143 bp, Cannabis sativa
tagtttattagtttgttaattttttttgtaagatattttatgtaatacaatatatattattttgtgaaatatttaaatatatttattttgaaagtaaaagttataatattattagtaaacctatgtgttatatttttttcttttttactattgtttataatagtatttttttaatattaaaaataaaattttattctttttttttttttgtaaattatttatgttgctaagttatttttgagtgtatatatatattttctagaagggtatatatgtattaatttcaacaacaaaaagtccaaaatattgtgacttttaattaagttatagatattgtttacctatatttttacgacgatgaagtgtcaagagtagcaacacgtggcacgaaaatacagggactaaattaatgaaaaatatgtaaagtcatgatcgttgggatgaccgtcaaccatgaggggttagtctaggggtatacccctactccctacaccctcatgccacaagtcatgcattttatcatagatataataacattctcaaaggtatatggggacatccacaggggtctcaggggatcactcaacgatgacggttgtcaccgccctcaagttaggtcttggggggtcacacaacgataacggttgttacccccctcaagttgggtctagaggggtcaccctacgatgactgttgtcacccccctcaagttgggtcttggggggtcagccaacgatgacagttgtcactcccctcaagttgggtctcgggggtgttgcctccaagtatgggcttcatcccccgaaggtggttgacgaccatgtcacacctataagagacccacgtcgttagtaactttttcaaatgttcgaatcctacgaaaggctcaaacacagttgtcaacccacgaaaatagcgagatattatcataaaaattagacttcaactaccttcgaaaatcaaggagacagttgaggtagctttgcgttggtcgtgtctcctaaagcgaggagcactgaccctctcccctatatatggggtcatccatgacctgtgaaggagatctgcaattttgagcacttagaaaaataaacacttttcattctttgcaatcaagagttgttcttgacttttgcaactcag

SEQ ID NO: 84686 - DNA, 828 bp, Cannabis sativa
tggctatcttcgaagtaatgggagtagtcttgaggctcctcctccgccgtgtcgttaaagtacatcttttcttctccggaagagtgaaagaaagcgcgcgcaaaacacagagaataaaagggacaatataaattcgaatttgaatttagaagagattttttttataagaatttggaagataaattttaaaataaatattaagggcatgtttggttggaaggagaaatagtaggatggtggagactttaggagacctctttaaaatagatgtattgatccactcttatctatttcggtatccaaaaaactacttagttcaattttttttttatgatcgtatatattatagttatttaagacatctgacaaaattttgataaattcggaaaaatttaacacgtcaaaaacagtgttcaaagagtttgttgcacgcgtgacttttttattttatacgcgtgtaaaatagacagtttagacattgatttcgatattataaattatttcaaatttctcaaaattttacaagatgtcttaaataaatataacgtacacgactatgaaaaaatttatactaaaaaattcttatgaatactgaaacagttaagggttgcatcagtacactcattttgatgggatgtattgtagaagcatttttaagacatttatatattatttttcaaatggtaaaaaatacaccccttcaaaataggtgtatcgatgcatccttatctatttcaatatctaaaaaactattttgtccaaaaaaatttatgatcgtatacattatacttatttaagacatctgacaaaatttggatcgaaaacagt

SEQ ID NO: 84687 - DNA, 1637 bp, Cannabis sativa
attggattgaaaaatctaaaatccgcacttggattgaaaaatctaatatccgcattgagggcatttctaatgttgtgtttggagatagtgtttgttgatgggggagtatgcttagaagaagaaaaccactagatgtgtttgattaccaacccgaacaaaagaatgatattgatgtcatactctttcttttaaatcaaatcaaaccaaataacatattatttattaaataatactgtgttggattatggcaacaaagtgtaaaaaaatgtttaatattgaagtatttaaaaaaaaattggtaaaaataatatacaagaaataaaataaaatattatatttttaaaaagaaaaatttgtagtgaaatctctttatgttttaatttttatacacttaactcttttattattattttttttgtagtaaaacttccttcattttacttttttttttgcaaatttaaggtatttgttagatattaccgttaaattttaactgaattactgctgtatcaactttgaggttttactattacatatacagaggtatatacagtggttattcagttaatttttaacagtaatatttaattagtattaaatttataaaaaaaataaatttaagagaattttattattaaaaataaataaaaagattaagtgtgtttaattaaaatatataaaaaaaaattgcttgctatttttaaaaaatataaatattttttacagcattaaaaagtgctataattggagatgtttgaaggggagtcaatggtggcacaaaagacaattattctccaccgcctattcaatggtagtcatgatttttggcttgtggatggtcggtgtttatttatgttttgtcattgtattattcttcatattttatgttttattttcattaatataatttattaatattgtgtgagggaagtaagtacaaataaaaaatatcactcatttttaattagctaatgatcatcactgccatttatatggatatacatataatcagcaccgtgtattatagtttttgtaacttatgagaagtgagaaccaaacatcattcggagctcatatctctgatttttagtgaatattataatgataaaagctttgtcacgcatgtgactttttccttggctacttaattcaccattttattgggtggagtgtatttacctctagtttaaacaataaacattggttggaagattcaggaagatctactgtaaagattatgaaatctgattgcaaaagttgatgtgggaaatgggaatcttcagagcatgatgaaataaataattcataatagcttttgtctaagaaatatatataggttttgtttttctcaaaaaaaggaagtagacatgaacaggagtaaaattggatttactgtttttggaattttctttataggacacttttaggagtacaagccaattgaaagactgaggagttttttgctaccaaaaagaaaaattaataaataaaagaaaaattaataaataaagtgattaagtgatgtttgatttactgtaatagtaattacaatgataattgataagtgcattacactatttatattttctttttaacttgtataatccattacaatttaatagttattgtaataataa

SEQ ID NO: 84688 - DNA, 1118 bp, Cannabis sativa
atatattaatttataccatacttttttatttaactaaaataattatatgtgtagcacctactaaaagaatttgaggcttcttcaaaaatattatttgcaaaaaatatcataaaccataaatttaccagtcaaatacataaataagtaaacaaaataaaacccaacaatttatttctatatagtcagaaaaactattgtccaatagtaaaatttgatctatattatgttaatcattaaataaaaatattaacaattactttaattataaattatgacaataacaacgattttaaatgtaatagtgactacaagatagataataataactttgaatataataataaatatatgtgaaatacagatgacaatagttttaaaatcatataatgagttttttttagttttatcaataaaaaaaaatctctattttgtgtgaagatctctaattttttttttttataacgtttgaagatattaatttattcatctacggattggtttggtcttttaattttttttttttttaaaccaaactagtattacagttttttaaaaattcaaaacaaaaccagaccaattaaattatcaaaccaatccactctaaaacagataggttcggttcgaaccatgatttgtattttgtaattgttctaattttttttttttacaataattgtttatttttttttttttggtatttttttttacttttaataagtttataatatataaataacaataaaaaattattatcgtagcaatataaaatcaatatcaatatcctatgtaaagttattcccaaatatcaatattttgtccaaaaaaaaaatatattgcgtatatatataataattatacgtattggtttgattttgagggttactgaaatttttttcgaactagagaatttaaaacggtttagattgatcaaatcattcatatcggaatcatttggttcggtctcaaatgatttggttcggattgattgaggtttgaaaccacggattacgaattatatgaacacttctattaagtacaaaaattaaaatttttagtaaaatagttattcatactaacaaaaaatacatcaaaattttgaaactttgaaatttaacata

SEQ ID NO: 84689 - DNA, 1218 bp, Cannabis sativa
  modified_base (47)..(49): a, c, t, g, unknown or other
ctgaatacacgtgtcctttaaagaggagtctggtctcgagtttctannngagagaaatctcactataacagtcggcagcgacatttggtacgtggatagcggagcaagcagccatgttacctcagatggaagcaacatgagtcagaaatctgactacggtggtaaggacaagttggttgtgggtgatggtcatcaagttaccatctctcatattggttacagtcatattcccacaaatgacagctttaaatccttagtgttaaaagatgttttgcttgttcctgagattgttaagaacctcataagtgtatctaaacttgtcactgataatgatattcttattgaatttgactctgaattttgttttgtgaaggacaaagccacaaagcaggttctgctcaaagggatgcttaaagaaggtctctaccaactctctcccactctttccaagtccacttgtcatcaaaatcagtgatcatgttttcctaatgcctctgtgaaatctgtcaatgttgttcagcatagttctgttttaaattccaagaatgatgtgtggcataggcgcttaggccacccatctcttagagtccttaagaaagtcttaaagtctagcaatgtaacttgttcttctgaattaaatacaagcttttgtgatgcctgtcaatatgggaaatcccatgctttaccatttaaaagttctaacagtagggctaccaaaatgctagatttagttcataccgatatatggggtccatcacctatagcatccaatacaaatttcaagttttatattcatttcattgatgactatagcaggttcacatggttataccctttaaaacacaaatccgatgctctacaagcctttgtccaatttaaaaactttgctgaaaaccaatttgaaaccaaaattaagtcaatacggagtgattatgggggacagtaccaagcctttgagagtttagttcaagaacatggaattcatttccaacattcttgccctcacacctcagcccaaaatggaagagtcgagaggaaacatcgccatatagtggaaatgggcttaaccttgcttgcacaagcaagtatgcccttgaagtattgggttgatgcctttcaaacatccgtctatctcataaatagactcccaacaccaatactttatgacaagtctccctttgaggttgtgtacaaaaagaaacctgactatggcatgct

SEQ ID NO: 84690 - DNA, 870 bp, Cannabis sativa
acaccaaacctcctctaaatcaagcctttgtttcattataaatttataataggacaataaattcattttcaataaatgcatatttcatagacaaattaaatcatttttcttgccataaataataataataattatttttggaaaagagaaggaggcaggtcatgccggaccagatcgggccaaaatgtttccgggccgggtcgggcctgacccgtcccacttgacattcctaattggagaggacgaatgtcgtttcacgtctaggccggataaacagttgctttactcacaacagttactgtacttacagttttgagcccaatacgttttttttttccagtgcggatcattgatggagttgctgtcctatcacgatctcctacttctttgccaaattgggacaccaagtttagaacaacagattttgtttcaatcagatttagagtaaccgtttactttaatcatggtaatgcgagacctctctactgatacatattcatgtttcgattttgaacttgggatcactgctactcactcttcaatgttgccaagaatccatgtcgttttcttattgttccttttggttctactgaattccatacattgtcaaccacaagagttgccaaagtacccaaaggattcttctttgttttcaggtctctctctcacacacaacctttggtatgttatgtactatgtagtatgtatgagcctaattgaatggaggatagttcttgtttcataaggcatgttcataaagaacaaaaagaaagtaaatgtgggatttaatgagttccatacattgttatctataagctttgggtggtgagttttttctttcccatgttacagctgaagcagtgtcaagaa

SEQ ID NO: 84691 - DNA, 621 bp, Cannabis sativa
gcaactcagttccattgaatttttgaacactgaaaaaatagaagaattatttgttagttggaaccttgacaaaataaaatcaaaaccatacaattcaaagtaaagatgagatatttattgatttgttttttcttaaaaaaaatgattaaattttcacaagatattataacttttaaatattagaaacagcttccaaagttttttatgaatgaaaagatattataattatcaaaatatacaacacgcgatagccacacagtcgcacccaatattaaaggaaaaaaaaaaacacagagattgagatgaacaaatacaattgtcaaatataacagcaaaaaattgaaatctcaaagaaaaaaaaaacaactcagaaaacaaccttaccttacccttcgcttgggacggagctgtccgtcgaagacaccaccaagcgccagaaagaggaatatgattgaatatattttcttggtgttattatatataagcacgcaataaagtaatatttatttattgactaaagtaattaggattgaactccctaaactatagaagtgtacgtagtgatattttattagttcatttaatattaataattaaaaaaataataatttgcggctaaac

SEQ ID NO: 84692 - DNA, 682 bp, Cannabis sativa
catttttattattttgttaatataactagttataacattaattatgaattatttatacttttttattcattattattttatataataaaatcataataaaaatattgatagttattatttataaatatttaataagataattaaattttataattatgtattggagtacaatgtaaaaatttcaaatagagtgctaaaaatgtgatgtatttttttgcataaaaatacgagtacagtctcgtatataactgacacgtggacttggttcccaataagaaaggatgatgtgttgagaaacaggactaagataggatctagtcatatactatccatcacatagtcaaagaataagcaagatcaagagtatttaatactagtcgatcatataccaattatatgcgatgatgaagtatgtctctcttgcgatcctctccttacaaaggtatggtccgaatgactaatgtgatcaatgactcatcaaggactcacatgttccaagttgtcaatgcaaagaatgtttgattatgcgatcaagggtgaacatagatattcaacgaaatcggcgtaaaggcttatcctgtgagtgcaataccgtagagcttgcgagctcatgtgttggaatatgaaaggacacattgcggcttaccaagttgcatgcgttgctgtaattaagtcaagaaca

SEQ ID NO: 84693 - DNA, 501 bp, Cannabis sativa
  modified_base (31)..(32): a, c, t, g, unknown or other
atattcaaaaaaaaataaaaaatattataanntttgaaataatttttatatttttaaaataataatattaggtctaccaatataaatttgacatatgtaaaaaagtttatacataagcaatctatattggcaattaactataaaaaatagatgacaccttaaatttgcaagaagttcagtggtttggagggtcaaaaagttcttaattaatctattagtattaaactagtttataaaatcacacatatggtgtccctatagtttagggcgttatagaacttctgttgtctgggcttaaatagaaggtttgtaacagtgcaaatatctcaatatatgatgatacttgggtaccggggtatggtaagcttgcctacctcagcgtccacacatcgaaccagtatcaactttaatcactgctagttgcacctaggatgttacccagcttcacaaccttttccccaatgacattttccatgccattctttccatcccactccccaa

SEQ ID NO: 84694 - DNA, 962 bp, Cannabis sativa
catgaggtttggtgtgtgagatcataaaagttatgtagctggtggattttcggttgtttatattgaagtatcaaaacttttgttaacttttttggtacatattttataaatgggaaaacaatgtggtatgttatattttattttaagcaaaacgtgtaagataccaaaattgagatttgagaccaaccataacatgagtgagttggtaccaacaatgttaatatatatttgttcatttttgaacaaaatataattaaaaaaaaataacaacaatgttaatatccatttgttataaaaaaatgttaataaatataaatatatttatatacatatatgcgaaaaatgctaaaatatattaatggtatcttgtacttttttataggtattattttgctattagtgcaattaagtatatcaaatcacatataatttaatgtgataacttttaagaaatatcactaactaatcgtagaacgtcacctttaaaaaaatattgagcaacattaacactcaatacgatactaaaatattgaagaacatgcactacgattaaatagtcatatacaaatgtaacaaagtcatacatagactataaatcatatcatcactccataaatatttcgtaaattttgttagataaaaatataaaaatagagaagataaacaaatataacaatatattattaattaattgaagaacagaaatataaatacaaatgataagatgcaaaaaccaataattgaaagaaaaatcgaggcacttgaatcacgctttccttaaagtatatttgccccctctacttgattggtgttagatgatgtgagcaaccacttcccacgatacaatgactaacaagtagaaaaatacactaatttcagtacgtactccaacgaactcgaattaatacctccactctatatcacctaaagacttatgaaaaagataaagaaaaagaagagaa

SEQ ID NO: 84695 - DNA, 1491 bp, Cannabis sativa
  modified_base (169)..(180): a, c, t, g, unknown or other
caagttcggcttcatgatcagccgccttttgcctcaggaccagcagttcagtatagctaccttcgtcataggtgtcgtacccttcaaagtttcctttatattcctcatcgtttgcctcatgtcgttcctcagagcccacatttactcgtgaggccacttcttcgccttnnnnnnnnnnnncatcctgaggaggacggggctgacgtgtgttgttatgagtttccaccattgttactctgactctttgactgttgtcttcttaataacgcttccgacagctctcaatgaaaacactaaaatgttgaccgaggtttttggcaaccaattaaataatataacgaggagagctatggaataattaatgcaagtggtttgtacgtggttcaggcattaatgagtcgtagtccacgagtctttgttatttatgagagttcttatacagagaatgttcttggtgaatctctctctctcttttctttactctctttgattcgttcatccatccatccatcgatcccctttttcgttctatttagggatatttatagagttttgcaaggaacactaagaagggatcacttgtcttcgagtgtcagccccttaggtgcacaagttcctatcagatgtaaaataggacatacatgacctatgccgtaggcatcataggggttaggtgagagtaatttttatccttccttgattgatgtgattcttcataatggagccgtcactagactcgttgattatcgtgtaatcaccgtaaaagaggcttatgccatctgtcaaatccttttatgggtgttctaatacgtttcccccatgccgcattaaatgtgaaatgactgttcaaacatgttctccttctcttggaaatgcattgttgtatttctagcttccagagagtaaaggcgtgccctatgctcctatctgggggctcactccctgaaatgcaccttcctgtctatatatgacttagctaatttttgtgggtgaggtgtccttgaaatccacgtgccacatgcagccgctgccacgtattttaggaaaaatccgaggcaacactaggtttatacacagatgaaagaagattacaaaatttaactgttacaaattatttatttgatctattgacaattgaactgtgattaaaattagatcattagatttatcaacaatttaatcagatcaatttaaatcaaataaataataggtttataaaattttttgaataaacaataaataagcatgtagaaagatatgatagttggttataagattatttaatttaaaataaaataataatttaaaaataaacctataattcaaaaattagggttttagcaatatgttgaccttgcttttaaccaatgacaatgaatcttaattgtaagcgataagagatataatttagatgtaagatgataagataaataaagaacacaaagtttttaaagaggttcgaccccaagtagttcggtaatagcctactcc

SEQ ID NO: 84696 - DNA, 1033 bp, Cannabis sativa
tatagcctaagaagattcctttctcagtcttctcatcaagctttcctcttttctcttttggaatgtgactgtagcatatgcagctgaagactttgaaatgcttcgctgatggcttacgtccgctcgaagctacaattggcgtcttattcggcacggcttaggttggacattggttgaacaaatagactgtagtgcttactgcctctgccctaaatcgttttgggagacctttctctagcagcaaggctcttgctacctccataacattcttgtttttcctttcaaatacgtcattttgttctggtgtgcgtatccaacagtgagttggtgctccatcccttcatcttcacaaaacttattaaatccattagaagtgtactctttgcctctatcacttctaattttcttgatgtagtgaccgctttgtttttcgacacaggatttgaattttttgaaaatatcgaagacttgcgacttttgttgcattagatgaacccatgtcattctaggaatgtcatcagtgaagagaataaagtacctgttttggtcatttgatagagtacgcattgccccgcaaatgtctgtatggactagctccaatggatttttggctctcaaagctttgccagacgaaaaaggttgacgttgttgtttcctgagcatgcatcctttgcaaactatgttgatctccttaactgttgggaggtcttgcatcatattcttctccttgaggatctttagcacgtggaagttgaggtgaccaaatcttttataccataaccatgactcatctgtctgcgcttgcattgccacattgcttgcatatctccattgtatagaaaggcatctattttctttcattttcacctttgcaacttaaaaggatttatcttgcttatcatagattgtgcaagaatctccttcaaaatgcaaagagtaccctttttgaatcatttgatctactctaagtaggttttgatcaatgttgggtaccaagagtacatcattgatgtatctcttgccttttttagtg

SEQ ID NO: 84697 - DNA, 517 bp, Cannabis sativa
tttttttttttttttttacaagttaatcgggttggattcagacaagttaaccaaatctaagtcaaacccaatcaaaatattcggagtaaaaatcctgaataaccattctacaactatactcatcgtataactttaaaatggagatgtacttattaaaagataaatataacatcatatttctcatcaaataaaaatttgacatgttttgagtaacctattcattctttagagcatgcatgttaaaatatatgtttgactagaaaataggtaccccagattgtcttatttggtacgactttatcagataatctcacctgcctcactaaaataacattttacccattttacattaataataataaataaagtaatttgccataaaattcccttaactatcaatttacttataaaaaactatctaaaatcctcttaactatcaatttacttataaaaaactatctaacctcatattttagtaggaaaaacctccaaagtactgtttcgtttacatttttaa

SEQ ID NO: 84698 - DNA, 834 bp, Cannabis sativa
aaattttaaaccttgctctacaaggaagacaaacatatttatgttaaatagatatgtaataaccacaaacaagaagtgtaaaaaagagttccaatacaactctaagaataaacaacaccatgaaaaattttcaaataaattatctaataaccataaaaaaaacgaaatggagccaaattcatgtgaaaacctacatgttaagctctattcaaatcccgagttttaaattaaagaacaagagcataataaaataaacaacaaagagtataaaaacaaattcaagacagtaaatagtaattagtaagcaatatattcatttaaaagtagtaagtagtaccatatttcttatatatgcctgagttggtttcaattactttaccaaatcggtaatttcattgttctttacatattcccgttttgcaacagatgaatttagagaatatagatgtgaaggtgcttgaatagtaatattatttatgtctgctttgttattttcagccattgacattgtaatttaaatgttaggttacttattaaagtaataagcattcaatattatataatcaaaaataatattcaatgaatgtaaattaatttatgcatgagtcgtaccattgatgaagtgttgttgctttggaattgtcaagattgatttcgattgtacttgattcacgacttgacaacgacaatcctgtataaaaatgatatattcagcctatttaagtagacaaaattgataagtatatatatgttattagttagtacataaatacctctcttagtttgaacaatctgttggaaatattttatcaggatctagatttactgacaagt

SEQ ID NO: 84699 - DNA, 736 bp, Cannabis sativa
gcaattaggtttttgctgatatagttttgagttttttgtttaggttacttcgattagtctcttctctataacatgattttgttttttgtatcattgttttcttttcatctttattcttcgatagtttattatcaaatggatgttagtatgtagtataatacggttatattatcttctaagcagtgaatatatgtcttcttaataaggttaattaaggtaatacaattattttcatctgttattattttaatttcatttgtcaaatgattcaagaataaggtgacaattgattgcttatttttctaactataatcatggtcgtctttccaatcgagagatgttccaattgagttgcaacttattatattagcttattgctattaataaaatttgcttgatttcttaaaaaaaaaaaaaaaaactaatcatttttttttagaaaaaaagtctctcaattaaaaattaattagagtatttgttgcaagtgtatcaaacaatactcacataagtgaggtcgaacccaatgtaaattgtaaccgaatacttactaaattgtatttatatttctatttagtgataataaaatttagaaataacaatgaagcaaagctgaaaattaaaataggcaaataaaagaatttaaataatgaatgcgaaattaggaatatgatttcaattgatgcaattacccaattgttttaaccattttcttctatgtgatgacaaattacaaatt

SEQ ID NO: 84700 - DNA, 961 bp, Cannabis sativa
aaaacttatattttagctctaaaatatacaccatatggtagagctcgttgcaagctttgaaacggtatatagaacgtccaaatggatacccaagttaaaagttatagcaaaaatacgattctcgagttctcgaggttgcccaaaatggtaaatcggttgaccggtttacaagccagttagccagtttatcaggggaaaaaaatgtgaatttccaagtttacgcactcaccgaaacgctaccgaaacctgtccaaaccaccctagacttcttagggtacatatataccatacatactaccatacttacgtaatagattctaaaattgagcccgtaattggcaaacaccactagtgttcagacttcaattaaaaaagttctaaactcaatttctaaccctgaatcaccttaatttcagcaagaaaatattagaactagtcctatgactacccgagaacaattctataaggtcagaactttcataactattctaatttgaggacccccgatacgaaagtaattgttttaaacttaaaacgaaattaaaccttaccttaagcttttacgctctgagaatttgctatcccgctactactggagcttggatcgctaagtttcggattgaaaattaaagaaaatgaatataaaggggagagggttttgatggaggacgagggcttcgtttcgtttgtaagttttgtttataaaattattatatataaactgttacatttatatataatatattaataatattaatataataataatttaataatataatatattaatattaataataataatagtacgattaataattattatataataatattaataaaacaaatttattgatggttatcgtattatttcttagccactaaaaaatttctacttcttaggtgctaagccaaatcctacatactcttaagtactccaatacctatattatcaacttat

SEQ ID NO: 84701 - DNA, 792 bp, Cannabis sativa
tgcactatcaaattgtagtaattgctatggatcaatcaggtacgcatacataattattatatattattattgtgttctatattatataaaattgatcttgagtttactattaattttctttcatgtggtataagatttcatattgtatatgatttagaacctataatctatataacgattaatatgtatatgttaattttttttacaattacatattaattttgttattattttctgttaaatttttcgttgttaatcttaaaagtttaggggttttattcatcataaaattctctttttattgatatcttatatgactaagactgttgagtaaattaggagaattttaagattaaacttttagggtttatgtattttctttatgaaattaaatttggattttttgtttcaattgtttatacagtacaattgatggtgcaaatctcattatcaattaatttacaatgtttctacttatttaatttttaattcggctgagacaaaaatcaaaattggactcctttgtttgttcttagttttcggattgaacacaatctgatcgacacccttttcgtcatttatacccgaaattaataccatatattcataagaaatttcatcccaaacaaaacccataaaaaattgcatcttttcatcgtgaattgggccggttttttgtctcgacccgactggatagaactgggttcgcgcgacccatttttagacccgcccaaggtagaagatgaactccagccacaaagctcactctcacgggcggcacatgtgaccacg

SEQ ID NO: 84702 - DNA, 728 bp, Cannabis sativa
cactcagctcaaacagcttcaggcactgacacaagatggtatcccgattcaggtgctaccaatcattgcacagctgatgtgactaatctggtgcagagcagtgattacaatggtcaggagagactctatgttggaaatggatcaggtttgaccattcaacacactggctctactttgtttaaatctccacactcagataagcctttcattctcaaaaatttactgcatataccagaaataactaagaatctgttaagtgtttcaaagtttgctatggacaataatgttttctttgaatttcaccctcttgtttgctatgttaaggatctgaggaccaaaactttactcctgactgggacactccacaatggcctatatactttgattctggtcagtttcaagtgcttccccaacctccctcaatctgtccagctgtccatctccaagatcagaaccatgcctatattgccacctctgttgattgtaacacaaagcctaccagtagcataacttctccatgtaatgacacatctttgtctagttttgacttgtggcacaatagattaggtcatcctagataaagagttgtccattctgtcatgaactattgtaatgttccttatagcaataaaaactctacatctgtttgtgaagcttgctgcttaggtaagattcacaaattgccctttccaaagatgtctcaaactatctacactgaaccattacaa

SEQ ID NO: 84703 - DNA, 657 bp, Cannabis sativa
gatgggttgttgtggtggtttggtgaggtgtggtggtggtggcggttcagatctttttaataaattgtaatgcactgacgccaagagttcataacttcagtttataaccgaagcaaaaactttttggcgtcagtgcattacaatttgcttcagttatgaactgaagttaaaaacttttggcgtcggttaatgaatgaagcaaaaatctcaatatttgcgtctacagtaataatgccggttgcaccaaccgaagcaaatactttatgtgtcacttaaaaatcgaagcaaaaagccctttttgtaatggtgaatctccccgaacacaagtattgaaggttacacaattgctaaaattgaagccctgttacttgcatctgaatcatgaacgagaaaacgaatcaagaacatgagatcaatgctaatcttgccaaaactaactctaattatgtctttgattaggatatgaatcttgaggctaatgtggctcaattcaattgtagtgtgagatatcctatgcgaaattgcagtaattttaacacctctagaggaggtcatggtggtaataactctcgagaaaatggagctcaattttagcaacctaattccaacaatcgaggagttccttctactggaagaggaggaagatttctagctcca

SEQ ID NO: 84704 - DNA, 575 bp, Cannabis sativa
  modified_base (355)..(356): a, c, t, g, unknown or other
ataccaaacaatatgaagagttgttatcctcttcattcatactcttaattaagtaatagtgtcctatataagggttatatatttatacttatcttatggtaataataatattatagagatcataaatatatattatgtatctacagaatttgttgtgtccaatagaatttattgtgctaattgttagctttaaccaaaatagttaattaaagtgttgtttggtaatatttttatgttttaattttttaattacgaaatgaaaataaaatttttgtttttaattttttttttttgaaaaataaaaatacgttctgtaatcacttttgtttttcaattttaaaaatagaaaacaaanntgtgttctgtaaagtttattttcatttttttttattttatttaaaagtcgggtctaggttcagagtcagaatcgagttcgcgcgagtcagaggtcggctttagtgctgggaccgtggagggggggggggattttggtccggtactctggtcagagtccaaaatattaattaagaaacaaaactgtttaaaaaaatattgaaagtgattttttttttgtt

SEQ ID NO: 84705 - DNA, 744 bp, Cannabis sativa
tggtttgtactgttttataggaagtagttaattctattaattaactccttatcctttcttttctgtcagtagttagttaaatataactaactttagctgaatattagttgggtagttgggtgtccctgctgtatatatattgccctgtttttcatttctgtatcatctgaatcttgcaattcaataaaatgattcctctttcttttcttaatatggtatcagagcaggaaagataagctttcctgtccgatccatttcttccagccatcgtcgtgttcctcttttccgacgaagctgtgcattcgtccgctgcatcttcctcttctctcttgcctaatttaaatcgttttcttctcaatgtcttcagattctagtcaatcaaaccaaggcgctcaagatgaatccacgcttggaaccaacatcggggataatcagaatatatctctgcaagtctctgcttcaagaaatcctctcgaagaccctgcgaatccatacttccttcaccatggagacaacccagggcacactctcgtctctcagccactcactggacaggacaactatgtatcttggagcagagctatgcaactcgccatctcagtaaagaacaagatagggttcttggacggttctatttctaaaccttctccttgtgattcaattctttataatgcctggataagaaataacaacattgttatcttatggattttaaactctgtgtccaaagaaatatcatcaagc

SEQ ID NO: 84706 - DNA, 709 bp, Cannabis sativa
tgttcaaaaactaattatcttattcttttaactttaatattaataaactaataatatattattattatatattattactaactacaatatataaagtaaaaaaaattgaataaattaatatgtatgtataacagtcggttttgattttttcggtcggtttattactcaaaaaaaactaatcgttcaatggcagttttaaccgttagcgattttttcaattttcgcttttgtaggtttcagttccaacaatgttcaataagtcagttttttcgattttttagattttatgctcagccctaagtcgattacaataaaacctaaagccaacaccacaaaagacaacagtgatacaccagtatctttatatctttatgttcagttatctttatttttttaccaattatataagggactagtatggtgaaaattgggtatttacttatgaataggtataataatttctaaccattaatttaatcaaatagttcaaattaaaatttaaaaactacagcgtacctaattaatcttttttttatttctaattaattttattcctcacatttcatcattcatatatatacttcaaaggatgtttcatttagaactttaacaactttgaaatcctggagcaaaaagagagtattcttcgagttcttgagctttcttcttagatcgatcattgtgtgtactacatcttcaaggatctctt

SEQ ID NO: 84707 - DNA, 544 bp, Cannabis sativa
gggggataatgtacattgtgtcttggttgacaatgaaagctctgtcaaccttctcaactttcaagcctttaaacaaatgggttacacgaaaaagactagtgaccaataacttcaagtatctacgacttcaccagagatacaatcacattaaaatgaatgatcaagttacctataactttagggacttcccccattactactaaatcaatggtcgattttgcaataattgataagaattctgcatataatgcggtaataggtcaccctattttgaaagagatgaaaatagtcacgtcaatttatcatctcaccatgaaattccctacccttgcgggtgtcggattagtgcgaggagtccaggcggactcaagagaatcctatcatatagcattcaaactcacaaaaaagaaaaaatcagcaaatgtaatatatttgctcgaagctcctcctcctcgacatgaatttttcagaattgaggagataccacatgttgaaaagcctgatttggatcccagaatccttgactataccaatactatgcaag

SEQ ID NO: 84708 - DNA, 728 bp, Cannabis sativa
atatatatgtatatatttcctctatatatgtttatatataatactcaactaattcttgattttattgcataacattgattagaatatcttattccatctatttatcatattttttaagcaatataataactatatttgagtatacatatataaataaaatttcagttcttcgtcgtgattaagaaaaattttcattttcatttttggtgtttattttgaatattttttgcattatcatatacatgtcatggtttatagtgattttgttcatgaatatgatttgaataaacaacaaaatctagaaattttttttgaagaacacgttcggacccgagaacaccttttgaaattaaagtctacattttttttcgtattttcgtgcataaaatctgcgtggatctctttattatttgatttagaactttttagatttgaaaacacgtaattttatcgtcgcaattgtcttttctgattgggtttgggtcgggtctgtcgaacccgcgtggctggaaacgggtcaaaattgacccggctggaggttgaagatacagccaaatgacatgtcattttcccttgtggaaaacaacgtgtcatttttcaagttttgtggttgctgtcgtttgttcaaacgacatttttcccctgtagaaaacaacatgtcgtttttcgtcttgtgaggcagccttcagatccataaaacaacgtgtcgtttttcctcttgtggaaaa

SEQ ID NO: 84709 - DNA, 1191 bp, Cannabis sativa
  modified_base (975)..(977): a, c, t, g, unknown or other
aaatctagatcctggtaaaatatatccaacatcttcagcgcaggagcgacaagatttacattatcaacctcggaaagatacgggaaaagctccagctcactatcaaggtcattggtactgtgttcttattgagatatcccagaacgctatggtttataacgtgcttaatacacgattattttgacccagtaaaagcggactaatcacaactgtgtgatattcaaatattaaccgcatttatcttatgtgatatgtaattaaaccccacgatttcaggagataatcgttgtaaagatttcaatcaaccttgtaattaactgcttaactatgcaattataaatagaggcaagtaagactgaaaaaaggacgaaaaattcataagagaaaagaccctagaacaatattagaaatctaataagattgactcgtggacaatgcaaaactgcaaaaccacgtaaaaaattcttttgtgttcatacttttcttttttttttactgtctttagtttttgtgtgcaagtttatcactgtttaggctcatatctggttaacgaaaatctgtgttaacaacaccatattacttttcggtaataactctactaaagaaagctagtaaatccataaaactcttatcattccacccgtgtttggcttttatattgcataatctagtaagtgttgataatttagtaatcctattacaattagggtaaataggcttatcagcattctctacaaaactttaaaatttcaaaggatcgatattcaattcaaattgtgcatctcctaccatttctggaatgtgatcatcctcatagtccaaattaacacccttaactttgtcagacttagacgttccctcgcccggaactctattcttttctctgtggtgaacccaaaccttataactcttgtctattctgttcctaaataaatgctcatttatcctagtaatgtccatacgctccatgttacnnnatttaagacaaggacaaagaaccagtttagaatttttggcatacttctgacaaaagttcaagaaatgatcaacacctttactatactctactgataatctattcgcactcatccaatttccatccattttgaaacttctaaaagaaacaaaactttattcaattatttgtttgaatatgtgaagtaaataattagttaaattaattaccacaca

SEQ ID NO: 84710 - DNA, 1389 bp, Cannabis sativa
  modified_base (53)..(61): a, c, t, g, unknown or other
tcgtaaaaatgtttaaaattccttgaaaccgtatttttgttatttttttgttnnnnnnnnncatttgtgaaattaacccatttaattactaattaaattatatcaatataaaaataaaatttacactcactatgttattttaaaatatcatttaaaaattttgacgtgtttatttttttatggaattagatcaatttttatgttatatttttgttatatattctttcaaatatcatatttaatttaattttattaaaaaaatcttaaacaccggatactatttgagctttgagcttctaagaaatttgtgattcgtgatagttttggtattgtattggatttgttcaatatgccatatacaataaactagaatttataatggattttttcattaaaaaactaattttgattacatagaagtaactggtttttttattttttctattttatagatgttttttttttgagatttgaccaacttatacattttaagtgtcgaaacttgaaattaaaaaaaaaaaaatcataattttattctaaaaattaacaatgaaaaagaaaattaactctaaaaataacataataatagaccaaaaatatcctaactacaccctactatatatatacttattattatttttatttttttgaaaaaaaatgttacgccctatagttttaagcaaattatatattaattgatagtaatataggagaataatcagttttttgtttttgtttttgttttttttttttttttgaaagggagaataatcgattacaatatcatttttttcttgaataatgttgaaaatttcattaactcaaatcttctaaaatcaaggaagcaattacagtaggtaactcaacactactaaaagtacggttagcttccataagagaagatcgcgccaaagcatgcgcaaccttattacaatgtcattttttttttgaataattacgagagattcattgatgaaatgaaaatgttgttttgataatatattctttcttatcctaaattttaatatttaaatttagaagaatttaattactatgtgtttaaatatttctaattttgtatagcattatatttatgcaaaattttaatagagtagagttacttgtgaataatactgtaaatacgtgttatgtgtgtcatgtcgtgtcataaaaaaatacgagtcgtatcgtgtcgtgctataaaaaagttgcatactgctgtactcagatttgtgtcgtgctttacttgggttgacccgttttcttacacaacccaaatttatactctacttttctacattttatttttataattaatgagataattactaaaattatgtgttgacgctgaaaagtagccaacaccagctcgctaaattggcgaaatga

SEQ ID NO: 84711 - DNA, 1224 bp, Cannabis sativa
tacttccaacaatattgaaaaaccaaaacagcctcaaccatgttgcttctactgtgcttgtaatcaaattattttttttccttgtgggacttcaatgaagcagtaagttccaaacatctctcctggaggagcccaatatatttttctttttgaaaaattttgaataacaaatttcaaataatccattttcttgtttgaaccaaatgataagatcagaaagtagtataatttttacaagatcaaagtgatgttacctttcattgtaagcaccagtttgaatgaatttcacttatgcaaaaacaacagtgtttggggttagcataaatagccttttagtgcagcaataactcaaaacaaaataatacctctacaaaaaaaatgtgctcgtcagtagtagtcgagacctgccaacatttagttcacctattatacaaataaaacaataattgattattgagatgaaaatgaaaaaaaacttaatatatatatatagataaatatatatttaaaaatggtttgaaccctggtctattacaacataccttcagagtaaaaaatcctaccagttcccttctcctcaatgtcatccttaacataatgcaacaatcataaaatatatggtaaatcacacaatttcaatttataaaattcacttgtaactttcattaaagcactaattgtttccattcaaaatagtggattatttttggaatagatattttcacatcccattttggattggctgcaatctagttacgtatgtgtatatattgttctgagacaataacaaaaagcaaatatgatgctactatgtactaacagaagaaaatatttgcgaattaataagaatcataaattacattacttatgctatcttcgtataaccagaagactaaaaaaccttatacatagagcttaaatgataattcacaacgatcataaaatgatatgtattacacaggtaactttaaaatgctttatacaaataagaagatgaccaagtaatttcaaaagctaaacctaaagtaaatcaggttcacatctaaagacaaaattttattttacatctaaatgaactggtatagatggttaatagaaaataaacttggtaaaagaaaggaaaagaggcgtattggtttatatttaaaaacataccgatctaatatgaggttgttgtaacaaccatccaagaacaggtatcctctacaaaaaaaaaaaaaaaaa

SEQ ID NO: 84712 - DNA, 1459 bp, Cannabis sativa
ttttgtgactaatatatatttagtcatgatctttttaatcacaatatacaatgataatttataattagtcataaattttattgcgattaaaaataaaaagttttatagtactctctttctggtctaggttcattgttttgtttgattctcattctctcttaggtgcttaaattgaattatgtgcttgtattggtgtagttgtctacacctaaaatataaaataatatataaagaatgtaaatgcaatttggcttgaatattaaattaattaaataaacaaaactttagtatataataataataataatataagagttgatgataagcgtcgtacgttgtccaatttcttggagatcaagaatgattagaatgattatttcaataatagctccttaatgttagcaattgacaacctcatatattgtaaaattcaattaaattataataatttttttttttcaatttttgaatttaaaagtatatttcaaaatatttttcttagttttattatcgattaagttggtgttaattatagttataacttgtgaatttttaatttttttccgaataatttattgtattgataatatataatttctaataattttagtaatttatcatgaataaaactttaaacttgtaaattataagatgatgattgtgatataaataaatcgaataaacaattatttaattaattataatataaattttctacttatgtactcaaaagatacatgaaaattaatctattgtttatccatttaaggataagtatagtacacatgatatataattcaaaggaaaattgtctttcgccatctcctgcatatgcacgaaaataataatgaaaattctaattgactttcaaaataaataaataaataaattcttggttttgaattcttattattgtcaacttaattgtgcaaacttaatagttattccacctaattagtctttatattaatttaagttctcaatttattttattagatttttaatctttattaacggtttttagtagtagttattttgacaaccctgttaataaattaagaaattgtgtttgaacaaatacttatcctcaatttttaaatttttatataacaacgcattttttttaatgaattctaatttttttagaaaaaaaaaattaattgcgcaaaccatcaatactctaatgatataaatatatataaaaaaaacttataatcttcttagtctagaaataagaaatagttgtaccaaaatatatatatatatttttttttttgaaagaaaagagataatttcattaaaaggtacaaaatttaaaaagattcaagataaaaaaaaattacaaaattaaataactaaatttataagtagacccaaccactcaatatgtgattcatcttaggggtgttcacaaagtatccgatccaatccaattcgcacgatccaatccaatccaatc

SEQ ID NO: 84713 - DNA, 668 bp, Cannabis sativa
ttgactactgagaattaaataaacagactgtcaaaaacaagtgtcctttagctaaaatcgatgatctttttcaatcagctttaggggaagacggtcttctcaaagattgatctctaattaggctatcatcacttgagaatccaagaggaggacagtccaaagactgctttctgcactaggtatgggcattatggatttttggttatgtattttggactaaccaatgctcccacaacttttatggatctgatgaatagggtattaaaggattttctcgatatttgtttcatagtatttatcgacgacatccttgtgtactctcagtcagaagaggagcacgagtaacacctttgaatggttctgtaatgactacaagaacattaattgtatgccgaattcaagaaatgtgagttttggctatctcaggtgtctttcttgggcgcattgtcagtaaagatggaatcaaagtggatccagggaagattgagtccatcagggattggccgagaccgaagttagttatagaggttagaattttccttggtctggctggttattatcgtcgatttgttgagaggttgtctaagatctcaacacccttaactgaactcactaaaaagaatcagtcgtttgtgtggacagagaagtgtgaaacaagctttcaggag

SEQ ID NO: 84714 - DNA, 898 bp, Cannabis sativa
gattggattggatcagctattttatgaacacccctagttttgcccaagtttcagcactatcgatatcagtaaggaatgcagctgtaggattaaatgttgaattttgagcccaagtccaatctgcaagtaaagcttgagctaagtgagcaacactcgcaagattaagtccgtttttgaattttttttttaatgttattatctatacaattcgaattcatatactttttctaatttatacataaattttagtttagtcaaatgtcataaattacacttgttaacatattcttatgaacataatataacttttatgatatattctaatatatttttaaaaaaaatttaaaattatatatgtatttttttaaaacatatttttttaataacaaaaaaaataaaataataaagcaaattaacttaaaactgaaaaaaataaaaaaaaaacaaaacaaattcattaatgtatacatacgcactacaaacataaagtaaccttgtattttttttcttaataattttttttttttatgtaaagcagctacattttttaactaaaaaaaataaattatgtgtatacgtacacgttatcatactgggtaacctctatttaagtttaagtttattgggcaaaaaaattaccccaatactatgtcgtacaaactaagggtcctatattaaaattatccataaattaatctatcatctatggtatcctattttttcctaaaagaaaacgtatcatgcttatatttaatatttattatctcaccaaacatcaaacatgtacacatgtatacgtataagttatatttttggtattacaaagaaaattagtcatatttctttttatcatcatatatatatatatactaggtgattgttacgtgccaagccacgt

SEQ ID NO: 84715 - DNA, 573 bp, Cannabis sativa
ccttccatttaaccttagataataatcttgttatagctgttgttgtaataaaatgagtagtctagaaaatgaagaagagggtaacacaataaaaatgattatattatagagatgattgaaaaatttatagttggtaaattcattatctgtttcgatattcataagagatttttaagtttaatttattttgtacgatcatgtacattattattctttaggaccatttataaacttttaaaaaattatgaatagtttattgtgtcgaaaatacaatctaaaaatttacttactatatgtatacaaaaaacaattcaaaatttttaaattttttttgaaaaaaattctcataaataccaaaacacataaaagatctaccgaaataatttaaaggttgtaattagacacgcaaaattatttatagtagttatggatgggtagtacttgtgtgtggtggaaaaatagacggacccaagagtgttgagggtgaaaaacatgttactaattctacaattcattatctattggtggaggatgattaccacagtttattggtggctacctcgaagcagagga

SEQ ID NO: 84716 - DNA, 909 bp, Cannabis sativa
gagaactcagcgtgagaatggccagaacactgcaatgagggatgaagagcccactcgtggaggtacccagcctatgggagacgatacttatgaaacagaaaccgccgccttaggcgccgtctggaagaggcacagcagcggaacgctgatttaaagcgtgatgcagccgtagctacggcggcacatgggactaacgctcaaaatcaacctgaacctggagtgagaagaccacaaggaaagtctcgtggctcacgaactaggagacaggaaaatgcccgggaagaacaacccaaggaaaatgagataccccatgaaaatcagaatgatcagccagaaccctctcacagaaatgagaatgggaggcaatcagaaactgatgaacgagaaattcctcatgaaaataaggaggatcttgggactcaacctggagaacgtaggtcacctgcgagaaatcaccagcgttcttcccgaacccatagagcaagggctcgtacagactctaatgggggaaatacgacaaaccacactcaaggggaaagaacaaagcgtgaagaagcaagtgtgacctcaaggcagtcaaggacccacagtcgatcaactcgaagaggagaatgtactcaacgagctaatgatcgagaaagcatgggaaccagtaaatccacgagtcactcaaagacgaagtccatgagtaggacgaggtctgtgagtagggcgcaatctgtgagtaagacgatgtctgttagcaattactcccaaccgggtctacgagagcacttgaatcaaaagaaacctgaccttcaccaacaactcggtccaaagcaagaggatcccatccaattgcaaataaatgagttggaggacaagttcaggagatatcatgtaggggaactagggagacaatctagatat

SEQ ID NO: 84717 - DNA, 667 bp, Cannabis sativa
attgtattaagttcgaataaaaacagtacaacgcatttaagataagaaaaacctaagaatggttacaaacttgtctttacaaaaatgccactaagggaaaaccattatgtcgttcttctaagcttatgacgagaggggaggctgatgaactcgagaaagagcctcttcatatagcttgaaaaagaccgtctagacatagctcagaaaaaaacagactacacatagcttgagaaagactgcttgtgccctctattttgcccaaaatagatggaccattataacattgacacgtggagctgagaggctcaactcttaatgaaatcgactaagtctttggcaaaaggagtgtcgataaggagataactctcagagaagatgtgagaaggctccacgtattcccggaggcccagggccatgctaaggcacctctgggagatactggactctatttgaacagtcacctcgcatttaatgccgcatgggacaaaacgtatttgaactaccataggaaatatgactgacagcgtaacctctctttcgtagctattatgctgtgattaatgaggctagtgacagttactttttgagagatcacatcaatcaagaggggataaaaggttatattcacttaactcctaagatacctacggtataggtcatgtatttc

SEQ ID NO: 84718 - DNA, 783 bp, Cannabis sativa
ggtgtgatgttatatccgttaagaagttttgggaggctgaacttaatcttagtgaagttatgaatcaacgagaagtgttctggcgccaacgctctaaacaactgtggcttcaagaaggtgatagtagcagtaagtactttcatgctaaagctacttctagaaagaaatacaatactataaatcggcttatgaatgtgggtaattgggttacttgggaggatgagttgccaaatgttatggttgattatttaactaacttatttacttcaaatgtggccgattattccactgtggtagaggagattactccttcgatcaccgtggatcaaaatttgtctttgcttaggccgattttggaagaagaagttagaagtgctttgtttaatatgcatcctgataaatcccctagtcctgatggtatgaccccaggttttttccagaattactgggaaatagtgaagagcgatgttgtgaaccaagtttgtcaattctttgtgactggtagtattcttgatggactgaatgacacgaatattgttatgattccgaagaagaagcaacctactttgatgggagatcttcggcctatatccttgtgcaacgtcctatataagatagtatcgaaggtgcttgcgaatcgtttgaaagaagtgctgcctcagatcatatcctcaaattaagctgctttcatatcaggacgccttattactgataatattatgatagcttttgaggttatgcactatctcaaaagaaagagtaaaggcaaagaagcctatatgg

SEQ ID NO: 84719 - DNA, 1720 bp, Cannabis sativa
tatatatataaatatagatagatatatatagataataatatttattaatttaaattttgcttaatattattgatttttgttaaaaaaaaattaatattagatattttaataggaatatacaaaaaaaagtattagaatgttttttttttatatatatatataaataataataaaattagaaaaccaaaaacgtgatgatataaaaataataataaaatattgatttattactttatgcattaataatatattaaaaaaataagaaaattaagagaaaaataaatagaggtatatattttatatagttaatatttatgaagctaataaaaaatttaaaaaaagagagaattaaggagggaacaaataatgtttattagaaaaatatatgtcacgacctcatatctcttatttatatagatatatagatatatagatagatttatatatatatatatatagataataatatttttgaatttaaattatgcttaatattattgatttttgtaaaaaaagaaaattaatattagatatttttaataggagtatacaaaaaaatattagaatgatttttttgagtaaaaattaaaaaattactatggaactcacaaaaaaaaaaaatcttgaagaaacttatcataaaatatcatagaataataaaaataagagatcagccacaacaaccctcaaatcaaataacttccccatctaacggttgtcgtacatcacggaatacattctgtgaaagtacaataacaggacaaaatcatgtcccaattaatatatatactccttaagtctatatatacatgagagatatgaggcggtgacatgacactctaaaatctttttaattgatattatttattttctccttaattatctcatttttttttatttttaattagcttcataaatgtttaattgatataaaacatatatctctatttatttttctttaattttcttatttatttaaatttatcatcacacattttttgctttttggcttttttttttattgatgaaaaaattaattagaattagaaactaaattataattaaccaaaaaccatatatatcattaaccgcaaaaaaagaattgatcatcacaagttcttttattattattttttttttttttggattttttataattttttattaattaaaaaattgattaggactaggaacttaattataattaaccaaaaaccatatatatattattaaccaaaaaaatttagccacagtctctatatattttgattttttttttaaaaaaatatatattttaattttgattgtttgattttttagagaattgctattaggcaccagtggtgcttagcaccttctcgacatgtcgcgttgcgacttgctagcgatactccctaaaaactattatattaaattatgtaagacccgatacatagttgaaccaatggcgatattaacacatagaatgatgcttgacaccactggtgccctttagcatttctcgattatttattactatgtgttctcaatctctagccccacactttttttttttcattattcttttctctcttcataattgttatcatttattttctttttcctatatagcatcaaataaattatgctatataacttgcaggtatatattgaattttataatcaaatattatatagcaatctctctctgtaatgaatctctctctcctaccgagtccta

SEQ ID NO: 84720 - DNA, 694 bp, Cannabis sativa
atttccctgctcacaatagtttgtctgaatggagtggtcaggggtataaagcttgtcctacgtgcaatgaagatacatcttccatccgtgctattgggaagacatattaggttgatcatagacgatttttccccataatcatgagatgaggcgggacttggactttatggtaaagttgaagaaatacgtgcccgagaaagtttacgtgcaagcaaattttagaaacaagtaaacgctctaccacctcaaatctcaagaaaacataaaagttttggagaattgaaatgaaaaagaagtgtgagtgaaagtaattggaaaagaaaaagcattttttacgaacttgagtactaaagtacactcaaattaaaatacagcctagacttcatgcatattgagaagaatatatgtgatagtttcattggcaccatcttggatgataaaaagtctgaagatactgttaatactagacatgatctcaagaagatgggaattagagagtggttgtgaatttatgaagataagaacaaaagattaatgaaaccgcatgctccttacgtataagatactgaagaaaagaaatagttttgtcaatttataaagaggaaattacacttagtatgagattttaaaagttcttatgataaatatggcacatttaagtttggccaatttatatggtatttttttgttttta

SEQ ID NO: 84721 - DNA, 1713 bp, Cannabis sativa
ctccaaccaagtacaatcagtatccaccgtaagagcaaacttagccaaagtatgggcataagtattagcagatcgaggaacatgaccaatctgtgctcgtgggaataaggatactagatagttaacattattaagaatagcatgaaaagcagaaagaaatacatgagatgatgtcaatccttggactactagtagtgaatcagtttctatgtagtcgactgagagattgtgtgacagtaaccaattcagactcagcgcaagacctagagcctccatttcttctgccttaaagtttccttggataggctttgagagtgctgcaattacatagccatcagaatccctgagtattgctccaataccaacaatgtttctctctttgtctattgcagcatcggtgttaagtttgagccttccttgaggtggtgctgtccatttaggtgcatgagtgaactcttttgctggtcgtggtgtcttgacagtagtcgctgactgagcataaagttgtggacgattagcacgggccgcctgaaattcagctaaatacgatggtgcatattgagcaacagcctttggagttcgaacaacattgccatgatagatagcattcctttcatgccatatattccaacaaaagactataaacaattcaaaatctggtgtagaaagagtggatgacagttgaattaaaatatcagcaccagaactttgccccagagtttggaaattaatgtgtaagttagacaaatcccagacagatttcgctctttggacaatagaacaacgcatgaatgattgtttcttcacaagaattacaaatggagcagtatggtgaattagcaatgtgtctgcgatagagctctgctgcaacaggaagagatgtatggaagagtttccaaacaaagattctaaccttcggagggagattcagcttccaaaaattggaccaccagtgttctattgaactgctgcaggttgattcatcttgttcagcaattgacacagctagcttgtaacccgatttgacattataaatccctgtgaaagagtgattccaaaccagtacatcgtcatgaggaaaaaggcttaaaggaatagtgagaatccgatctatgtcaggttgatttaaattagcctgaagtgagagcaaatcccattgcctttgcccagtaattaagtctgcaaccatcaaattggggtctgatcctttgaaaaaataaggtttaaaggtagtgtgcccaggtaaccaagaatcagttttacagtttatgttcagacccgatcctactctccatctcagtttgaatatttacacaaacttaagttgaaaaaaaagaaaaaaaaaagaatgttgataactttatctaggggtgtttatcaaccgctcacacattataaactgtccgtattttactatattgcataaaaatatactttgaaattttttgtggtgcggttacagtttgcatgttttctaaatcgcacggtgcggtacgatttgcgattttgaatttaataattgtaattcaaattataccgcattatatattatatggttactaatttttacaaggaaatatactatttagtaccatatcttttctattaaatacatttgatatcttgtattttcaataatacttatttattaccttatattttgaaataatacatatttggtaccctaaagtaaaatttaatcaatataatttt

SEQ ID NO: 84722 - DNA, 1001 bp, Cannabis sativa
aactactaatttccaaattaaactaagcggtctttacagcaaatctcctcagaccgtaacaatttattgatttggtaaaataatttatcaaagacccaggaaagaaaaattggccaactcaatgaacacaaaagttatgacacaaataataggaaagccatagaagtaatgaaatattaagatgtcagtgatcattacgagaagaagaaaatatcatcactgaagaaaatggaaaataagagcaaaacatcgagatgggaagaagaaatttgaagaaaacataactttaactgccacagacaaaaaaaatggaattttaactgccacaaacaatattttaccaaccacggctaactatacttatttttaatcaattattaccactaaattttatttttttaaaaaatatttactgtaataattaattttcctaatttgcgcatcctatataatattttataacatattgtttcatataatattgtggtgcccagcacatgatatggcatcattcagatatcaagaggtaacaattaaagaacaagcaacaaagtgatagaaagaatatgacaaattttttcacgcctaaaagaatagaaaaaagggaaatgggttcacgggtctgtttctattcaaattattaaataagtaattatttttactttgcaacccacatcctgccaacaaattcataattgacaccacatgccttcaagaatttcctccaccaccactctcactcccaacaatcgtctctctctcttaaacaaatattttatcctacttacatacacagaacatttgtagtaatagtaaaaaggggtttaatcttggaccaaatcatgttttggttttggggatgttgtaatgttgagaaaatgttgctgttggttttgataatgtcattatgtaatgtggtttggtccgtttggacaactgacggagtgaattttaatacgggcaccagcgcagtggctgcaaaacagaaagtgggagatttc

SEQ ID NO: 84723 - DNA, 981 bp, Cannabis sativa
gttgaaataaatccctatatacaccgtccaagtaaggggtatcttctatgtcaaggcagttagttataactgtatctgtctgtaacaactttcagttgttggttatttctgttggcctttatctgttggcctttatcttgttttgtatataaatcagttgtaagcttccttctcataataacaatctttacttcttcttcatcaatctttctctgtcttttgctctgttctttcttttctatctttctgttatttctttcatcttctttgtgtgctacatcaatggctagaaggatttctaaccataacatggtacaactataaaaacaaaaaataaagtgaccttcagccttaacagtttgcaaatgttggaaatcgttgcaaataacttcagctcactacgaattctcaactcctatatatactgaaagtaaaaaactagaagaagagagatcgagaaggagaaggaagaagcttacattgctgagctttggagccctagggctagagatcggaggtccatttcatgaagtgtacgtacaaaagaaaaagaaagaaagttagggagtgagagagataaacatagagagatcaattcatcgtaataaactcagatgactagtcaaattacttgtgacttggaatctactttttgaaattgatgatcgttgaagatctgatagttaaaacgagtcagggcgagctcgaaagaggaagtacccagcaacgtttttggaaacctataaaatctggtattttctcttcctttacttttaataattgtttattgcttgtgtgtgtggtttcagatcgatttagatctaaagcaatttgtgtttggtttgatttaatttttagtttgagcagagcttcaagtttttgaagctctgcgagtgttttgcgctctttgattatgtgttgcgtattatgggggattctcgattgttcttgggagttttgtgggggattctcgattgttct

SEQ ID NO: 84724 - DNA, 1198 bp, Cannabis sativa
tttcgcaggtacgtttgtttttcgcttcttatttataatctcattcgtgcttttgatatatttaatgttcgattttgattcaatgagaaacaagtataattgtgctatcttcctaacccagttgagattaggtttgtaatcgtgagtttctttcttagtactttgtatcgccttagaggtctataattaagggttctttaatttcaaatttatttggctaaagcagtgtcggatttgtaaataatagaagaagattgtttagaactttgatcactgtttatgaaagtggaaaaaacagaagattattgttgcgatgttgaatcaaatttaatatactaatcctctttaatttcaatatgtgtgcttataacaccgaataatggaatgtgcattaatgctgcagagttctggaaccactgtggctgtggcgcccacagctgcccccactcagaaacatgcacatcctaccccaacccccagccatgctgcaactgctcgccagaggtcatttaagcgtaacaactcaaatatttatatatatatttcaataaattttccttgttatttttcaaatatttgggttttgttttgtcactagggtacaaccaaatttttgtttactgtgattccgcacttcagaaaggtatgtattcaagaaaaattggttcttttccttcttagcttattgttattatcattattgttaaatatgtttttttttttctttggattcgtttacagattttattatctgcatttgagtgtacacattgcggggagaggtaaaatctcaatttggagaatttgttttcaatgagggaaaataggtactctgctttacaagctttttaatgtgaaagatgactatttttgttttggcagaaataatgaagttcagtttgctggtgagattcaacccaagggatgcaactgccgtttggaggtccctgcaggtgaccctaaggttgtgtcaacttaatgttatgtactatgtttgaccttttgaataatcatgaaatttttagtattctgttgagcatttgagttctgtaattgagtgacaaagcttttaagctcatgagttgcccatctaagctgtttttgtcattcatgtctttataattcttaattatttttctaattaaaagggttagttaaattctggaatttcttttttgacagaacctctctcaccata

SEQ ID NO: 84725 - DNA, 748 bp, Cannabis sativa
aacaatctcaatagtttgaggggaatttttaacggcaaaaaaaattcaaggaacacgatttactacatgtcaaagtttagggagaaaaattactaactaacctaattattatcattttgaaacgcgcgtattgtgaaagagatctctctcttgtaatcgtaagggcgacacacaataccgcagaggcccagagatcgtgaaaagggaaccaatgcaaggaggttcgtcaggcatcggatatggtctgaaatatcaggcaaggtgcatatccgatgtcaaagctgatacagatcacaccacctttctcaccggcactctcactctgaaagaagaaaatgaggtacatttgatccggatttcgtcaggaggaactgaactagtatgcgagggattgttttcccacccaaacgagatctgggatctcgcttcttgtcccttcgatcagcgaatcttctccactgtctactttactggcgaatcgtatggtgctgcaatatggcagatacccgagttgtatggcgagctgaattcccctcagttggaaaaaattaccccaattggggaaaatgttggtaagattaagtgcattctttggtggccatctggaaaacatgataagctgataagtattgatgaggaaaatctttccttatggagcttagataatatgccaagaaaagctatccagatactatcacaagaatcagctggtatgtaccacttttctggaggagcatgggatccacat

SEQ ID NO: 84726 - DNA, 995 bp, Cannabis sativa
gcggatttgccgccccctaataattccgctgggtaaaaattatttttcttgtagtgggacgggataataataataccctaaggttaaataaccagattagcaattctaactagattaattatgtattaatgaggaattatatcattatataaattaatatgtaaaactattatggcgtatttcttcttaagacctcgttggtgtttcaggggcattttcgtaattttgactcgagaagagtaaaatcgtaattttatgatataatgtgattatggactatattattatataatatggttattctatctatttgcaagtattgtttgacaagtcaatacggtatagtcataactgggtattttggaccgaattgggttcagagtacacaatacatttttgggatttatttatggaatttatatgataaatgaaaattttgaattattgtgatatataagtgtgagtgaaccctttttaattgcgtatggatatatatgccttgggagcattatggtcatttagtcaattaagtttattattcaacaaaatcaattcttggaaaactaaatactattttttgggttttgatatcccttagctgacctccctctctcaccctctcccttttgataatttcatttgattgttgtggaaaggcttgaattttggtgtagtttggtgtaaattcttgtgtttgaaacttgaagataataatttttgatctttttcttttactatgaattctgattttcaagttttaacattgatgttttggtgttattgagattgtggatgcatgttgttgagttgaggggaaatattagtaattattgtgtgtttgagcttttgggattatgattattgcatataggttgttttcgatgattttagggttgagaaatgtggtttaaattctgggtttgtgctctgaattttttgggtatctcttgaaggtttggatgctttgaagtttcaagcttgttgataatggtgat

SEQ ID NO: 84727 - DNA, 894 bp, Cannabis sativa
atggtgtattatagagtttcatactaggcctagagttcagaattatattttagaccattaagaaaagtatgcaacaaattcagctacagtatttatggataaaaactataatagttctagtcgaagctagcatatcaacattaagtatttagacataaagatgtgtgataagtggtctttaagaacacaatattgagttaagtgatcgcatatccttgactaaaggcatgccgcaacacaaattcaaggatcataaagtaaatatgagattcagttacccctatgcagtttttagttgcacaactaaaattattcaatgaaactctaattttgatattttctcatatttatgtgcactttaatttcatctgacaaaatcatctttacaggaccagaataaacataaggtttatggtttattcgcttaagtacattgccacataaagtacattgttatataatgaatatattgtaatatatgaaagataatactcgacatataatgaagacatattgctatgattcatatgtttattatgcaatgaggaacattgggtttgagtgctgaatctcaatactgaccaattgagagaatattagaatattttctaaattaagtataaaattgataaaagaatattttatattcactgaatttggacacaattaattggttcattgaatttagacataatcaattggttgatgtactatatatggtcagatttcgatattcattacccaattcgacttcccaaattaattgtcaaaatattttgacaattaatttggcacaaatactgatagagtatcttacttaaaaatatagggtctcggttcttgagttcttcactcattatgttaaaacaataaattctatctaaagagagttga

SEQ ID NO: 84728 - DNA, 621 bp, Cannabis sativa
actaattacttggaagcattaaggatggtcattattaaccatatatgtcttaattagtgcatactttttagcctaatataggtttgttacatgtctaccccaatatacaatcatgattgttcaatttattcattatatttatatatagagggccctatatccatataaatatatattggtaccaagaaattaaatatatatatatatatatttttttttttgaaatcaccaagaaaatatattattatatataattatatgcttgcttctattagcatactaaagttgagcaataggaaagatttatagtaaaatatatttttatgtaacagactatatatatatatgtgaaatgattatgtactaatagtactacacaaatcatgtcatcatattatgattaacattattgcttgtacaataattaatgtatattttttttccacaaaattgcagaattagtttaagatatctaaattaattttgaagtgataattctctttaattaacagactccattccttttttcattttcgcccctatttcctattttttctattaggcgcgatttgaggaattctcatttatatcttttactactaatctatgagttttgggttc

SEQ ID NO: 84729 - DNA, 1079 bp, Cannabis sativa
taacccaaccacgaaatccatcgtcatatcttcccacttccactcaggtagggttaaaggctgtaacatccctatcggtctctgatgtatagccttgatctgctgacaggttaggcatctcgatacgaattataccacattcttcttcattctgctccactagaagtaaggtttaagatcttgatacatcttggtggtgccgggtagggctgagcatcgatctgtttggtcggtttttttacaaataaaaatctgaatttcagttttcggtttggattggttcaatctgaaaaccgactgactaatccagaaacatccttaaaaccgaccaatgtgaaccacggtttaaccgaccaaatcgatttttttgtgtaaaataatgccattgtcaaggctaccaatcacgtagaataccctccaaaagaacgccatgttcgaagtgagtgtttttttatgcatttttgaaagaataagaaaagaaaatgttatggtttgatgattgtatatgtatatacaaaatgcactaatgggtatttgtctaattgaatgttcaattcaatatagataatcaggccattgcatgcatttaatgtctaatttgcatgcatttaatgtctaatttgaaagtttcattcaatttttcatatttgttcgtttgaccatttccatttttttcttcttctttcttaatatcattcataaaaatcttttcagcaacatcggtggttcgtcaggcagatgtagcgtttttgcatccatgtcctggccgagagattatcaaagacaagaaattggattgtaatgtcctttttctataatgatgttcttgatgtaatagtaatgaaatatgagaaaaaagaggcaaaattgaagagcaataaaagaaccaatgagtatttcagtcggttttggttttattggtcggtttactatccaaaaaaaaataccaaccgaccattggcggtttaaaccgttaggggtttttttggttttcggttccgccgatttcagttccaacggtgttcggtaggtcggtttgaacagttttttcggttttctggattttatgctcactccta

SEQ ID NO: 84730 - DNA, 1718 bp, Cannabis sativa
  modified_base (1495)..(1497): a, c, t, g, unknown or other
tttggctacattaagttcctcttagagaatttggccttcttcctggagtttctgggatgactcggtcttatcttttgcctccttcttagcaactccaagctcatccttgtgggccctcttcatctcctcggcttctttgcttaggcgagtgacctccgccttggagtcttccattccttggtcacagcctcgcgttgcccaatcaccttctggatctcatcctccagatacttcattctttccagacaccgacgttgggcgacaaaggatatgaaggtttgctgaaaacaaataaagaaagaatgtataaataagtctgaggattgttaaaaggaaaagtgaaacgagaagggcaaaggaatttactgtgaggctaagggcaacactcttctcaagcatctcgtccaggaggtcgttgttgatcaagtcccagtcgttgggaacgaaggatcggaaatgatgccaacaagttgcgctaaactccccagtgtactctgagccagccctcctagcctcaatgggcagagtctcaagtgcttggctcgaagaggcagcaaactgatttgccttgggcatgggcccttcagtatgtgtggaggccgaaggatgggtctgagcctgagtctcagtcttagggacctcgagatcaacagtatgggaggctcgcttcttgttggcagttgtcttcctgggaattttgagaggctccacattgacatctgatgaagtctccgagacagtcaaccttttctttccctttttacctgaagattgaaggaggtcaccgagattcatttctacgagacaaaataatgtgttaacacttctttaaaaacaagtaaaaggggaaattggaaggttatctcccacctatgagatttaccataatcgtaagaagacgaagaggaaggactataatattcactaaaatctctacatcctatgatcatgaatatatcataggaattaattggttctaaatcccaactcgcatctatatgacctgccctatccagcatggccccatatcgctcagctatcccataatacgagtcagtacaactaatttggacatagaattcagggtaccccaactatcaaacctatgtgcaatgcgatctatgaggaggggattccaagtgtagaaattataacggctatcccgaaagaacactaacgtggttcgctcagctctaagcactgtgggtgaccaaccgcattgattacctcgggataaggctgagcacaaaattcaaaaaaccaaaaaaaccgttcaaaactgacctaccgaacactgttagaactgaaatcgacgaaactaaaaaccaaaaaaactgctaaccgttaaaaacgccattgaacggttaatttttttgggtaataaactgaccgaaaaaatcgaaaccgaccggtatacatatatatatattaatttattaagttttttttttgctttgtatattgtagttactaataatatattattattttattnnnattaaagttaaaagaataaaataattagttcttgaacaattaatttacatatttgtagttgtaaaatgtagaataatgtgttcatagaataaattgtatcaaataattttttaaaaaaaaaagttcggtttgggcggtttaaatcgaaaaagtcgtggttcaaaacagtcagttttaagataggttcaagattgattggtcagttttcagattgcaccaat

SEQ ID NO: 84731 - DNA, 838 bp, Cannabis sativa
gagactagggtttcagacttagagtggtttagaggctacaattaggcttagtgacttaggttttctaggttagagttaaggcctttgtataggaagcctaaaaccctaatttacaatgaaatccttagatatttacatattaaattgattaaatacaaaacactaaatttccccttaaaagtagatattttccatcaatttgttgggctgttaagggcccaattcccaggtagcttactgtccatgttttaggttgtacatagagtcctggtatgttggcttcccatagacctataggggaggtctggccggccaaggcctgcaggttgagatttggcgagccaaggcctgcaagttgaggtttgctcggccatgctcctgccaggacctgataagtcatgtgtctgccaggatcctccaggtcactatagctttatcaagaggaggccaacctttggatgtggaggccagccttttgcaagtggaggacagctttgtacactatttctttgtagaggtcaggttcctttagtcgaacggaagctcccttggaagtcactttttggtcggctagcttgtgcccagaccctagtcggcctatatgctcaccatggccgacctataggcttctcttggcctgttagggatgttaatacaactccttgagggctggcttcactccattcggttgctgcttgacggttttgctatatcttgcatggagaccctgttctgctactagcaaagatgtactccacatgtactttacttttggcttacgtgaacatgccacattaggtggacaaattttggggttacagttgttatgagatttttc

SEQ ID NO: 84732 - DNA, 679 bp, Cannabis sativa
ttggattggatcggttactttttgaggtcaaacaatatccaatccgcaaaagtgcggattttagatttttcaatccaatccaatccgcacaagtgcggatatccgcattttgtcgattggattggatttgattggattgtgcggattagattggatagaacacccctaaatagaagtttgtttttgcaaaactaagctttgcactatcgcatgggcctggcccatcccaccaaaccaagtcaaaagttttagcatggcccaaagccctttgcctatagcattttctcctctgatatttctttgtatttaagttattgcttcaaaatgaatgagaaaggtaatatataatcaacttctaaggtaatatataatcaacttctaagagttattgttctctcaaaaaaaacttctaagagttattgccattataataatctaagttattatgtaataattataataattttttttttttgacaatgtaataattataataattgaagaaacatgatatatattaataatcatgaatatttaagagcaaattacaaactttatgagtatttatttctttttagattattttatgggaatattaaaaaaaaaattaaaatatagaaaaattagggtaaataccattttggaccctatgttttacaaaagttacagattggaccct

SEQ ID NO: 84733 - DNA, 1332 bp, Cannabis sativa
gctttcatgtttttattattccttgtaaatacaagattttttataaaaacaaattcattccaataaacatatttttggctataaataatattgtgtttccttctcatctaatctaatccaattagtaattagatttagaaaattattattcaattcgatccaattacacctcaaaattcaatcaaattagtaatttgattgaatcgattttttaattgaatatccaattacatatctaatttttaatattatcttaaaaatatgaaaaaaagtacgtacaaactaaacatcacattttacttaaatttaatattccataaaaatatcattgttagaagtgtaatgcaattaaaagtttaaaataactaaaacaacaacattattaggcaataaaatagaacaaaacatcatgaaaacaaatatacaaaatagacaaatgttacaaattcaacacaaaaaaaatcccgtaaatgtataattaaaatatgtatttttttattatacataaataaagataaataattttttaatgtacacaaatgtaattagattggattggtttttgattaaatattgagaatgactccaataactgatccaatccacttagaatttaacttttaacatccaatctaattgtaattgtatattcaattttttataatttgaataaattagattggttcggttcaattgaattgaattgaatgttgcccacccctagagatagccattagaggaacatgcatgtagtattcttagctataaaatgtgtcacttcacattacaacaaaaattatcaatagccacagaagtattagtggtggaaaaatccgtcgctaataggggtaacattagtgacggaaacaagattcgcctccttcgctaataggggtagtattagcaggagccaaagggaaaaaaaatcatacaatcaaggtcagtcagttgcgcctccttcgcctcctaatgaaatatataatgttgtggcagatatgtttacaactatacctgacacattaaggagtagtctgatacctgaacaactgccaatttatataactcatggtttgataactttattcaaatgtatagtcaatcgcaaactcctggtggtttgtcttctcagagttatgtcgcttctccacaacatcaacaccagcaacaacattctggtttggaaaaccaatttttgtatatggaatccctatgcagtctccttcgctcggttcaaattttgttaattttgagatatttgggagttcttcgcaggaaaagcaatttttttcgaccccaatactcaaccaagctcaattaggggaacttcgagtt

SEQ ID NO: 84734 - DNA, 1261 bp, Cannabis sativa
attttaaaaaatacatgatctattttgtcatttaacaaaacagaaagtctaattaataacttttgcaaaacatgggatcaaaaattgtgtttaccctaattaaaacgaccattcgtatttttgtaaaaaaaaaaacttcaaatctgtaaaaatattgaatatattgtagatctatgtaatttttttttttttttggataattatgaaaaaatcccaaaacaaaaataaagaacttgtttaggattgagcataaatgcttctaagtaagactagtttgtaatgacattataatgatgaaatgaaagaggtctttgtttttattgaaaaatagtaataccttgtcatagcattgaaattctcctattccaggaaacctccaagttccattgctttctggataagatgggtatctcagctcaccacaaggacccattcctacttgaacttcctgtaaataaataaataaataaataaattattcccaagattatggttgaatcaaatttaatccgttatagtgttttggtaattggataaaaattatgtttggtaagattctctaaaaaaaaagaaaatagaatcaaacagttgttagttgggaatgttcttaccacaacaacatcgcccaaataatcactgaatctgtcacgaaaactcctcatgaaatctgaatagacttgaattggggttcttcctctgagaataggcattgcatcacatcctaaagagatgtactctgggtttcttcttcctgatctgtctgtgtaaacaatatctgggttcttgctaatctcttcaagcacccatggaggtagaggaatactgaaaaatcacaacaccaatatggttcaacacaaaatccataactatggctaattgcttatgcttaagaatggagaagtgggatacactcttcgagtcagtgccaaactctaataggaataatcttaattttttctcatattattaattagtttcaataccctttcaagtaacactaaatagtccctataccttttcatgtaaaggagtactctgttttctattaacactagactttgcttgtttgatctaattagccgttgtctaattaaaattgattgaaaatttgaataccctttaagataaatggattgaaaaggtcatattattacctgcaagagtctccaacatttccaccacattgatgaaaagacataacaacttgaagcttcaagtctagcttttgagccatcttaacaagctcagcatatccttccca

SEQ ID NO: 84735 - DNA, 1302 bp, Cannabis sativa
  modified_base (676)..(679): a, c, t, g, unknown or other
  modified_base (886)..(903): a, c, t, g, unknown or other
  modified_base (1042)..(1047): a, c, t, g, unknown or other
ttgaaaatttgatttttacacaaactaaccttatggttaattttgaatttttttttattatttttgtttattttatttattttaattataagaccagattttacttattttattactaatatttgaaatgatcttattttgatattaaaatactaatgaaacttagaaataatctaattagaatttcaagatttgctaaccatattagattttcaaaatttgttatttttgaaatatattttattaaactaaattataagattagaaaaatattagatttgacattttatcttattggatatttattttaattaaaaatttatatttttgtcaaaataacatgaaaattttgaaaacttgttaattttggtttgaatagaaattttagggtttgttaaccataaaattttaaaatttaggatattttgttttatttaattattgaataaaattgataatatcctaaccatctaaatatcttattttcaaattatttattttgttgaatttattttattaaattataatattagaaatataatataaaaaatatctcaatttttaaaattaagatattatattatcttattggatatttaattaattttaattatttaaatatactgaaaagttaaaaattagttggatatttgaatttcagttagaattttagatnnnnaggagatttgttagattttaaatattttcaaattattttctaacaacctaaatattaaattctagttaagatatattttaaatattttattttaaaatgaaaatatcttaacctacttttcagatatctgttacatgtttgttttgtttgtttatttatttattcaaaaaatttaaacaaacctgatctaaattgctatgattaacnnnnnnnnnnnnnnnnnnatctgattttaatcatagtccaattgtcaatagatctcataaataatttgtaaaaggtaaattttataatttctttcatctgtgataaatctagaaacatgatagggctcatcttaaatcatttgacatgtgtgagccnnnnnntttgcttttgggcttagatgcatataggaagcccatttaagtttagttaattaaatggactaggtttctaaataaaatatcacattgattgttttatttaggcccaattagtattgagcttattcaatgaatgacaattatttaattaatatttaaattcctctactttaggcattgtgtgagagttagggggccatagtagtgggtacgacatactgaacccaaccctctctcacacaaaccatcccaattgtg

SEQ ID NO: 84736 - DNA, 1414 bp, Cannabis sativa
aatcaataagattatgaaacttagatcgatgatttataaaaagaaacacaagtcaaatttgtcaaactaacaatgtgaaaaactaaaatttacaaaataactttacttaatttactctatgcgaccatgatgcttcctaaggataagagataaagagctaagagagagccaaaaaaggatctttcgtgtataatcctgcataatctcgaatgttatcagttcgagtacctagaccaaataatacaatgcataggtggggaagtaaaataaagccttgttcatacataggcttctgagcctcttttgctccagcccaagaggatacatttaatacataagccccgcacaagaggctaatgcactaatattatgcctctctcaattatttatgcataaaccaaatatccaccaaatcccaaacaacttcaaaacaattccaaagtgaaacaaagtacgcaaatttcatttttgttaattagaaaacaaaaacaaccatttggaaagcaaatgaaaacataattataaacgaccaccattcatcgttagaagtttgcaaggtgtgaagggctcaaacgaaagttacctgtttgacatgacgaacagcaactctccgatgattcgcttcttttagagcttcaatggacttaaaattaccatccaaacattcttcatacataatcattaactcctcagctacccatttataacccacaaaagctgaaaacatgagtattaacactgaataatttaaaaacatgtatgcgtttagaaagtcaaaatgtaattcgatttggatacattcgattttgatataattggaggtaatttcataatttagtatatttgtctgaacatgtaattatactataacaatataattagaggtaattaaagagttctaattacactcttcaattctaatagccttctatgagaatccagtgtaattacaatgtgtaattactaaaatcttttcattttatatatagattactataaaatattaagaattcatatgcaattatcatctcattttaaagtgtgtttggaaatcacagtataattagatttggatataattaaatgtaattatacaatttgacatgtttgtctaatcattttatttcattataactgtgtaattatactgtataattattaaaaaaaatattttaaacactaactactaaaaaatattattttctcactaattattttgtcaagaattcatatccaaacacacatagtgtaattacttaaactcactaattaggacggtgaggatgatgatagtgatagtgatgatgaagaacaagatgttggtgtgggtgattcatcgaaaatggcaattacggttagctcaacgaggaccttagaaaatcatgggtcagaggatatgcaagtagatgatgag

SEQ ID NO: 84737 - DNA, 979 bp, Cannabis sativa
  modified_base (795)..(797): a, c, t, g, unknown or other
aagcaatatatataacaaataaaagaaaataataagcataattctgaaggaaaaaaatgacaaaattcttttagttattattattatttttttttttttttgaaatcatgacaaaattcttttacgatataaataactattttttttttctttaaaatggagaatatttttggttttgaaccgaaatttattaaacaatatattttcttgtctattttggaaaatcaacaaaagtataatgcaatctttgaagaatttaaaatatattcaagtattctttcaaaaaaaaaaaataaaataaaatatattcaagtacaattacaattatgttttttttttttacaaaaacaaaattgtgtaattgatattaatattatatttgtattgttataagttatcaagcagcaggtagattttgagttaatttgggtcaaaaaaaaatatttttttaatctctttataacaataaataatatttttaaattattaaaaaatatacatatttattaaaagtttttttttttcatttaaactctgaataagaatgggttcaaagtacaggtttaacctactttaatctaagaccgactctaattatgattgtgatattttataaaaattattatattaaattatataaatattatatatgtttttgttttatttgattatatataagaaaagtatgaggcggtgacatgccattttaaaatcattccaaaactatttttttcttctctctttaattctctcaattttaatattttattaaagtataaatctacaaattgatannntactattattttaataatttttttataaaaaaatataaatctacaaattgatattttactattgttttaattttctataagaatataaaatattttgaacaaaatccagaaaataaaaaataaattccaaaaaaaatatcaaaacttaaatcaaatataattaatcataaattttgtttata

SEQ ID NO: 84738 - DNA, 547 bp, Cannabis sativa
ttttttattctctttttcttgaggagttaattatggctcccagaatgaggatattatatatgaaacatgattacataatattataaaaatgaattttccatttctttcaagattttgtttttaatttctgtccaattcacttctattgatcatctcaatgtgttgaaattattagcactcttaagatgctgcagtaatttagtaataatttctttctttacatgacaatccattcactttgggattgtgaataataattactaatcatatttatactgtgaaaagtaatttattgctataattataaagtttctagatctaccaaacagagggatacttactaaatcttatttgttgctgtgttaatatcacaaagcaacatcacatggttggtatgtcagttggtgcttctaatcaacatataaaccttaagtaggccatgaaagatgtggctatatgaaactgtaaaaactatatgagtggctcttatccataactccatgtgatttatggacctactgatttttcaaattaatcaatgtttatg

SEQ ID NO: 84739 - DNA, 575 bp, Cannabis sativa
  modified_base (518)..(544): a, c, t, g, unknown or other
tatgtatagtatatgaattatagagatgaagagagacaattaattttaatataattatgagtattatataatatgagttatagaaatgaaaagacataattattaattttatcaatgagattgtatatttttatgataaattattggacttttttttttcacacaaggtaaacatgatccaaatgattccaatatcaattaaaaaaaaatgtaacatataaaatggtaaaatcaaagaattttttttttactatctttgagtttttattctttcaaaaaaaaaacacaataacaaaatatgatattaatattaactaaaaaattgtaacacatattggtataaaaaaaactaaaagatagacatgttagaaatataaatatatttgttaatattcttcttaataaaataattttatacactacatgtgcaaaaaaaaaaaaataatgtaaaagatatatgaaagtctctaaatatctaatatattgtatcaataatctgttgggaattattttaccannnnnnnnnnnnnnnnnnnnnnnnnnnttattaacatcctaaataagaactttctaaa

SEQ ID NO: 84740 - DNA, 683 bp, Cannabis sativa
cagttttctcaaaagagatacaaaatttcagcaggttacaacatgatatgtcccattcaaatagggtgacttggagcaatgaagtttggggaagttttaacacacccaaacatagctttatcatatggctggctgtgcaaaatcgtctcaaaaccaaagagagattgcagcgatttcaactgtttactaatcctatttacagtctctgtatgtcgtcgatcgagacaactgatcacctattttttaggtgttcctttaccttttactgcttacaacaggtaaaggaatggctttcatggggagcttgagctaagaccttgctcagttgctcaaacggatacacaaagcaaaaatcagcaggtttaagaagaacatgttggcaacagctgctacccatctggtatactcaatttggcatgttagaaatgaccgaatttgtaataatcatgtagaaaaaaaagatgtaattgtacaaagaattaaaaatagtgttaaacatagaatagaattattttagccaaaaaggattggtcaacaagatagagaatggcttcaatcattgtaaaaaagttgattatgaggtctttgacataaagatgttctttctttataattgatcgtaaaagttttgtgaattaataataaatttactgatttataaaaaaaaaaaatatgcaaaaaaa

SEQ ID NO: 84741 - DNA, 725 bp, Cannabis sativa
attctaccacaaaaatgacaagtaggaacagatctttttacctcagatcttatgctttttgcaaatcctggagattttgcgtcagcagaaacagcttatgcaacgacaagttttgaatctattacagcagacttcaaatttgcaccatcaaaagatttgttggaacacatgattttacaaattttgtgattctagaactttccataccatttgattcgatgccaactaattgtacattttattcagaatataaataataaaatgttcttcgaaatataaatcacaaacaacaaattttcctattactaaaagaagtaggaagttgactgagtactatcaaggccagtgtcgagctcaaaaaataatataaatttttacctttttttttcagtttggagaaaagcaggaatacaatccaaaaactaatttattaccagtacatcgatagtagatagaacggttgatggcggtgattcacgaagacttagacgattgatgctaaaaggcctaagaatttctcttccctagcttattttttcatgttaacttgtagctagatttattaacttgttaatacttggactaattttacaatatgtgtgtaatatttaactacaatttatttaattacttctgtgaaatgaaattaggtatattggacaattataaaattaatttaaataatatttaatttaccttttaaaaaaataaatatctaatttaaa

SEQ ID NO: 84742 - DNA, 704 bp, Cannabis sativa
aaatgaaaaaaagaaaaaaaaaaatcacattactttaagcacaatttttttgaatggttaaacacaattaaaattactattaaaaactaggtaatatagccgctcttcacgccgttaatttaattttttagaatgataataaacaaataattctaatatatagtaatgattattaattattattattatttagaatgatttattaaaaagtttaaaattaatatgattatcaatgtatacataaattataaattgttttgttttttaaaaataaaaaataaaaaaattgttattactaaaataaataaatggtgtagggaaaaattggagttccccataatatattattttaataatcgatcttttaaaattgttgtcattcaaaataaaataaaaaaatgttgtcattattgaatcttaccaattttcataatcgtatctcactaccttccttcctaaatctcaattcttattcttagattttattccaaattttgaacttatgtcaccatctcatacttcaattttatataaatatatattgattatcattcattcaatattattattattatacctcaattttatataaaactataataaaaatctaattaaaacaataaataaagagtgaaaaaatttatataaaattgaaaagaaaaaaaataaaaacatcccataaataaataataagttattttttt

SEQ ID NO: 84743 - DNA, 763 bp, Cannabis sativa
ggctgcagaattcacaaaattccaaataggggtgaatttatatgcattcagtgacaagtacaccgatatagcctcattaggtataattgcaatgccttgcctcaatatttatatttatattcttaaacgggattaaaagtgtatgctaatggttattgctggagtgagagcccgttgttctttgcaatgtcttattaataccaaagctcctttatttgtgagaaaaaattatttttaaattaatgccttagctctataaatattcactgaaagcatattatgatttaagccattggaaatactgaaatagtatacatcttattactctaaagagtagtaaatatattgtggcaattatgaatttgcatatttatatgtcagattgttggacatgttattattgcaattttaaatatgggtcgatgtttgggctggatggttattgagttgctaaaatgtgttatttagtacttactacttgagaaatgtgaaaatttgtatttaagagtttctataatttatacaacttttgttccagtgctgttgtgtagtatcactcaaaaattcaaatattctgatgagaaatactgccatatagttgcttttatggttcttttcttggcgtattatttattgaaactatatgtatataaatatatatatatttatatatatatgcttatggcacaagtttttatatatatatatatattttatttttctacaccatatatataattaaatattttattttgtaatacct

SEQ ID NO: 84744 - DNA, 939 bp, Cannabis sativa
  modified_base (903)..(903): a, c, t, g, unknown or other
gataccctccgccgccgctgctgctgcgacttgaaaccaaagggttgttcccagttggtctttgcggaaaagaccgggtgtttggattcgaactgagacctcctcgctctggttcttcattcaatcggggtttcttaagacctggctctcttgatctatcgaaaggtcttcgagagctttccatttccattaccgtgaattacaaatcaagataccaagaaactctaaactaaatctaaatcttccattacagaataactcgaagaaagggaagaacaataaaaaaaatgtccaaattcaattttgatgatacaaaaaatagaactacaaaaactttatccacaacaagggactctgaaattaacagaattaacaaatatatattaagagaaaagaaattaaaaaaaaaaatcccaattcctaagcgaacaagaacaagaaggataaaaccctaatctaatctaattacagaaaatagagagagacatgaaaaagggtgagaaagtttagggctttaatagtgaagagaaaagaaaaaggaggaaggagatttaggagggagaaggagaaatgtgggcaatagagagcttttaatagtgaagttcggcttccgtttaagacaaacccaaaactttcatgactcgagattctcacaaatttgagaacatgcttttttttctttttcttcttttttttcttttttaattttttaagagtaatgatatggggatgagtttagaatgagtttggttagtgtatggaatggtatggtagtaaaatttctatttaagaatactctattcaagaataatctttaatttattataaaaaaattaagtttcacggcaagttataaataaaaataacctctaaattgtatttagttatacattttctaagtcncgtgttaacaaagtatacctctatataagaataatt

SEQ ID NO: 84745 - DNA, 638 bp, Cannabis sativa
gtgttttgtttcaagtttttctattgaaatttgttttcttgtgattcttgcgttactttctagtttatgttcttagacggtgtttgtttcactaattatgtttgttttattgattagtgtctgtaattcccttttatgtgaagtggaagatgatattagagagcataattgtgtctctatattgtctcatgtgattttctttgcctatagctctaagatgtaaattagagataattttagtggttgtggttgttttgagtttacatgtgtacaattagtttgttggctaattcctatttcaatttcagtgggagtaattagtgaatacagtgtattttaattctctctttatttgtattttcatcttcttccttaattcaatttatttttttctaggtaactctttttataactagccattataatatgtgcaattattatacatatataaaatctttttattttttattttttttattttctatgtaaaggctattcttacatctatatatacataccatgtttcaacttttttcaaataacacaaatttattatctttatatattaaaagtgtctatctaacggcatttcttggtttaacagaatatacttacaaataaaagaatattctgttaaa

SEQ ID NO: 84746 - DNA, 903 bp, Cannabis sativa
ggaattatggctaaaaaagaaaaagaattattaacggatatagtatttctcaaatttgcacgttatacaattgccttattcttcattttataaatttcttttaacttaaatgtttatttaataattatttatttaatttcatattaaaattgtaaataattgtgaatgatttgtaaggtaaatattttttttatattaggaatgtaaaatttatcaagcaaaagatatatcattattggataaatagtgacataactactcaaaattttgtgtttgttggcaatataaactgaataatttttttagcggtataaatacataatgttagtaaaaatataatttttctcaaatttagtagtataaattttgttagtatctttaaacatgacacatgtaactatgatccaaaagctaaatcattaggtcaacatataaaatgaaatactttcaaatcttcttttaataaaatgattatttcagaaatacacaaaaaaaaaaaaatacaataataccgttgtacgaaattttaaatatttttacgatttttaaaattttatttataaaaaaatatggtcttttgatgtttttcatattatttttatgttgcatattattgttattttgctattaatttttgttatttgtatattattttttattattttaatattattttttattactttcatgtagttttcgtgttatttttataaaatactgtaaaatatatataaaaaataaatatttgaatacaaaaatgtaaatttttattaaaattaatattttgtgtaaatttttatttaataaattcaaactgtaatttgtattgacgaaattaaatgaaaaatataattttataaacatttgatacttaaatgcaaattattaaatctatgccaatta

SEQ ID NO: 84747 - DNA, 1139 bp, Cannabis sativa
ttaagtttttaagaaataattgttaatgtaattttatgttggtataaaaaattaagaataatgaataaataagaaaatggtaatttaaagataaatttgtaaatttaggagttaaatataaaattagtttaaattttaataaataatataaatttttagaatcataataattcgtttaaaaaaataattattttatattttatttaaatctagaaaataagtttttgtttatattaattaataaataacttaaaaatttaaaatttaaaattaaaaagttaataatttaatgaataaattttttatttaaatatgtgtctaattcataaaatattcataaaattttataataatagttaataataaatggttgaaaagaatatatcaatgctatggtatacttataaatatataccataactttgttatatttaaaaatatatcatagcttttgtataattacaaataaagtctagaacaaaattgttcttcactttatttgtaatatacaagggcgatggatatccaacaacgcaagacacaaaatcgttggcttcgatacggcacagaatggtaactattaattctttaattgttaaatataatttttctttataataaactaatttaattgtttatgttcgtataggggggtcctcccggagagcatgcagttgatgcatggaaggaggttcatttgaaaaagccgtgtggcactttcgttaatgaagctgctgcaaaagattatgtaagtgaataaaataatttattattaaaatttatattttatattaattatatattctaataatttttatttaaataggaggaacttgtgaaggagcttaataggaaaagacttgaatgacaatcccagagcgatacatctagtactgaatctgacattggttatcagtacaacgttttgaaaacagttctaagcgaaagatttgactattaaagagacgtgggtaaaaggctcaaagacaaaggaaagaagtcattcactcaaagtgagtcgacggtgcctccttcgccaacttctgaaatgatgagcactatggcagaaatattctcaactatgtgtgccacatgggggagtaatttgacgcctaaacaacgtgctcatttatataacc

SEQ ID NO: 84748 - DNA, 1225 bp, Cannabis sativa
aaattgattttgagttttgagtttttattttaagttcaatattatttgcttatagatttgtattttagtttaaattttattattagtgctttacttacaaaaaaaaaatgttttactttcttgtatgaatattctatatgattgtttgtgtttgtatttatttagttctaaagtatttttttaatttaaaaaattttaaatttggtttgtattaattttttagttgttgaacaactattacttaaatttttaaaagataaaaaatcattaattaataaaaaataagataaaatattaaaattattacatagaaaatacaaattgacatttcatttataaaaattcctccataaggtgtggacaatatttataccttttatgtattttaattaccaaaatacctcttacactatcacttacacaattagactatggttgtttcaataagacgaaggttgctgggtggttgggtaaaagttgcatcagacgaatgtttcaatcaaacgaaagttgctgggtggttagccgaaagttgtattagacaaagttttcaaccagacaaaataactgttagccaaatattcaatatgcaactgttataaaacattaaaaatcagaatagtattttcacgtacgtaactctatctacatgtttcttcatgatttaatatgaacaaattcactattagaaatttagaaaacaacaaaaatacatcaggataaatattttactatagtattgatgtaatttttttggattatacttgagttggattgtttgggaactttagttcaactttttgagatatgcattcatggatttgaaaattgaagtcagaacattagttttatgcaaattaaactagatttctagttaaattttagtttcgtatagtttttctacattttttttcatgaattcgaaacagctcctgtttgattgattctagtcgtcttctcaagtgaagttgccggaattaatggtagttctctttcaggttgaatttttcgtttcggttcttgcgtggttgagtgatgattgcttaggaagcatgaattgaaggtgtgtgtaagtggtatttgtgtaattttctttatttaagcagtatatttgtttatttgattaattggtgttgttgagtgaatttcacaacaccaaattatattattttattaatatcaaggagaattttatgtgtaaagacaagtgcgagtattcaaccta

SEQ ID NO: 84749 - DNA, 748 bp, Cannabis sativa
aaaaggcatatgatacagtggagtggtaatttattgaggaaatgcttcatggacttcagtttccagttccctttgtcaaactgatcattcaatgtatctcaacacctaggttctctctgatgttcaatgggactctccatggtttctttgaatctaagagaggcctaagacaaggggatcctatatctccattactatttgtaataggagtggagtatctatctagactgatagggaaagttagggacaaggaagacttttgttttcatgatagatgtactgagctcaaattgaaccaccttacttttgcagatggtgtaatattattcagcaaaagggatgagagaagtgtcaggtacttgctgcaagctctgaaacttttttctatcacattaggattgtaaccaagtcccacaaaaactgcaatatattgcagtaacatggagcaatctgtagtagagaggctgctgaaactctctgggttttcaagacagaatttgcctttcacttacttgggaatacctatcaatgtcaggagaatatcaggaaaagaatgtgaaatactgatagagaagatgactactagaattcggagttggagttcgaggaacttgtcctttgcagggagaatagttttgatcaattctgtcctaatggcgattcaagcatactggagccaaattcttatcttaccaaagaaaataattaaaggcattgaagcagtttgcagagcttttctttggaaagg

SEQ ID NO: 84750 - DNA, 529 bp, Cannabis sativa
tggtaaaagtaacttttacaagcacatttcgcaaactgcactggcaaagaggttaaagttttaccagcgtacatttgcagtggctaaagtttaacttttaccagcgcttttcattttatgctggtaaaagttctaatactaacattgatttgccaatcccattttgccaacacatgacaagtaaattctattttatcagcgcaataccaacatttgtcagtaaaagtgacatttcttgcagtgtgtaccaatagaagttttagaattataacttacacattaccgtaaaaaattaaattttatttacaattagaagttaaacttaagtatttataccgtatatttttcttgtttatttaatcaaaatgtgtgattaaaatgcctcttagggtttaatgtatatgtattattttgttccaattatacactgtacatgggtagatttatatatatatatatatttatatataagcgtcatatatcctttggactcttgcaatcacatcgtttaattaagtttttggcccta

SEQ ID NO: 84751 - DNA, 741 bp, Cannabis sativa
agtgtcatgtctgttgttggccgaagaacaagtccttcagaaatggtacctttgagatatcgtagcaactttttgcaagcctcccagtgacaagaagtaggagctttaataaattgactcagcttgttgatgatataggccacatcgggtctagtgagagagagataatgcaatgctcctatggtacttctgtacaaagtaacatctgggaaaggttctccttcagtcaatgataattttgttgctgcactagatggattgggagagcttttggcaccttccatattgagtttcttgagcaagtcggtaatatatttcgtttgagagagatacatgcccgaagtgtccctgaaaatctcaactcccaaaaaataatgcacatcaccaaggtccttaagtaagaattctttgttgagatcagttgcaagcttgtcaatgagtgaagcactaggacctgtgactaaaatatcgtcaacatagacaaggagaataataagggaagagcctgagcggtacacaaataatgatgtatcagcttttgatggtgtgaatccccattgcaccagaaaatcttttaacttgttgttccatgctcgaggggcctgcttaaggccgtaaattgctttatgcagtaagcaaacatgagtcggtttctcagaatcgatgaagcctggtggctggctcatatatatacacggtttcagtgagatttccatgaaggaatgcattactaacatcgag

SEQ ID NO: 84752 - DNA, 628 bp, Cannabis sativa
tgccaatactctcacggctgcaaaaatcatgaaccagttaactgaactgtttgggatggcatcaattcaagcttgctttgatgctaccaagaatttcatcaatgcacggatgaaacctcatcaaaacgtgcgtgatcacctactccagatgactagttacttccaagaggttgtcaataatggagttgttatagatcagacaactcaagtgagtttgatcttgaatagtttgactccagcttttctgccctttacatcaaattatgtaatgaacaagtttgagcttgattttcacgagttgatcaacaaccttcacacatttgaaaatttgattggaggaccacagaaaggaggaactaaagttcctagttctggccctgctaatggttcaaccaagggtaaggcaaacattgcctctgcttcgaaacccaacaaaaagaagaactggaagaatagcaagaagcctcttaaagctgctaaaacagttaacaagaaaaagaatgcaaatcccgatgcaaaccaaaaaggaaactccttctattgcaacgaaaagggccactagaaaccccagtgtcctaagtttctagcaaagaaacaaggtatttctatctatgctataaactcatgt

SEQ ID NO: 84753 - DNA, 1171 bp, Cannabis sativa
aaagcggttgtccaatcaattttaacctatgccatgagttgctttctcttgccaatttattttgtaatcaacttgagtcaatgatgtctaacttctggcggggcctcaatgagaatggaacaaaaatatattggcgttcatggaatttattgtgcaagagaaatgatagcaaaggtatggggtttcgcttgtttgaacactttaattaagcgctactcgcaaaacaagcttggagaattcttactcaacctgattctcttcttgccaagcttctaaaatatcgatatttttcccatggctccttcctcgaggctaatcttaggcactctccttcattaatgtggcaaggcatccattggggtaaatagttgctgtcttcgggtttgagatggaaaattggtgagggttgtcgagttaagtgtggtattgatctttggatcccaggacactccactttttagccaattttctatttgggtctgatggatggcgtggtttcaaaccttataactgaaaatagacaatgagatatgtcactccttaatcaatggttttccctacttgacgtggaccgcatcttgacaattgctttggggttctttagacacaacgacacacttatttggcactaccactcatctgttgtatactaaggtcaaacatatcattatgcaacatcactagaagatatagacaacagctcatgctcctcttcagcaaacgaatagtggaagttctttcggtcactccaactgccactgaaactaagaatttttgcttggcgtgcttacaatgatgcattacctgtggctactacattggttaaaaggaaaatcatcactgacgctacttgctccatctgccatcaagcttgggagtccattggccatgcattattcggttgcaaatatgcaagggcagtttggcgacattcgaaccgtgtactcgactggtgtaacacgtccacaatgcaaaaaggtgattatcttgttcacttgtctacaattttcaaacgatttgaaatggagcaacttttttgcacccttcgatcaatatggtctaaaagaaatcgggtgatacatggacactaagcaaaacctgccaggaatcttgcattttttacatagaactatctgcataattttcgagtagcacaagctaaattcaggcc

SEQ ID NO: 84754 - DNA, 601 bp, Cannabis sativa
atctattttatcatttaacaaatctaattaataacttttgtaaaatgtaggattcaaaatagtctttatcctttttatttgcatggtaaaattttataaagagacttaattttaaaaacaaattattttatatgaaatatatatctttagtttatattaatttcttttctttatgatattcttaaaataatatacatgtaacatgaaaattaaaaatatactttaaatattaagaaaataaaataaaaagtgatgaaattttattaaaaaaatttttaaaaaaaagtactttttaaatatatataaaaaaatttaagtaaatattaaaattaacacaaaataacataaaaaaattaaaaatgttaaagagtgatttttaaaaattaattaatttttttttaatattatggtgtagttataattttatgagatataaataaaactcacttttaaagtgttcttcctttttctcacttaactaccagtattgtcccatcatggaatgaaaccacgtatccatttctcattcatccaaatcatcattttgttaaaaaaataataataaaacttactctaaaaattaaaaatataaatagaagaa

SEQ ID NO: 84755 - DNA, 619 bp, Cannabis sativa
taattctcttttgagacaattattctactatatttatgcagaaagaaaactcttcactgtatattctgaacattatggggtaaaattaaaattatctaaaattttctacacaaaaatacaatttattaaaatttaagcgaccataagtgtcatctctttgggtacaaaagagattctatgattaaaaaaaattgtgtaatcgaattttgatattaacttatttttgttatcatttgttttattttttaaaaattttaattctattttaaaaatataaaagatgaaagcaaatttactaaaagattaaaaatatattttcactttttaataataataaaaaaaaaaattgcattattttctagccctctattaaaaatgctattaatatgaatatttgaaaagaaaaaaatactgaaggtatgagttttagtgcccatatcactagtaacatattgaatacataatctttacaatttagtttaataataattataaaaattcgctataactttcttgccttatgattggtaaagtaaaaataagtgtgtttggtattagagaaaaaaaaaaataaggatatgactcaccaaaatttatcaatctaagtagagaggaaata

SEQ ID NO: 84756 - DNA, 523 bp, Cannabis sativa
ttttattttataaagttaatttaattatttatttgacaaatttaaattataaaatattattaagtaatcaaatatgaactaaagtagagagtatgattggagcaataaaaataaaaaaggctttctattttagtgtttttggctaaaaaataaagaataatttgaggatgctttaaataatttacgtgccaaaaataaagttcaaatatttttttttgtaagtaactgttttttcttatacatatagtagacaactgtttgaatcttaattaactttagtattgtaaattattcaaaatgttctaaacatttaccgatgatcctaaataattacaacttacacgacataaaaaaataaaactaagaaactcttcttgataccaacatacattgggggtgtaccaataatacctatttttttaaaaggtgtattataaatttttccaattacacaagtattttttgtagtaaaaaataatttggaaattctataatgcactcccttaaaagggatataccgata

SEQ ID NO: 84757 - DNA, 2154 bp, Cannabis sativa
ttttgggatgagttggctggcctttattctatttgtggatattcatggtgtttgggggggatttcaatgtggtgcgaagagtgggggagaagttgaatagtagttcatgtactaagaatataaaagtttttcgatgagttgatttcgggaaatgagattgattgatctttaatctaaataatgggcggttcacatggtctaattttagagctacccctatttgcagtaggttggatagattccttttcacttacaaatggaatggattatttccatttgtgcgccaagaaatgttggtgagattagtttcagaccataacccagttgttattgattctaatcctcctaaatggggacctggcctgtttcgcttcgataatctttggttggaacacaactcattctctaagctccttcaaggttggtggaaaaatgcaagtgcaattggctgtactaaacttatgtgcaagctgaaaaaagtgcaaaaaaatatcaaggaatggagtaagtcggtttatggaaacaacaaggtggccgaaaatgctttagaaagacgaatattggcattggataaaatagaagggattaattttccagatcaatctcttgtagaggataggagaaatctcaaaagggagtggcagcggtatgtatttgaagaagaaagaagtctatggttgaaatcgaaatgtaaatgggcaaaagaaggggatgcaaactcacgaatgttccattaatttattgaatgcaaggaaggcaaggaacactatctcaagaattgaaaaaactgatggctcgacacttgacaaggaggaagaaatagtagctgaatgaattgatttcttttctaagttatatacatacgagaggagaccagggtggggagttgaaggcattgagtggcaacaaatctcagaatcattagctacagatttagaaagaccttttgaagaagatgaaataaaagaagccattttcaaatgtgaaggtaacaaagcacctagcttggatggtctcagtttggcttttttttttcagtcaaattgggaactcataaaggatgatcttgtggaagtcttcaaggctatttaaagagagggcagaattgagggaagcattaatgagactttcatctgtcttataccagaaaaacttaatagttgtatggttaaagatttcaggcctatcagtcttacaacaagtgtctacaagatcatagctaaagttctagctgcaagacttcgaggtgtattgggggaaacgattttggtgacacaatcggcatttgtagaagggcggcaaattttggattttgttctggtggctaatgaggcagtggaagattatcgatgtcgcgataagagtgggttggtattcaagattgatttcgagaaagcttatgactgagtagaatgggttttcttagacctagttaggacaaaaaaggggtttggggaaacttggaggaaatggattagatgatgtatttcctcaacatcattctctttattcgtgaatggaagaataaggggaaacttcaaaggatctcggggccttagacaaggtgatccactttcaccttttctctttacgctagtggtagatgtacttggaaggatgattgaccaagctatgaattcaagaattttctcggagtttttagtgggcaaagataaggttcacgtcaaccatctacgattcgcgaatgatacgcttctttttgcaaatgatgaggcctgactccaaatactgacaagaattgtaggggcattttgtgctgtcttaggattaaaagtaaacatgaataaaagccaagtgctggggatctctatgtatgagagtgtggttgctttgtgcgctagtcagattggttgtgaagtggggaattggcctatgtcatatcttggaatccctttaggtggctcgcccaggaaaagttgttttgggcacttgtcttggaaaaatgtgataaaaagcttaatgggtggaaagcatcatttttatctaggggtggtagacttaccctggtttaatcgatactgtcatctcttcctatttactatctctctatgctcaaagctccaaaatcggttttattgtcgttagaaaaaatgatgagattttctatgcgaaggaggagatttaatgggtggg

SEQ ID NO: 84758 - DNA, 665 bp, Cannabis sativa
atgcttgtttttactatttacactactaacactaattgtttatgtgattttaagggtgttagtatagtgtaaaatagcataaaaaaactatttttttaaaaaaatttaaaaaaggccaattccaatgcaaatatttttttttatcaatttttgatacattttaaattttattccatgtcattgttatttctacttttattcttatattttcataataaattccaggcttctttaaaaaataagttgaaataagctggagtgatgctagtcaatcagctatctaacatgtttagaagttgttaagatgtagctcactttaaatccaatatagaccattgaagaaataataaaaacaaatacaaaaatattaaaacacataaattaacaaactacccacctcataagaggctgaggggggaagattgtttggaattaacataattattaatggtttaccttttttggtattttaaattaaaaacaggtgagaagcacaaatagtctattccatattttaagaggaacacaagaattgtgttgatgtgtcttatggctttgaaactttacaaagtaacaaactaaactagtactacttttaccatatttaaacctactcatccattcctttgttttgtacaaattaacttttatatcattgcacattc

SEQ ID NO: 84759 - DNA, 693 bp, Cannabis sativa
gaataagccagagactttaagaagagtcattttatcagcttcaagaaagtctccaacttcatccccaatcattttggccaacttgtaggatttcattccaaaaggaatggaatgaacctgaatccaaaagggagaataacgtatctggttgggaagaaggatgtcaagaccagcaggattggcactagtgaccaagcagtggtcaaaatgccacggttgtccctcaatgactctcctcatgtccccctcacacccaaattccaccataaacatcccattaccatattcagaaaaggaaataggagcacgagtaatccatgcatttcgcatggcttcttcgaaccaatcaagtttgacattcctagtggtgaacactctaaaaacaagacagaaagatctccccagttcaaccccctcacccacatcatcaagatgttcatgaacaacagcctcttgctcagtaagggacaacacactagccatattctcagtaattccctccataacccaatacaagtaagataagtagataacccaggaatattcagagtaagaaagcaaagataggcagaaaagtagagaacgccaagtgacccagacctttaaatagatgagatgagaagtatacctgcaagtagcagtcttagagacaaagaaaaagcttgtaatgatcttcctaccctgcagtaatcc

SEQ ID NO: 84760 - DNA, 1206 bp, Cannabis sativa
atttttctatacatataaatgtctaacattacttggatcaccatgcaccaaagttttccttgtattctcttcctccacctcctaatcaaggtatgtaaaaataataaaatttactgctcacatttttatatctgtgcgataaattaacttttatcatactaaactttcatgatgagtcttctcttttttgcatactgtttgacaatgatttttacaaagaaaaccaatggaatacagtcatcaattctcttcttcttttgtcatgtcatttttctttttattttctttagttaataaaatctattaattaattaatttattaattgatttttgattttattattaattattaataattataaatttaaattataaaagtattaattatttactaaaattgctcatttaatggaaaaatgaaaatggatcgagctatttatctatctatatatattatttcctatatttatatacaatcttgatacaaaacaaagtgaagtggctatcatccctatcaattttttatttttctaaattgtagttttttctaatttttattccctttttattcaaaaaaaaaaatactattttattaacttaaaattgtttaatgctaaattacttttattattaatttagtttaataactgaggaaaaagaaatgaccctataactatataagtcattaaagatacatataaaagactaatttttgaaaaggtaaacttcgaatttgattgtatctaatttaaattaaaaactatttgatacattaatattttcttaattttttttatttaatacgatttcttattttttaattatttaattttattattaatttagttttatatgaaaaaaaataacaatcactattattgtatacacatgaaaagattaatattgattcagttacaagaatttagaaagattaatatttataactatattaaaaactaattaatatacattaattattaactactacaaagtattaattaaaaaatgagtgaaagttacatattttaattataattaatttaatgaatttatatgctataaatttggaaagtagaaaataaaccatcccttaaataaaactactaaaaaattttattttgctaattttatttttcattttgttttgatatatctattctatataaagtgtgcttatataaccgaatttttggtttatgagaaatt

SEQ ID NO: 84761 - DNA, 1005 bp, Cannabis sativa
  modified_base (973)..(979): a, c, t, g, unknown or other
aagcttcaggggatacaaatctgttataaatgatctcggtatatgatgaagaatgtatttgtaattgaacaaggtatgaaaagaaccaggagaaactgcaataaactactatgtgatcaaatattctactaagaaactgctgtaaactggcttgaatttagccaaaaaaatagttaaaaccacgaaggacaactcaactgccacatagcacaagtttgggcagacgtttttctttctttttcattgttgtttataaatacaaataaaccaaaaaaaaaaagttaacactaattttcaagaattatcttaaatttctatttttcactaaacagaaaaaaaaattaaaaaaataaaaaaagaacacattattagaaagataaagatagatattaaaaaacatatatcaaagagagaaacaaaagaagatagagaagaagggaggaggagagatagattattatattagtgggatccatatcattgaataaaattaaataatgaattaataaaaaaataattataaaaattggttagatgatatgctatatgatggacacgtgggagacaaataacatttctcaattaaatagcaaatatcaaaaaatagagctgaataaaaaaatatttaaattaatcttagtttaaatatgttacattcatattacaatgcacttactcaattagaacaagctattaagtactctacaaataaggtatttagaaaatttctcacagtaaaagaatcctatatataagagatatgaggtgttgacataacattttaaaaactctaaatacctctatttgctatcttcttaattctctcattttttttttaattttttattaagttcataagatcataaaatatatacttctatttattatctccttaatcttctcatttcttttaattttttattagacttacaaataaaaaaaaaatacattatactaatatatatatatatannnnnnnggtttcaatggttacatttttattgt

SEQ ID NO: 84762 - DNA, 744 bp, Cannabis sativa
aaattattatacacataaccttaataaaaatagtaagaatgacctctaagtagaggtaattctacactcaatcttatttttaatactttaagtgtcaaattagtatgtcaattcaaaattagttcaagttatttagttatattttaatttaaaaattatataaaaaatagtttaaaatctaataacagttataaaattattaaagataagttcattttttttccttcctcatcgtgttcaaaaacatatttaaaacaagtgggacaaaattacataatgattaatgatcaccgagaaatgacaattgattgaggaggtggagcctcttgtctctagaatctccaccatcatgaacttggtgttttaatttttcttttgtataaaatttttagattaacaaaaaaagaaaagtacaagtattatatatgaacaatataatgatcatgttagaaatattatttaaaaaggagtagacctaaaaacgatatcatgtgaatgaaaaaaaaaggtatgtgaaaaagaatttgaagaaagtagacaaggtaaaataacattttgttgttattgtcaattaatttatgaaagacgtgcaacattattgggcctgaacgtgcgacaggacagctgagaacgagagagaaaggaaaagaacgtgatatatagctagtagattggataaatttgtttgtggcaaagacgtaagagattgtatcaaagtggaaaattcacttgatgttaggttgg

SEQ ID NO: 84763 - DNA, 506 bp, Cannabis sativa
gtgagcaaaggatttcccaggttttagctcgagcccagaaatagccctgcagcatcggaataatgtgttgggttgttgtggaatgagaagtcttgttgcaggacttgtcctcgagggtgattgactggtatcaaattggtggtggatgggttaagtgtaggggcattggggagggacactatggatgatgacttaaggagaaaaggattggggagtagtccgaaagggccatggttttgacgggttgttctgcgcaggacattttcataggggaggggtgggggttgggtagactcgtcggagactctcatgtactcagtgcaggagtggtaagagtgtcctagacggccacagtagtaacagtgatcaggtatgtcctcatatttcaattctaaccaggttggggaagctaagccagggaacactattggtatgccacggggtaaaggtttggtaacatcaaacatgatgcgaactcgaaggtaagagccccaagtttcaagcaa

SEQ ID NO: 84764 - DNA, 908 bp, Cannabis sativa
tacaacaagttgtagaggctcggtataaactgtttgggatgccttgggaaaaggcagtttgtgaatctttcctaaacagcaagcttcacaaacagaattagattctttattgattgagatgttacaagattgtagtacagacttgacaattttttgagatggatggccaagcctattgtgccaaacatcccaaacagtaagactattagtattatgactacaacttggacaattattgactatggattcacttggaatgggctgagaagatgccactagggcattgacagagggctggggtgtaagtgtagactgagagggttgaatttgaggagaaggttgcagctgaatgtcctcagattcaaacgaatacaggccattcttgtgtttccccatgagaagagtagcatgtgtcacctgatctttcacaagacaacagttagcatgaaactgaaaatacacaccattatcttcagcaaatttggatacactaactaaattcttagtgagagcagggacatgcaacaaatttttgagaagtaaaggttgagaatgacaagatttttgagaaataaaagtatgaccaatgtgtttaataggcagacctgtaccatcaccaacatacatgtgttcagggccattgtattcactgctgttcataatgttctgaggatctggtgtgcaatgattagttgctcctgaatcggggtaccagttgctgtccaaactctgatttgcagcagcaatgttggcttgtgcagaaggttgagctgttgagctagaggcaggagtgttactaaaagatttgtcaaatctgtagtaacaatcttgtgcaatatgaccaaatctgaagcagatctggcattgaggtttattgctcgattgagagaaccttcctcctcttgaaa

SEQ ID NO: 84765 - DNA, 686 bp, Cannabis sativa
  modified_base (298)..(298): a, c, t, g, unknown or other
cagatccccacgacccctcactcttgctcttagggatagggctcaaaggcttgctcaactgctggaggatgaccggaatatcatttagttgacctccgaggacaactttgtgaagtatgggctctatccgaaggatttcctgtgaaggagaggaagaggatatctagtgctggacgggctgagagagctcatcaggaggatgaactcattcaacttgagcgtgtagctaagttgaaaggaggtgcaaagggccaaacagtatgctcatgagcccatgaatcctgaagatgaggctgangaagagcaggtgactccgctcaaagggaggaagaagcttccagcccagtccaggcctgttgagcatgtaattcgcattaggcccttattagaatgaatgtacgcaagttgtaagtatttcaaaaaaaaaaaaatcaataaaaaataaatataaataaataaatacttgcaacaatttaagtgtgggagaatagtaagttttatggaaaaaaaagatacaagattgaattgttgaggagagtgattggggaatacatataggaattatttgagagaatgttgtatatgtatgctatggtgtgatttgagcctaaattaataacctgctctatctatacattttatcatagccttacattataagtctataaagtcctattgatctttag

SEQ ID NO: 84766 - DNA, 688 bp, Cannabis sativa
aatcggctctaaaccagtggatttgtttttgggtataattttttttcttgtcaaaatttggtttagaattacaaattaactattggtttatatttttcctatccttttttttcatgcttatttttttctttttggcagaaaaatcagacctccaattatgaatcctggctggttatttaagggtttctttttattttttatttaatttctactggtttgatgtatttttttgggtatagtagtgggtgtgattattatggtgacagtggtagtgataatgatagttgttgtagggtgataatagaagaaaaagaggtaagaagaaatcatatggtcatccgtggttctagagagagaaagaagaagaaaaacaattgagaaaaaaattgtaattttataatttattttatttttaaattataaatattttgttataatatttaaataattaatatcatgtagaccactaaatattcgtcatgtgtgcatcaaaatacaagacatgtctactattacactaaataatattttatgaacggaagggtaaaaaccaaaataaaagagcattttaggtagttttgccgttaaaaaaatcaattggggcatgatgcaaaatgaccctaaatctaacaattaagttaataaatgtctcttttttaaaaaaaattaacaaaatgtccttttagtt

SEQ ID NO: 84767 - DNA, 792 bp, Cannabis sativa
agataatcccatgagaaatgagataacatactccatatgatagtgttcttgcaatttttttacacctccacaagtgcaacaattacaagtgcaagtaggcctgtaattagatagctcttcccaaatagttttaagtttggtaaagtatataccaatactttgattttcttgccttaggttcatgagactctttctaagattgtagatatgaggaccatttctttgatgaaatcggacctttaagtcagcccaaatggctgcagcagattcgtcatagaggatactagaagaaatctccttagaaaccgaattcaaaatccaagatattacaatattgttatttctaatccaagcattgtaaagaatgtaatcagaaggtgaaggtttagggatactaccatcaagaaagcctagtttgttcttgactgaaatagagagctgcatagccctactccaagatatataattatcttggccagttagtaattgggaaacaagaacattacctgggttatctccatggtggagataatagggatttgttgggtcttcaagagggttcttcacatttccaattagcagatttggattcgtctgtagtgtgggattgtgtgttgcagatggagtggattctccaatttctgtctgagatggggattgattctcgcttgacatggtgaagattcagaaagaatgaaaccctgaacagttggataggttgcgccgagagaagtactcgggaggaaattgcagaattgattgcgtcgtcggagacaagaacacgacgagtgc

SEQ ID NO: 84768 - DNA, 849 bp, Cannabis sativa
ttttgcaaacttagagacacttaacaaattcttggtaatgtcaggtacatgcaaaagattatttaacaaaacgaatttagaggagtaaggtgtggaaaataaggattgaccaacatgttgtattgacaaacctgtaccattacctacaaacagtttctcggctccatcatattcagcaccatgtgtaagatgttgttgttcaggtgtacagtggttcgtggcacctgaatcaggataccagttgctgtcttgagcagccatggtgctagcaacatgagcctgtgcagtattgtttgagttgagttggcttggtgctcctccagtaaaggttttatcaaacctgtagaaacagtcttgagcagtatgtcgaatcttgaagcacaattgacattgcaatttggttgtagagttcgaaactctgccaccacctctgccataattagaggatgcaccccgatcataagctccatgatatggtccattgattccacctccacgattatatccacctctgtaacctcctctattagccaagaattgagatggatagttgaatctggaagaagtttgctgtctatagttgccaaaattacaattgaaactagtgagattggcctctggatgatcaacttcaagagaggcaacttgagcactgatctccacatctcggtctatcttctcaattctagattctgaggctagaaggagagattctatctctgcaactgagtatgtttccaatctggtgttagtggatatgacaaaagtgtcatattcacttggaagccctttgaatatagcaacaacatgatctttagcagtatagacttcaccaacagaggcaagcaa

SEQ ID NO: 84769 - DNA, 503 bp, Cannabis sativa
  modified_base (82)..(82): a, c, t, g, unknown or other
cgctcttccgatcttaataaattatttaaatagctataaataatttcataattaatcaagattaactgctaatttccaaatnaaactaagcggtctttacactttacatgtatatagtctcttgttctagtaagatatttgagaaaggttttgactgctatctagtaatataattctagatttaataattaaggacaaactattgataggttagattttgatgcattttaggatgtattttaattttttttttagttcagaatgtttattttgtgtggaattacgcttggtttcttcatgtttcaaattttaatggtcaaatacatcatatgggttgaaatgggaagaatcatgttaaatatgatgaatttgatggatttagcatggatttggagttgcaagatacaatgggtagaaaatttcaagttttgaatgctcaatacgctctgtttgtgataaaaaaaaattaggtctgacatttcaagttaatttttgactatgat

SEQ ID NO: 84770 - DNA, 932 bp, Cannabis sativa
taataataatatatgttaggatctatatgatcatctctaatgaaaaactttggagtgattaaacaataggggttgacccttgaaattatctcattgaagaaaatccctactaatctaccattcaaattaatttctgccattaatttttgatttgaaacataggaatgttcttgataccttccagatactttttctaatcccactttaattttatgatttttaaaagtctttcaatatctctacatttaattttttacactatttcaggatttaatcttgtacaaaacatatcaatcctctgtatgatttgagaataaaatgaattaatttatgagaataacttaaatacatgtatttaattattagaaatcctcttctatggttttctctcttattattgcctataaaggtgggataatataagacttagttggttattgagaaaatgccaatttttggggatagattattgataatgacaatcacatcagctgtagataattaagttgatctttgagttttaacacattcatttgatgtaaaaatttatatgtgagattataagatggttgatatccatcactttctgtaaattatagtaagtgtagcagtcttctatcattttcctttaaaactaaaagttatatccatcactctaagtacatacagaacatttttaatatttgaggaataaaatagaaaatttacgctttaaaatatgacaatagaaacatatacttaaaaccagaaaaacatccatgacttatgttcttgaaataaacacacaacataacattataaaacacccaataatagtctacttttgctagaaacagcccacacatttattgaaatacttagtaatagcaatcctatctcatttgtcaatgagtctttatgcctttgactttttagtcttcccttttgatcca

SEQ ID NO: 84771 - DNA, 1124 bp, Cannabis sativa
tgccaaaaatggaaactcaaaggattttccttagcaaacatcgagtgcaaaaatcccaaaggcagcgaaagcagaagaaaagcgaaaaacgcagaatgtaggaacaaaaatcaccccatgccctaaacagtctttcgacagaggggttgattctaaagaagaagggaggaaaataacaaagacacaaataaagaagattctatgcatcacacaatagattcagtcaaagttacttcccagaaatccagcactcaaccaagaagttctatcctaacatgcaaacaaacggtaataggcacaaagtgtccagaaaacttacatgaaagttgagagctgggggtcggcgttgatcgatggtactaagtggattgacaacgacgaaggaaaagcaacaagaaatctatggtgtctgaaatttttttctctccaacgtattcttgcaaaaaaatggcaaagtaggggaagtaaccaaatgaaggagaaaggctggcttttataggccaaaacgggtacgaagcagctatgatcaggcgtcatcaaacggtgggaattgaatcgatttgcattctgcagatctaacggttgggataaatgctcctcagggcggctggaaacgcttgagtatttgtctgacaccatttaaatgtgccggatcattaatggaggggaagtgaatcgttgcttgcaaaaagcattaaattttaatgatgactgtcataaatgcagcccaagcgcccgaagcacgtgccaggaaatcaatgagacagcatgaggcacctgacaagcctcgtttactttgcactgaacaaggcttgcgggtaaatgttgcccttaatttcgccaaaatacgtggaccaatatgacaacgacacgtggatctaagaagcacgactattagataaatcgactaagtcttttttgcatcaagagtgtcaacgagaatatgcctcccggaggagaggtgaaggctccacatactcccagaaaacaaggaaacgctaaggtatctccgggaggtactggaccttatttgaacagtcacctctgatttaatgccgcgtgggagaaaacgtattggaactgccataagcaatatgtctgacggcgtaacccctcttttgcag

SEQ ID NO: 84772 - DNA, 1713 bp, Cannabis sativa
tatctataaataggtatgaaataagtgaaaaggacaaataagcccttccaatttggtgggtgctaaaaggcaattacgtggcatgaaaagcaacaaaagttagggttaatttgggaaattaaatcctcaataggaaaagtccttggttgggtgcctatctatatagttttgatgaacaaacttaaatcagtttgttgagccttttccttaaataaataaataaataaaaaatttaatccatttttattttaaaattatttaatgattgagtaattactaatcaaacttaattgttttgacaaattcataacaatcaaatatgcaaggacaaaaaacaaaaaaaaaactatacacacaagattcaagaaagtctaacacatatatacttttttgttgagcatcttcgatatatcttaagtatactcttattaagttaaagttggtctcatattctcatgttgttgatccatgttcttaaatttaataatgttttattcgaaatattattaaaaaataaaaaataataattcacaataattgaaccaattaaatgaatttatttcgtaaatgtgtaatgtaatcatccaaattattttgtatttattaataaatgtgtaatgtataaacaagtaaacaaattgttttggaaatatttattcggtttttatatttatactttaaattagtttttttttacttttactaaaatgtgcattgtaatttatatagtaactaatagaacaactaaaatttatatagcaatttatataaaaattaccatactaactatcaaaataattcaaactgtaaattaaaataagttaaaaaaaataatatatatatatataataatttcctttatttattttttatttgtttagggaaggattttgaaaaaattaatgtgtataaaaatacaaaagtgtgtatataaatagcattatttcaaaaattaattatttgccacaaaagtattaatagcggctagttattttatgactatgttttgtttagtatatataatccaacttctaaaatacacatatgatatgtatatgaactatgtatagtaaaaatacaatgtgcacaataattttttctttttttgaaatttgtgcacaataatttgaaatgatactttttatagtaacaaaatatatggaagaaaaaaaaaaaagcatacttatgctttgtcaaagaaagctttggcttgttggaatgggataaccttagttgttcatcctattgttttgttggacttgccaatttcgttgtagtttctctttggttaataaatgacttccttttaaaaaaaaaaagagagaaattaatttaaaatcattactatttatatcccatacaaatattttatatataatttttattttataattataggataaataacaatataagtaataaaatttttaagtttgtaaacaacataaataatcaatatatatttataaatctataattttgttccagtttcatcaatataaactccgttttgtatttattaaaaaaatacttgaaagtaattgatactacatgtttctgtttcgactcaataatctaaaattttgtcattatatgtgtcatgtttaagaaaataataacaaagtaattaaaaaaaattacaattttgtaaactacttatgctgttaaaaataaacattaaattatactaattaaattttatattagtcactc

SEQ ID NO: 84773 - DNA, 953 bp, Cannabis sativa
gagaacacacaacaacaaagaaactagcctatgtacactcagatctttggggaccatcaagaattccaaccatggggggagcacactgtttcatgagtatcatagatgatttcagtaggaaagtatgggtatacttgttgaaagataagaattatgccttggatactttcattgagtggagaaagcttctagagaatcaaactagtaacaagcttaaggtactcaggatagacaatggcctggagtactgctcaggggaagaattcaacaagatgttgttttgtgctcaagaaggtattttcaagcacaaaatagtggtgaacacaccacaacagaatggcactgcagaaaggatgaacaagactctgttagagagggtgagatgcatgcttgtaggggctggtttggagagaccattttggggagaagccctcaagactgcatgctatctaataaacatatgtccttcagtgcccaacaactttaagacacctcaagaggtgtggacagggaagccaccaaagtttgaacatttgagggtgtttggttgcacagcctatgtgccatcaaacaagacaagatgaagccaagggctctagggtgtatgtttctgggatatccagaatgggtcaaggggtacaaaatgtggtgccttgaaccaggacacaagaaatgcttgattaacagagatgttgtgtttaaggaagaagaaactgtttaaacaacactgctggatgagaggcagtctgaggtggaccaatcacctgacaactctacacaagtagaagacacagttgaggatgagagtagtcatggtgatctaagcagctaccatctagcaagagacagagaaagaagagaaagaaaacctcctaataggtttggctatgctgacttcattgcctaagcactaactgttgcagaggaattggatagctctgaaccaaccagct

SEQ ID NO: 84774 - DNA, 614 bp, Cannabis sativa
  modified_base (283)..(286): a, c, t, g, unknown or other
aatttgtctctgaaagtatccctcaattcacttctattggttgtctgttattctgatatatgtaacatagatacaaggttataaacaaactctttatttaatcctttaaaataaaatataatatttaatttaaatcaaattcataatttataattcaaatataaatatcatatacctgattaatagaaatcagttatatcctttattttattattatcttttaattaataaattatctagtaatatatttaattcaacaattaaaagataattaattaatttnnnntgatttattttaataataaaataatcaaacaaaattatcatggatctttatatttcactatacacgtgtgggtcatattttaaagtctgaaattgatttttcaattttaccacaaataagatttactattattttgtcaataaataataattggttaattctcattaatctcttatttagcttggattaaaataaatattatttttactaaaataatacatttatctctttattattatttaagaataatattatatttaactaattaatataattttatcaaataaaactaaatagttaaatacaattcataattattacaattatt

SEQ ID NO: 84775 - DNA, 618 bp, Cannabis sativa
atttaacttattttaattttatgtcatttttcagatttagaactcaaatgagtgattaaagaagatataaagcccaatttaatggcccagacctatcccattcattttatgcctaatgccaagtttggtgaatgacttcctaagctaataggtcgtcaatcaaatggacatatattatgaagctcaagccaacctttaattctccatctcttcctctctccaatcaagatttaataacttctctattcagctcaaactcaaatcatggcccaactctcacgtcaaattatgggcccaattctactttgtctcacgcatgtgtattaaacaagagtaatgcgatccaatttaattctttttctgaagcaatcaacgtgggcttcacaagacaagtatcaactatccctgtacgcccactctttgatgcatgaataaacgatagaccaccacatggccattttgctcagattttggaacatttctccactacttgaagccacgatattcattagcttagggtcctatgcacactataaataggagctaaatacaatgaaaatggcatcagattttagagtagagaaaatacactttgtcattttatttttctctcttatt

SEQ ID NO: 84776 - DNA, 521 bp, Cannabis sativa
ttaaaagagtttcacgccaaatatccctttaatatattcccaaaaaaatttatgatatattcgtataaataaagtttttatggtatatataaatgcaattttaataaaatttatttaaaatatttcatagcctaaaaattaaataaatggctacgatattaatagaaaattaaatattattatttgggtataaaaattaactgtattatatacaatccatttaatttgtattcgaaaaaaattgctctaagttctatttttatgcaatcaaaaaaattaaatacaatcattagaaatatatatataacttatatatatgtaataaatatatatatgtgaaataatagtaaatggactcaaattataggattatgttactaaatgtcgtatttcaaaatttgtcgcaatatgttccttttttagattatttattatttatattgtcctttatcacataaaaaaaatatcaataattttttttatattttttttttcaaaattagaagaaaattacttaaaga

SEQ ID NO: 84777 - DNA, 857 bp, Cannabis sativa
taatgatgataatataattgaaatagtgacttcaccaaacaatcctgatgggaaactcaatcgagctcgtcttcaacacccaaatgccaaagccatatatgacagagtctattattggccacaatttacacccatttcagctccagctgatgatgatattatgctcttttcactttccaagctcaccggtcatgcaggcactagatttgggtaaactaatacaacccttcttttatttatgaataaacaatatataattaatgacattattattaggcactttagagtgtccaatatcataccgatataccgatataacacattgtgagtagatgtagcctcttatattatttattaaatcaaactgtgtaacccgatatatatatatatatatatatatatattaaattgcataactaatatctatatggccacattttttatattcttctcactataaggtgtacttttgcatttctttatttatattcatatgaataaatagaaatttttataaaatagaccaaaaaattaaaaaataaaattataaaaatatgcttgccaacattgaaatttttttaattttgccttttgaattttttttatttacaaaaatacatcttcagaaaaaataataaatcttttttttttttttgttattttatagtttatttataattatcattaaattgatttctcgttgatatttaattgttttcttactttcggttgaaaaaaagtatatttttataattttaaaattttaaaatatattttttgtaaataaaaataattttaggtcgtaaaattataaataaaacataaaaaagagattttttataatttcccaaataaat

SEQ ID NO: 84778 - DNA, 1975 bp, Cannabis sativa
aactgctgtgcctcatgttccagagctaccaaccaagcttcaacactgtgtgattgaggaattgccaccagatgctgatgtggtggctgatgtagttggcatacaagaacccataggcaaaggaaaagatagaagatacagtaagggtaaacgaattgaggtggttgaaataagttgctcctctgaagaatcagttgatgaggatgatacagatgatgaggatgatgatatagatgatgaggatggcctaaaaaaatcagattttgaaggatattttgtagtgatgactatgtcatctttgaaggttgtggactagaatgggaagaccctgagattcaagatgcaggggaagatgctcctccaattgatactcaacctggtagagaagatgaagacccaattatataccaaaccactatagatgagccaagaattcaccaacccaccataaatgacccaatgatgtatgagtccaatacatttgatccaacaccacctcagcctactatagttgacacaacaccagactatcccactacatttgacccaataccacctcagcccaatccatttgacccaacaccacctcagcccactacatttgacccaataccacctcagcccaatccatttgacccaactgttgacataccactaaactagcccactacagatgacctatcaccaaaccagcccaatgttattgacccaacaacatcacaacaccaaaacagaaatgggacacaacaagccaatgatgaacaagattttgaatttcatgaggaggaatatgagcaagatgtccaagctgagaggaatatagccaaagcaacagatcctagcaaatggtggtcaagtgtcactaatttttgcagtcaaggtggtgagggtaatgagtgtgaaggacatggagttgaaagtgaggatgacttacaaagtttagcaagtgatgatgaggaaggtgaggttaggaaaaattcaagacctgagtataatccacagtatgacaaggccagtttttagtttaagaaagggatgatttttgctactgttaaagttttcagaaaggccttagggaatatttttttgctaatgacaaggacttcaagtacattagtaatgacaaaagaagagtgagggccacatgtaaaggcaatggttgtgagtggctgatttttgcatctagggttaattcaggtgagtcaacttttcaagtgaaaaagctagaaaacacacacacttgtggaatagtcttggacaacaggcttgcaaatcagatttcttggccagacatttcctagacagcttcagattaaacccaaatttctacttctcagccttcaaggagatggcgtcaaacactaaattttctagggtcagcaaatggacattttacagggctaagaacattcctttagagatgttggaaggatctgtggctaaccagtatgctattctggatgactattgcaagaaaatactggtaaccaatcctggtagtactgccaagatccagactaagttggaaggtgatcaaagggtgtttgaaagggtgtatatttgctcaaaagcttgcaaggatgggttcagaaatgggtgtaggcctctgatttgtctggatggcacattcttgaaaggatattgcaagggtttgttgctggttgttgttgggatagatcctaagaatgccatctaccctattgcctatgctatatgtgagaaggaaacaactgattcatggacttgattttgtgaactgctaaaccaagatctagacaatgagaggacagatttgtacacactaatgagtgacaagcagaaaggtttggagaatgatgttgggagggttttcacaggttctgttgtaaggcattgtgtcaggcaccttcattccaattttaagaaggaccatcctggtttgttgatgaagcagatgctgtgggcagctgcaagagcaaccactataccagagttt

SEQ ID NO: 84779 - DNA, 676 bp, Cannabis sativa
tcttcttatcccctgcacctccttcggtcattatcgaacctactgatgtagcctactctctcccctctcaaggttttattgaaattaaaataggatataccgtagactatatagtgtatatgattgcttaatctgacatgaggagcttctttttcaatgttactcgagcttattccttcttatttaaccaacttatatgtccctttctccattcaggtttcatcgacttatgtcctcttcttgcttcgaccattccctatcacactgtgttttctctttgtctcttcttccattctcttccatgtttcatctatcaatttcttcccctattctcatcccatggacgacctctctaataccctaacaagagccctaaaccttacggaaatacaaactcaaatctattccttatctgaacagcctgaggaagcctctgaggaatctcaggaggaaccttctgcctttcttgccgtcaaacttctcactactcgccatttcaatgtcaatgctttcaaccgacgccttcaccaaatgtggcttgaacatttttccattaacattgtggaaaaaactccaaacttttacactgtttaattcggttgctttggtgatcgaaggcgtgtcttgattggccaaccgtggcactttgactacaaacttatagtcatgacccctc

SEQ ID NO: 84780 - DNA, 929 bp, Cannabis sativa
gtccaaagcaagaggatcctatccaattgcgaatagacgagttggaggataagttcaggagatatcaagtaggggaattagggagacaatctggatacgactcaggcaaggagcttgagccgtaccatccagatatcatgaatactccttttcccctggcatttagaaaccctcatgtcttatcgtatgatggaactaccgatccggtctcgcatttgaataacttcaacacaataatgcgagctatagtaatgtgacaaacaatttacgttgtattttatttcccgagcagcaagcagttggtttaacaaatttactcgtcattccataactttctagaaacagctgtccaatggcttcaagaaacaattctaggccgcaagggagacgactcgaggtgcctcgctaaccaacataaaacaacagccaggcgagacacttaaggcatacttaagtcatttttgcgcggctgctgcaagggttagaaatttaaatgatagtacacaacttacagcccttcaggcggggatctctactgatccatcatccgctgggggcgaactgtggtgtttgattgccatgaatgattatataggaatatgaaaatgaatttggtggaatcaaatttaaattgtataaaaaaaattattataatttttctcatcgtattagaatgataattcattccactttaaaatagaatagtcattccaccaaaataataaaaaaatcattcattggaatgacatttcaatactttataagagcatctccaagtaatagtgtgccctgtgcaaaaaagtgacgcgaatttagcacatatcaaattttgtgtcaaatttggcacaacactataatgtacaatttgtatcataataaatatattttttttttattcacatttgcgtcatttatattattttattaga

SEQ ID NO: 84781 - DNA, 783 bp, Cannabis sativa
tttaatatagaaaaccctaaattatattttataaaaccttttgttaaatcatagaagaagaatatgaatatagataagcgaaagtattatctttaagctattgttagagattgctcaaaaggttatgatcttctaagaatatactatttctttaaaatattgtctttgatggggaatgagagaatacaaaaaaacttatggactactacctatttaaagacttatattataatgagttttgaatatttataatttggctcctcaaaaaattataaattaactatggtatttacacattattttcatgacaatttaatacccttttgatacccataacatatttggtcacttaattttgtatcacactttaaaatagcatatatattagacatatgtgcccacaataggatttttaatccaacaatctctcccttagacaacatatgttaccttacaaaagtataaccttatgaactcaaaatttgctattatgtaaaggtattcacagcaatttcgtccatcaactatacccatataggatcaaaacggttttcgtcataacaatcatgactaaacccatcaatggttacatatacaaatatactcaaatgacatagatcaatcatggatgtgtgacatagaaattacatgcaatgaaaccgaacatgattatttccaataggtcctccttaaaccaaagtgaggtcaaacttaaacataacaaaacagagtgaataaactgaaaactttatttctgatcagaaaataaccaaatacataaat

SEQ ID NO: 84782 - DNA, 863 bp, Cannabis sativa
agtttcttttgccaagaataataaaatcggaatagaatttgattttatgatggacatgagtttgtcacgcatctgttgaatcttgtttgtcaacttttcaatgatcgtgttttgtgattgttgtttacgcattggcttagtgcatttgatttatttttctacctattttaagatatagttttgggcaatcatatttttcatttgccaattcaatacttcttctactacggagaccttttgttgagtcccatccgcattcctagttgtaagattttgtatttttggctggtgggaagtggtaccttactcttcattttttttcgaacttcttgagaggagagaaatgtacaatgcaagtattgggggttatcatgtttgtgttaggaagtgatcgaactgatggttgagcaactgatgctagaaatttttctccatgcttcttcatccactttgcttgttttttgtaacaaggcaagactatttgtggttgtgaagctattgaagaatcatctgaatcccatctggtgggttctggtgtaggttgattgtagctttttagtgcaaagtatctgactatatagtaaaatttttcagatgattggcctaatagaccgatgattttgtcgcccttttctagcttttgcttgagtcgctttcctggagtgggacatcgtgagggctcatcatcttctagaccacttttgcaattataaacatcccactatttatgctcgtttgaggattcaaaagcataaatttacttttcttaggaatcaaagtacatgatctttgcatctgttggctggatgagtgtgatgacatattaggtgcgaaaacaactaagtggttttgttgtggtagga

SEQ ID NO: 84783 - DNA, 1479 bp, Cannabis sativa
  modified_base (912)..(920): a, c, t, g, unknown or other
attcgtttctgatagatattcaatcaaagcatttcttaattctactcactaacatatactcatctcgataccttgtaaatctttacttgttaacacatttctttttctcaataatctctggaactactatcgattctacatcctaatatgtatctttttagcgtacattgtcctcactcgtacgcttttcgagataatttcctggaagatttctcatcttgagattaccctaagttaagtatgcttaactttaaggtaagctcatggtgggttatcagaaagtagatgcttctttgttgttcctaattgtatttcttgctctcattcttttgttaataaatttaatttctatcacccccttcattatcgtcttacaattcctcatctgttttgttcacttaactatgacgaatttccaccttattatcaaattgaatctttctaatctctacttatcttgcatcaattttctttgaactagcacaacttttaaattttccaatcaattacagttagccacccataactaaattagaaagactcatttcctgaattctcaactgataacaattaatcagagatcattccttgatctcgaagtttcatttctgtatttagtagaagtcttaaaatatttttaaacacatcaaaagacatacattcctcaagtatattctctattttattgataattccttggcatgaactaccatgacaacttatagtgagtcccccgttgatgatgctaattcataaaacgtatatttttcccatcattaccactaaggttttactccctagttcatacgccagcataccattgctcactttcaatcatcacatctttctacttggttaacccctctataacttattttacactcaactatatagctcgttatttaataaacnnnnnnnnntgtgatccaacattcaccaaccacttgaatacatgcccattaaattgcatcgcagtttatatgctttttccattctgggtgagcatacctttttatcattgcttaataagacaatcttttcttgcaatttcaatagtcacctcgtataccaaattgaacatctggtcaaatataaaagcattctccatcattaccatatcaccatgagcaattcaaggaatcttctttacctcagtgataccaccactctccctaatgttcggttatttgataccatttgtaacgttcctgcttcaagcctccattggcccttactcccatagaatggtggctcttatacacgagtatgtcactttggatgcttcatggaatgatgaatgaccctttaggtcaacttgagtgttcccaatgtgctttgttttgactcacatgcttcttggaaaacttccaaggaagtcacccttcctgaatgaaatcactccaggtcaaggacactgagctatggagttctttcatgatgggctaccgaaagaaatatacgccttgttaatataggtag

SEQ ID NO: 84784 - DNA, 894 bp, Cannabis sativa
acaaatacctttccaaatacatgaagaattcgagggacaaccggcttccataaatgatgtggtgggatagtagctattctttaggacccgagctaggagtgagtaaggattttgggtaagtctccatccttgtttggccaaaagtgcttgattaaactccgttagactcctaaagccgagacccccttcttctttaggcttgcaaagtttagcccaagatccccaatgaagcttcttgttttcctttgtgtctccccaccaaaagtttgctgccaatgtgtggagatttttgatgagcttttcgggaagacgaaaatagctcattgtgtaactcggaattgcttgtacaatagctttaataagaatttcccggcctgcttgagaaaacattgaactcttccatcctttgagtttattccaaaccttatctttgataacatcaaagacctccttcttccttttcccaacaaagcttggtaatcccaagtatttggcatggttcgagacaaggcgaactcccaatctattagcaagctcatgtccttgttgaggagagatccgtttccccatacaaatttccaatttctctagattaatttgttgccccgaaagtctagagtatctttgcaacacaagcttcatagtatcacattcacttgttttggcattgaggaacataaagctatcgtcggcaaagaataaatgagaaaccttgactctatcttttccaaactgaactccattaagttggccatctctctcggcttcatgtatgagacaagataatccctccgaacaaagtaagaagagatagggagatagtaacattattgttctattcgtcatcttaattttattagactaatgtattattagcatggagtattcttctac

SEQ ID NO: 84785 - DNA, 1339 bp, Cannabis sativa
ttcttttggtatttatcccttccagtgtatgccatttggtatgtgtaatgcttgaactactattcagcgatgcatgatgagtatctttagtgatatgatcgataattgtatagaggtatatatggatggtttggtagttttcagtgattcatttgaataaagccttctcaatttagaatctgtgctcaaacgatgtaaagagaaaggcttaatactcaactaggaaaagtgtcatttcatggtgccatctggtatagtcttggggcatgttgtttcacaaagaggaattgaagttgatcaattcaagattgaactcatatcaaagtcgccctcccccaatactataaaggatgttcgatctttatgatgaattctaaattctataggaggttcatccagaatttctcgatgacaactcatcatttgtcgaaccacttcgcaaaatatgtggtgttcaactggacaccctagtgtgaagaatctttccaaacacttgtcaccaaactcacttccgcccctatcattctgccactggattggaacttgccgttcgagatcatgtgtgatgctaccaattacgttataggggccgtccttggtcaacgaagggaagggaagccctttgtcgtgcactatgcaagtagaactcttaatagtgctcaaatgagctattccactgctaagaaagagttgcttgccatagtattcgcactcgacaagtttcgttcgtatttgattgattcccttatcacggtcttcactgaccattctccccttaagtacctcctttctaaaaaggatgttaaggcacacttaattatgtgtattattttgttacaagaatttgacttgaccattaaggataagaaaggagttgaaaacgtggtagcagaccagttatttcgtcttgagttttttgattctgttgattggccctaccattcgagatgacttccttaatgaacatttctatgtcgttactaaattaccatggtccgctcatattgttaattacttagtgactggtgagcagcctgcttcctggaatgcacaagataaacgtaaatttttggtcaaggttcgtaactttgactgggaggatccatatcatcttttcaagtactgccctgaccaaatgagatgttgcattccaaatgatgaaatttttagtgtcttgaactttttctacaacgaagcatgtggtggtaatttttctatgaaaaagactgccaaaaaaatcttacagtgtgctctatattggcccactttgttcaaagacactaacaatttctgtcgatcttgtgaaaggtgccgaaaattaggtgcactgtcccgacga

SEQ ID NO: 84786 - DNA, 561 bp, Cannabis sativa
gattaagtatgtttttgatacttccagggtgtcttgaaaaggtagaatatttgcttcatagatcgttgcttgcacttggttctcctatatttttattagagattaaaaaaaaaaagttacacagtagaatttcgtaggaaaaactacaaaatgtgaaaaacctttcatatataaaataaaatatgaaaaacaaaaaaaaattatcacatgagcaaaacaaattagagaaagtgataatatacttgtggatgaataagtgtcatattcatgtatttggttggactatgtattgctgtttttgtgtttgatttttcagcaacaataactttggcagtccaattcatttctccaagagaaatctctggtataagtttataaagttctgccattgcaattcttttcctgcaacatacatcaatatgttttacatagaaaatataaaatatataatattgagattttttttgaaaaaaaataaacataagttagcaaatatctttaccttctgttttgaagacaagttttgtctggacaatcacaagtataggagagttcacgttt

SEQ ID NO: 84787 - DNA, 670 bp, Cannabis sativa
  modified_base (213)..(233): a, c, t, g, unknown or other
  modified_base (541)..(544): a, c, t, g, unknown or other
gatgactcatgatgcgaaggctgaattcgctaagtgttgagcgctttgcacggattgctgaatatctttttctggatgtgccagcgaggcatcctactaagtctatcttcccgggtagatgcttcaagtggggtccacgtgtcaccattcttgtgaggccacgttagactacaaaatttgggataacagattgcaacggaatataatgactcnnnnnnnnnnnnnnnnnnnnnccttgatttctttctgtagcagagaattatcaagatctgaacctggatctctttctctccttcaagttttgttaccaccgtcttactcactatgattgagcatgacttgctatgtgtgggcacgacacttgttcacttaagattcgaatggtgaagaacaatgaaagaggttagaaaacactaaggaaggaactctctcatcaagtttggttgaatagtcaagttgacattaattggatgagtgagagtaccatgttccttttattgtgtttcaaatagagcttagggttgaattatatggattaaannnnaataaaatattgggcaaaaatacctaagtgcgtccactataatggaccactttctagttataattttgccacatttttttcaaccagttattcttcttttcaataatactatattttccaattcaa

SEQ ID NO: 84788 - DNA, 676 bp, Cannabis sativa
tataaagtgagttgtattttggtaatttagcactaatttgacacattgttgaagttggtgtaggattattattattggtagttagtttaatttgaacatcatattgaaaagagaaataccaaaagacactaataatatttaatactcttcaaaatattatattattatttgtaaaattaaatatgagatcttataaaatttaatataataatatttataaaatatcacaaacaaattacaaccacttctaagtaatactaaacgctactactcttgccaaataaaaatgatctatggtaaaagtattacaacatcctaaagctactatattataagaaaccagccaaccctagcctagagagagctggcattctagaagaactagtacacaaatttatagaatgtcttttcatatcaatttcacttttgtgtcaatttcgatcattttaatataccaaacaaaatctgccaagatttacaaaatgcttcaagttatttttatttttaccatgggcacgatataattggtacactagaggtgcgttcttttcggccctcttatattagagaaagattctctcaatgctctaacgcccatatcgaatatgaaccgaactgtttcacgacattctaaatccagctcatgtaacgttttaatgggtgaacagtccaaccc

SEQ ID NO: 84789 - DNA, 1864 bp, Cannabis sativa
  modified_base (1774)..(1774): a, c, t, g, unknown or other
  modified_base (1821)..(1823): a, c, t, g, unknown or other
ataaccaccggcaagctgctatcccctccctgagttgagtgtaaccaacaaaccactcatgttaccaatatctgttcctgctactcggcttcaaaagtcccatgacacagtcaccaagtaagttttagtacagtggttattgaacaacccaaaaaacgctacacgagaacattttgattcgttggtggacatgtacaagctgcataaccttgaggacaaggttagtttaggtgatgggagtaatgagtgaagctaacttaccaaggccagttcagttagatcccaaagaaatacaaaagagagtggaagattgggattgtggctcatccaaactcatagaagcctctactcccaacaacagaacatgagaacggaatgctcctagcaccagagagcgagccaagccacgttcattgaggggtttcttaatgaagcttggatgttagtgcgtgtatgctgaattttttgttagaaatttgttaagtttttccattaagtatataagaggattttgtaatttttttagagattatcatgaatgaattgagcagtagaattgtatttttttttttgaagattttccttgtcacgaaaaaggcatgtcctaacagtgtggataaatatatatttcttattaaataaatgcctgtgtaatagaacgtgttgtgcttttactggttattttttttaaaaaaaatgcaaaatagaaactattaactactaaaaaaattattcagattaaaaaaactactgaagaaaatacaatctaaacatttgcattgaaaaaaatagctttaaaactttttaaaacaatatattagttcagaatgtacagtgaagtgttatttctctgcataaatataattaaatgagattgtgtatatttattctactaaaacttcctatcttatatttcgtccacacggaatcaacaaaatcttcattgaataaagaaaaataattcaaagttcaactcattatctatacacaaaaagtataatagaatttgtcaccctaaatagttcgaagacctatttataaatataccattttctaaacgatgagggagagatacaccaactctttctcttttctttgttgatacaaaaattattcatgttttatattagaaagatggttggcatattttattctcatcatcctcctcactttcaaaacaacactaaactaaacaaattctgaagacttattaaacttgtagaaaaagctaacaaattttccaaatatatgattaacattcattaacacaaaagacttattcgtattttctaaattatcttactataaaattagatacatagagtaatacaatgttgtcaagtttcctctaaaattttaaatgtaagtataattatttgatatatatactaattaatttggacttcatcacactacaaaaaactgctaattttagtgacaactttttagttacaacataatttttatgaataaatgtaacttttagtcacaacaaaatgttatttgtgactaaaacatagtctttagatacaagttgtcactaatttagttttagtcgcaacaagtattgtgactaaaaatacatttagccacaacaaattgtaatttttgtgactaatacttttttacgacggacctttcagtcacaacataggattaataaattataattagtcacaattttttcacttttaatctcaagttttgttgtgaccaaaagtaagattttttgtagtgtcaacatctttaaaggattgttggaaattattttacnaggatcttagatctactcacacgtatgttgattaacaccctaaatannnacttctaaaacgattacgaaataaacacatataaaatatta

SEQ ID NO: 84790 - DNA, 719 bp, Cannabis sativa
aataagatttaaataattatttactgcgcgtataaaataaaaagtcagttactcatgcaacaaaatatataaattttatttttggtattataaactactcaattttttaaaaaaaaatttacagatagtcccaaataactgtaacgtacatgatttaaaaaaaaaaatcttaaaagttctttcatatgccgaaataaatatgtggtctaccaaaacatcactttagattaccctatagctctatatataggttatttaagattttcgtgcccgaactatgactcatatattgttgtgtcccatgaactttttaacctgttaaaaatggtcacttaattattcacaatgctataaattagtcattctgtcaagttttgtcacacgttataaataaaatgatgacatggctgcttagttgtcacgtcagtgccatgtcaatgcacatcagtacactctctaaagtgatgttttggtagatcccatatttgtttcggtatataaaagaactttttagtttcttagttttctttttataaatgtgatatagttatttaagattatttgtaaatttttaaacatttctgagtattttacaatatccaaaataaaatttacatattttgttgtacgtgagattattatttttttatatgtatggtaagtaattatttaaaccttaatactataaattattaaaaattttctaaatatctacaaat

SEQ ID NO: 84791 - DNA, 1354 bp, Cannabis sativa
aacttttgagtttaaataataaatagtgttactgaaaaacctctttaaattttttttaaaaaaataaagaatgaaagactataatatgccatgtttattgaaaaaagaatccactaacccatttttgatatatcagcaaggagagagagagagagaaaatgtaacaaaaaagtaagagaaattgggaaaaatctcatgttttaatctcggtacgtgtattaaaataatacaaaaagttttaacggtatttgaaacaataaaatagttggagataatttcataaataattttgaattgacgttgggatgtgtaattaatcctaatataattggataatatccccaatattaggcaaaacttaatcaataaaagtaagtgggcaatcattacatattaggccgccaaaactatttcggctaccttccccgttccactgaaaatattagctaaacttggctcacggcttgcatcagaattatatgatacaaaaccaattttgcttccttaattatttataattatatcacccaattaagtcctcctaatctctcaatatctaacacatctaattatttgtagagtaaataagttttgtctttcccaactatcactaaaaaaaaaatttacagacaatttttttttctcaaaaaaaaaaaaaatatacatataatttttaatcataacaaaaaattatttatgattaaaacatagttactagatacaaattgttactaatgtaaattttattgtgactaaaaaacatatgtagttataataaattgtgatttttgtgattaatacttttagatacgaacctttcaattacaatataggaatgataatttataattagttacaattttttttttttatttttagtcacaaattttatcgtcgctaacaataaaattttttatagtgtataattcttttagagttttgttctttatttattttttttttgcaaaattttctataaaaattattacaaatatgtatatataatgacataaatacacattttatacatacacatttatatatacacatacataaaacatatatgtatatactaaaaaaaataaatacaaactatacatgaaactgtatttggttcttgatcatgaagacatgaatcacacaagaatttaagaaagtaaattgggcgaaagggtatccaactatctaatatcctactaaatcattgttttgaaacccatacaaattatttcataaactggcggcagtaagaaaattaaggtactgtttggtaacactttcgttttttaattttttaatcacaaaatgaaagtaaaattttagtttttaaaaaaattatttttgaaaaacaaaa

SEQ ID NO: 84792 - DNA, 1850 bp, Cannabis sativa
ttaataattttattcctttcacaacactcagtaaataattcaccatcaaactgagttccattgtcagatactattttaattggaatgccaaacatgcaattgatgttcttgataacaaaatcgagaacttttttgtaggttatggaaactagaggttcggcctctatccactttgtgaagaagtcgactgccacaactgcatactttgctcctcctcgccctgtgggtaatgccccaattggatcaatcccccatattactaatgggtatagcaagatcatcattctcaactcagtaggtgctacgcgaggtatatgtgaaaacctttgacatttatcgcatctcttaacgaaatcatgtgtgtctttattgattgttggccagtaatattcttgacagataatcttcttggataggctctgccaactggcatgatctccacaaaagctctcgtgaatctctttgattatttcatttgcttctattggtaacacgcatcgtaagaaaggcatggaataacccctcttgtataatctcccctcaaccattgtgtagcgaggtatcgagtataagagtttgtgtgcctttgttttgtctataggaagttctccactagatacttgacaattagtgtcatccatgttggtgaagtatctatcatctcgattttttcctcttcacatatgcttgtatcgtctaagacctcaaccaataccaaatttatctaatcaagatcgaattgagatgctaattttgctagtacatctgtattagagttttgttctctcagaattttctcaattttaaaataattaaaaattttcaagttcttttgaactttctctaaatatttttcatctttaggctttttgcttggtattctcccaagacttaatttacaattagctgcgagtcactatagcatgtaatatttttgacttttagtgcctcaactatttttaaacctaccaacaaggcctcgtataatcctcgttgttcgaagtatcaaactggaatctcagtgcgtagtggaatttgaagttatctggcgacatcattataactcctgctcccgagccattctcatttgaagccccatcaacatatagtttccatgtttccgtctcacactcaacatcagggtcttcttttgcgtatattccttctaatagaaagtcatccaaagcttatcctttgattgacactctcgagtgataagttacgtcaaattgtcccaactcaattgatcactttatcaatcttcctgaagcatcagcctttgataaaactttccttaatggctaatttgttaagaatttaattagatgtgcctggaaatatggtcgtaatttgcaagatggatgaattaaatatagtgtaagtttttctagaggtggatatctcgactctacccccagtaaccttttactgacatagtaaacaggttgtcggtgctcaccttcttctcgcactaaagctgcactaatggcatgcttcgagacagccaaataaaggtataaagtttctcaagttataggtttggcaaaaattgggggtgttgataaatgtttctttatgccattaaatgcttcctcacattttcctgtccatccgaatttcttattgccttgtaaaacattagaaaatggaaggcatttatctgttgagtgctgccatccttcttatcaaagccaaacttcctttggcttcgttggtgaaggcatcttgattaaagcctttattttctccaagtcagcttcaattcctcttgtattcactatgaaacttaaaaactttcctaaggaaaccccaaaacaacattttttagggttaagcttcatgtcatactt

SEQ ID NO: 84793 - DNA, 932 bp, Cannabis sativa
gccaaccctaaaatttggtgggctataggaaatttttttgttgagcttttatttagtgaaaaaatagtattttctaaaattaataaaaaaaatgtgtaattttaaaaagagataagtttattttggtctcctgagctaggtgggccctaggtataagcatagcccgtctaaacccaatactgaattgcactaataatattattttgaaagagccaaattttttaaatgtttgaacgggccatttaaaaaattagaaaaaaagaaaaaaaaacatttaaaagagaaatgctaaatattaccctaggatggggcttccatggaggtggaggttgtttttttagttgatttagatctaagactcagattctatttttagtttaatttttgttttgtttttttttttggtgatgatttagataagttgtgatggtgggttgtgacaatggtgattgaggtggaagtagtaatggagttagggctccacgaaaagaaagaggaagaagaagataaaaaaggaaaagaaaaacaaaagagaaagagatagaattttttttcttctaattttttaaaatttaaaatatttttaattattttttataatatttaagttgttaatattaggtagatcgtgtacatttctctacgtggcagtttactttaacactattgaattttgggagttttaccctgaaagtttagtacaatgttaatagattgatagtgctaaatccaaaaatttaagtagtttggccacaaagtacttataaagttattaaaaaaataaaatgctaaaaattattccattttgatattgatattattaatataatttaatatcaaattttactaaaaatttattttaataatgattaaaaacaattaattatttataatgttgaaataaagtcgcaatactcgaataattgatatat

SEQ ID NO: 84794 - DNA, 3406 bp, Cannabis sativa
  modified_base (26)..(29): a, c, t, g, unknown or other
acctaaacctagtagttgcctataannnnaaagtgatggctcacaccaaaagagagtttttcagtaattcaggaaactgtccttcagaaaattgagccacttactttctctctatagccgacccctctctctctctcttttcctcttccaatttcgtaataccctagtgatagagaagtgcccacactgaataagaagctttccatatatatttaaaatttatttttcctcttttatatgaagtcactcctttttatgagtcactcttttttatgagcttttgatatacttatctttgatgttgattttttttttctagttaaagaatacacagaattggtttgcataaaactcagctcaaaaggaggctgagaagatcattttccatttatactctcacaggtattacaagcactaatagcaaggtgacaagtggccctaatgctgcagcaaaggggacaagaaaagcaaaaagaataaagtgcagaaaactatgctaaccgactctgacaattacacaaaacagagtactaacactaattagagattaattaactttcttaacatttctgtgtttggctcttcaatgctagttttgcctcctgttttggaggtacattctatcaaaaaaagaaaaagaaaagaaaaaagaaaaaaactagctagctctaagtgttatttttcagctgaattttgttaattagtttgcctttcagttaagtattgtgttataacaaaaaaagaatgtatatatatatatatacttttaatttaagattatatacaaattaaagtgttagccactcttataaattgttacaagcagaaaggagatattcacgtaggtttgacgagtcacgatcgacgactcaccctctcgcatatataatatatatcagatcaaaaggtgtacataacatatatatatatatatatatagatgggaccagtttgaatttaaacacaggaaattctatgtatattatatgcaagttggcgtagtcttaattagtactcatgtgggtgcgcgcactcacaaaatatattcaatctccttcaacacccaatgagctgcccatgttcccatgctttatatatatatatatatatatatatgcccattattattttctattttttatttttataataacttggaacttttccatattccttggcctccagccatatacacctttgtataattatttcctgacaacacttctcttctcttattattattaaagctcattcagggtttttataaccaaacagtagtactttgcgttcccctttccttttcttattaatttttgaattaataatatatatatatttgaaaatatgtaatcgaattaatgaatttattttatggtgttcaatagagaagagaagaatcttgtctcaaatccctgtcattcaatagaaaccctaaaagagatgtttgtatctttgacattggtataggctgctgcatgaaataggcttcaatggtcgacacgtcgatctatggtactctttcttttgcgatgtaaagctagctagattcttttttaatatacatatatatcactttactataattaatgggttccaaccaacattaatgacatgcagtatataagcttttttaatattattatatacataatatatagtaattctttattaattaacttttaccaactctctgtatattcatgatcataaactatatatataggttatatagtttgataaaccaaattgctattaacaaaattttctagtacgtacggtaaaaattcttaaattataaagtaatgactccatttaatctatatacgtactctagcttctacttttatggcatatactagttagctagagaactatgaagattttaaaatactgacaaaaaaacaactataatatttttatatatatataaattatagaaagtagaacagctatacttccactaactagatataaattattgtttgataaatctgggatttggcagttaaaatgtagtttgaggatttaagcacgatactaataaaataataattaagatgtagtgatttactttgttcttatatctatatagctagaaattaatcattaactatagatttatttttgttaaataaaatcattaattagattaattactactagatatagtgatcacaaaactttctctttctctttctcttctttttgataataaatataataataataataataaatggtcagcgccatcgtgcacaacttttccaagaaggtctctcaatattattgaattatgccatcgtaaatatatacagtttgaatcaaagggaatataaattaatataaagatatcatgagagatctaattcctttttctctgcattaataattgcttttttgatcaaaaattttgacgcagatatatatatatatattctcttagtcattgtcatgaataaacttcatctatagatcagtatatatgtatatgtacaagtttattttagaatatatatatatatatattaatatgctattttttgcaacttcttttctattccagcaaaagaacttatacagagattaagtatacgtacatacatatgattcatatgatacagtatcacatgtatatatataagcacacactaactaatataagaccagctttaatgttaactttgtcattaattagacaaatacaatgatacgaaaaattggtttgaagagaacatgtgtcatgtgtgactgatcaatacaagtactttagtcccaaacgacaagtacctataagttttaagtctttattatttttatttttcagttataaagaagtttgattgttaattaataaagtacttaattatccaacttgttcagccctataggcataaaacataaaacaatctgattgcgaatatcttaccatgcacatattcctcctatattaaaaagtatttttattagctcgttctattatgtttatttatatataaaaatagatgtgtacggaaaagttttaatagttatgttaacacgagaattttataataattagtataatatatttttaaaaggataatcctcatatactttcaaattttcaattatgatgttacttatatttcaaaaatttaagtattaattattactagtttcaaattgtgaattgtatatttttcataattaaatacaaacctatactgaaacagcaacaataattttaaatttatataattaaatatatacatagtagacgtacgtttcatttaagggattttttctataataagtattttagatttaaattttacatttttagcttagtaagggaaattaaacaaaaaaggagattcaaaagtttttttttttcaaaaatacctattgaatcttcttcctcctccgt

SEQ ID NO: 84795 - DNA, 594 bp, Cannabis sativa
  modified_base (560)..(566): a, c, t, g, unknown or other
aaagttaaaaaaataatatatgggataattttaaaagtattaatttaaaagatgcatgtagtgtaataatctaaaatgattttatttcttaaatatctcatgtatagaccatttctaattcaaatgtgtcaaatataatcacattcaaatattatgtatttaattatcatgtatttatataatattgtgttaaatttttatttgttcaaaaatattatatctatgttatattaaatatggctataaaatataaagtattttttttaaatattacaatttaaatttaaacttattacacaaatctcttataaatgtgcctatatatatattttaacattacaattcaaatttaaactcatatcacatatttaaaaaatataaatgtattattattttatttacccaattcatatatctaaaaaaagatatttatagtattgtttttctttaaaaacagaatataaaatatatgtatgttttttaaaaaattactattgtaatgtcgttacttatgatagttattaaacaaatatagttttattatttttaaaaaaaaaaannnnnnnatatatatatatatatgatatttctaaa

SEQ ID NO: 84796 - DNA, 2430 bp, Cannabis sativa
ttgaacttaggcaatcatgccaagttagatctgtacaagagggtgagttcagttgtttcccctgcatgcttttcaaggagtgtcccagggacaagtggcgagactagtaccagtggctcgactcgtatgggtgctggagtctggagcacatcagtgcaggaaccagacttcctcttcgagactacttcaaggactacataaatcaccttggagtttccccattctagctgactcccatctcctacaggattctcgctagtttgaaagtcttgtacaaaattctaaactgggggtgtcccacaccagtagagattgagtatctttactcagttaaggctgttccgttgaggaagaacatcgcagtgggcttatactacctcgatactcattctagcgagcctaaaatcattgtggacttgccaaatgaagtatccttcaaggacaactttttttggacatctggtctttcccccatcgacacaaccacctttcgcaaacttcgtaagtgattgtgtacctcttgctcatttatatcaatccttgtttttcaagtttttgaccaatgttttgtttgttttttatagctctcttgatgaggcctactcctacccttgagatggtcagtcggcacaggcacctgataactcttccctacagtcttcggtcacgcgagttccttttgaacgaggccaacctgcgatcggttggccttctcactaacaaggagtataattgtgattacaagattcccaagtattcttcttggcagcagataaccgttcccaatgaggataaggcctgggatcgcttggcttaagcacaatatcttccaaacactgcccctcgggaggccggtgaaggagcatcccgaggttatcaatttggttggtctcccacagtacttagggctgacgtagtacattagtcaccttccaagactcccgccttaattttcatacttgggattcccttctcgtggaccgcattgctcataagtttaacagctggtgtcctagattccacgtccaagttaactgtcatgagtcatattattgtatagctgagcaatacggtactatggaagataggggaggtcatatatatgcgagatgggatttagaaccaatcgagccttttgatatattcaagattacaggttgtagggattttagtggatactatggttcctctaccccttcgtctagtgataactcgccccctagtgactttggtaaatcccttaggtgaaaaattgcactcttacccttttttgtctacctttttaataattgtaacgctttgtcttgttttgcagacatgggttatgaagatatcatggatcgaaaagggaagaagagtgtaaccaaccttgggatccctacaactgctaaagtggttcctccgaagagccaaaggaaaaccaccgccaacaagaagaagtcactggccgagcccatcgatcttgaggtctctgacaacgagatccaagaacaagttcctcctccgatcgtttctgatgccaacattcctcgtcctgaggcaacccatgctaccacttcctcgagcaaggccattgagaccttgttggccgcagcgggagaggctgggtttgaatttgcccaggcgcatggagtttcttgctggtgcaaaattcaaactctccttccccctgattgggattttctcaatcttgggaatccaaaagagatgctttcgaggagcttggactataacttcttggtaagttggccttattattataattatattattttttttatacaacttttatattcatctgtttgcaattctccatgcttcttttgcttctttttcttcaaattgacgaatctctgagcggctcgaatacttggagggcgaagtccacaaattactatcccaatgcaaggttataattaagcaacaggacgatgcccaataggaaaacacccaccttaagcaagaagccgagaaatagaaagaggaagccgagaagaccatcacagcccaagccaatgaatttaagaagaagctcgcttaaaaagaagtcgaaaccagagaacgatgcaacaaggtcagtccttgcaccatatatcgggcctggatggcgaaccctaatatggacaccaacttcttggaggagaaagaagaggaaactttggctctttgcgagaaggccaagaaggaggaagaagatggcgaggtcgaggaagaagaagaagaaggtcaccatcccagcatgtagactttgtttttatttatctcccttttcttcttttttttttagaaaatggccttttggccaagacaatggtttgcccctggtagcactttttttgtaaagacagatatgcaaagttggatggccaactttgcttcttaatgcctcatacttttaagtttaaactttaatatgtggatgtttgcttg

SEQ ID NO: 84797 - DNA, 1146 bp, Cannabis sativa
gtcaatcattgatgttcacgtcacgggagaaagtttccaggtcaacaaagtccctattatattttttcaacagttaaatcatttaactatgatatttataatgaaattctattttttttttacaaaaactaaacttcgacccgttctaaaataatttttgattaattaattatttctttttaaagtgacatctataattatttttttttttttttgcaataatcgtttgacccatcttcctcccttattaaaaaaaaaatccctaatttaaaaaattaaggtttcagcctgttccaacctaacatcatgtcaatttcgagttcgatgcaatctcctacatctctgcgctaccacaaacccattcctccaattcaccatgtacaattagattctctttggttttagtgatttgcttgttatttttctactcttatgcttatttgtgaaaaaaataagaaacaatcttagttaattgataatctactttagtaatttttttacgatctctagattgatgaagataattttaatcagcaaaaataatttaatatttaatttaataattgttattacattttaaactattttttatttaattttctaaaactttcttaaaaaaaaattaaataacttgaaccaatatgagagtgaaacactgatttgacactaaaggtattgtaaataagatcgagtgtaaaattacaactaattaaaggtcattcttactatttttttattaattaaggttatgtgtgtaataattttaaattataaagattttttgtttacaaatatttcaattatttaagttaaaaaaaattaattactaaaagatttttacttagtaacaaattgaataaaattaatcaataattattagtaatttaactataaatataattaattttaattaagtttttataagaaaataaaatattaggttacaagttatttattatttatctatttttttatttctaaattaatcacaaacattcaataatgatctaatgactaaaaataaatataaccacgatggttattaatttaacaatttaaacgtcctctataatatatatatatgggtatgctcttaatgggtattactcatgtatgggtattttattcttgaccattggatcaaat

SEQ ID NO: 84798 - DNA, 739 bp, Cannabis sativa
gttcaagttccgattgagaatcttgattgataaaattttatcaatatatgaaacgctaaggaataaagtttcgagcgatgtaaggtcgaatccgtttgcaacctccacccgtttttcattttttttttttttattttgcaatgatttactttcattgttcaatatcataggaatttttgggtttaagaatggaattaaaaaattgcaataattaacttatcaatcgtaggaaaaaaaaagttctcaatcaggacaaaaaaaaaagttcacaatcgtagaaaaaaaaaagatttttatttatttttaaatttaaaaataagattgaaaattttcaatcgttaactcttcgttagtttttattaaaaaaaaaacgttaaaaaaaattttaaataaagaattatgttatatagctacaatttatataaaatagaatagatatacagtaaattaaattttactttttacatacaattttttttctctttttaaaattttttatcttaatttgttattgaaaatataaaacaataataacttatcttattatgttgttggttaagtaaaaataatttatattttaataaatattaaataatttaaaattaataaagtaattaatacaaaataactcatttaatatgcacattgaattaaatttaacctcttgtgtagattaaattggattcaaaatatgaaatttacatttggtgggaataaaatagtacggattaaattaaat

SEQ ID NO: 84799 - DNA, 852 bp, Cannabis sativa
aaaaaaaaaaaaaaaaaagagtcccctcaaaataaaaaatcatgttgaatacacgtgcggagcacgtgtgcctcacactagttagtactaaagatttgtatatggtactacatatttttatttaataattattagagaaattatgtaaccacttgtagaatgccacctcataatgatattaggcacgaataggcactacgtgtgcctaataacaatacttaatgaaataaaaccaaaaatagatgacagtagtataaatatcaatattaataattgtttaccgaaatttttagaaactcaatataataaaataagatcaaatggagataaagattttaacgtggttcggatattaatgaatcatagtctacgagtcaattgtattgggctaagtagccttgaagtattacaccaatattcttgactagcttgagaaccttagttttttgctatagtgtttgagtaatgcatttccaaccctttgcaagaagggatgatgtagtatttataagttaggatccgggtaagggtatacctggactcgctagggtttgcatgtaatctattagggtaaatacatataatacattaacttagagctcacggattgaagcctaacccgtggggttgtgatattccgtatggttggggaccatttgatgtcgacaggtggcatgcgtgtgttgcctctgcatactgtagatgtcagagtattggtcgtcaaacaaaggatatgctccccttggtggtgtgcgcactcttatggtctgacgtaggggacaaagccttaaaattatgggattcggtgttagagaattgccacatcagattaaccttctgtgacgtctctta

SEQ ID NO: 84800 - DNA, 1076 bp, Cannabis sativa
tgttgttgaactaggaagggagtacagcctttgtgaagatgtcagctaggttgttgtgagaggagacatgcatcagttggagagagccttgttggaccttttctcaaatgaagtgacagtcgatttctacatattttgtgcgttcatggtagacaggattctcacttatgtggattgcagccgtattgtcacagtacatcttaggtggtgtggaaaagggaacaccaaaatctttgagaatggcaaggatccaagtcaattcagatgttgcgtacgttttccatagcacggtattcagcttcaacagaggattgagatacaacttttttatttctttgattttcatgagataaagggattaccaaggaaaatgcaataccctaaaaccgatctccttgtgtcttgacggctgccccaatcagcatcaccaaagaaagaaagttgaacattagctgatgagaggtttgcttctgcataagtagtgatattagggacactgtttgaaggaaagaaaatgtcttggcctggagtcttcttgagatattgtaagtctctataggctgcttgaagatggggaactcatggacaagatagaaattgactgagatgattgactgcatatgtgatatcgggccttgtaattgttaggtaaattagtttgccaatgaggctacgataggcagtcgggtctgtgagtgttgtacctttgtctcaactgagttcaggtttgtgtccataggtgcagaagttggcttggcacctatgtatcatgtatcagtgaataaattgtatggtgaaaggtcattgggagagagaaatgcctcctttagttcgaccaatttcaaggccaagaaagaaacgaagttttccaagatctttgagtttgaatttttggtcaagtgaattgtttaattgtgtgatgttggaaacattgttgctggcaataatgatatcatccccgtaaataaggatggctaagaaatttgatgttgtctgtttgataaacaatgagttaatagatttggattgtcggaagccatcttgaatgagagtggtactgagctttgagtaccact

SEQ ID NO: 84801 - DNA, 1662 bp, Cannabis sativa
gttcgacataacataccaccctcgaacatccatcaagggtcaagcctgggccgacttcttgatagaaggtataactctagaagaaactccgcctgttcaacaagatgtggaaacctggaagttatacgtggatggtgcatccaacgagcaaggttcaggtgtaggggtaatattaatatcaccacaaggccttaagtttcactatgctctgaggtttcaatttgacgcatcaaataacgaggccgagtgtgaagccttgatcgtcgaggcattgaaagtcaaaaacctcatctgccatagtgattcgaaattgattgtgaaccaggtcctcgggtaataccaggccaaaggcttaaaaatggcgaagtatttagagaaagttcaaaagaacttggaaagattcaattactttaagatcaaacaaatttcgagagaacagaactccaacgccgattccttggcaaaactggccttgtagagcgacttggatgaattgaacttggattcagtagaggtactaagcgagccaagcatatgtgaaatggaagacgtcaagatgatagacaactctcctacatggatgactcctattatcaattacttactcgacgggcaacttccaaatgacaaaaatgtggcatgaaaattattgtattcagtgcctcataacacaataatcaaaggtaaactatatagaagagggtattcgatgcccctacttcggtgttctccctgcagaagcgaataatatcatcagagagattcatgaaagctttttatggggatcatgcgggttggcaaagtctatccaaaaagatcattagacaaagatattactggccaataatcaataaggacacccatgagtttgtcaaaaaatgtgataattgtcagaggttttcacatatactttgcgtgctgcgaacaaaactaagaatgatgacgtcaccctacccattttctatatggggaattgacttaattggggtattacccactaggcgaggaggagccaagtatgcggttgtaacagttgacatcttcactaaatggacgggggccgagccccttgtttccataacctataagaaagtcctcgactttgtcatcaagaacattgtctgtaggtttggaattcccatgaagatagtacccgataatggaacccactttaatggcaacttgttcactgaattctgggagaggaacaaaattatcaaaaccttcttattagtatcgaggcctccgactaatggacaagtggaatctgttaataaaatcttaaaggatactattaagaagaagttagacgctgccaaaggtaggtgagtcgaagagctacctcaggtactctgggcccgtagaagtactgagaagacggcaacgggacacactcttttctcgctagcatttggcttagaggcgatgctgcttgttgaagtgatcatatcgactaaaagaagagagttttataaccaagaagaaaactaggaacttttaaaattgtccttggatctacttaaggaaaaacgaaatgactcgcaaataaccaacgcagcataccaacaacgagttacaagacacttcaacaaaagagtcaagaaaagactattcaatgttagagaattggtgctaaggcaagtatttgtaaatacgagagat

SEQ ID NO: 84802 - DNA, 788 bp, Cannabis sativa
caacaatatattcttacacatatatgcatatactaataaatatataccttacaaactatcttgcaactattttattatttcacttgtcaatattattattactttactctttttgtctaatattgttctactatattaattataaaaaaaagtccaactaatgttaaaaataaaaaaaaatagtatttttaaaaattaaattttatttcagcccataaattaattcgggctcagcccaataggacccgaaaccgaccacaaccaacccgaaaaacctgacccgaaacccgacgcacccgaaaactgggttcggttgtacatttccaagactcgatgcccgaaaacccgaactcgaaaccccgaaaactcgaaaacccgacccatgtgcacccctactcatgaatggttttctagcctgttaggattttttagcaaagtacttttttgatagaaaacttggtctatttcaatatgagcaccttagacctctttatatagtgtgtgtaatattaccatttaaaattcaaactgataacccctatgaatgttatggactcaaatgtaattcatgcacacaccataactcctataacattaagattttcaaattaagatgtgttttacacacttaatattggtgataaatgtggaggttactcatagtaacaagcaactttcccatatgttacaaaatgataaaaaaaaaaggtaaattgcggcataaatacctaatgttttagattttatacacttaaataccttatctttatttttggaggcaaaaatac

SEQ ID NO: 84803 - DNA, 1591 bp, Cannabis sativa
aaaaggaaattttaaatttacaccaatatatacattataaaactttattatattatatgtaaaacaaattatttacaaaaacttttacattttttttaactacatgaaatatattctcatttttatatacaaattatatacatagtaacaaatttgtatagactaaattgttattaattgattaatcttatcataatatgattttattatactaatctattatattaaacctttataatactattgtgataatataaataaaatatttattttttatttttttttattttaaataaaattacatataaattctttatacattactagtttataatttactttttatatattttaatttataataaatcataaataatgaataataaatatttattctttgataaattttttaattatatttatttttgtgaaaagttagaatatatacttaattttatgaaattatttatttaatttttaatattataaataataaaggtatatatttgtaaaaaaaatataatttttatagataaaatatatttataactaatcttttatttgtatatttttctcttcttaattttaaataaacacatatataagtattaggacattattttgtttattattttcataaactatgttattaaaacaaacatatatttataataaatcatactaaaacagataataatcatttatactataataaaaaatgtatatttattatattaaactatttatttagttttatttaaaatatgtttatttattttttaaaaaataacttatatttataataaatcgtatatcttataataaatacaatataaaataaacataaaacataataaatcacactaaaatggatcgtaaatatttatattataataaaaaatatttaatatttttatcgcgtaaaattgtttatgttttcttcttctaataaacatgttatattattattaaaaaaattccaaaatattattttaatgaacaattgcattattatattataaataataattataataatttaaacattcacagtaatattattataaataaaatatttttttagtataataattttataataatataaatatttacataaatatttatatgtttaaattttaagcgtttagattttagcactttaattaaaattaaaaataatcaacaaattcttaaataataaacataaatagatattatttattaaacatgtataatttttttacaattaaatttttagtaaatatgttattatatataattatcacaatatttaaattttagtatttattttttagtaatttaattaaaaattgaaataattaatattttctaaataaaaaacatacattgatattatttataacatggacattgtaattttattgtatatttttattttaaaagtgtttaattttaataaacatgttatagtaaggctattataatgtaaaagtggttatatttttcatttttgtaagaatgtatatttttaaataataaacatgatattgtttatcaaacatatatacattatacatttatttataaattaatttttttaaaaaaa

SEQ ID NO: 84804 - DNA, 543 bp, Cannabis sativa
tcttgattttcttccattgtaataatatctctaacattaatataagttgttatattgattttggttgcgatttagattgcttcattagttactatgtgattttcgtaaaaatgccaaaaaaaaaaccattttaaatttacatcagtcggtttagtcgggttataacatatttttaccaattaaataaaaatatcgagttgtaaaatatatttagttgtaacccgcccaattaaaaattagaaaaggtttaacccgtccaataatttcgtcggtttggtcgggttaacccatccaaactaatcttcatttttttggcttaattgcagcaaaacccctcaatacctttattttacttgcatttaacccccaaaactcaaattttgacggaaaaacccccaaaactcacgttctgttagcatttagtcatttccatctgttttcgacagttaactatcaaattgactgtccacgtgtacatagagtattgtccacatagacacaatgtacacatgacacactaatattggcccacataaataaata

SEQ ID NO: 84805 - DNA, 1210 bp, Cannabis sativa
tgaagtggccaaaacatataataataatattccaatgaggtcaactctcaattttgccaatttacttaacacttaacagtcaagtatttataaaaattctagaattataacttaaatattattaccgccaaaaattaaacttaagtatttatttacaactagaaagtaaacttaaatatatttatacttcaaattaattaccctaataataataattttaaagggaagaacactatgttcttattagaaattaaagaaaaatatatattatctaagaaaaaatcaatatataattatttttttctttctaaaatttggctcccatgtgcctagagcattccaacgaaattttgaccctgtaaaggataattctttaatgataatttaataaaaagattgtttattaaataaaatttgattttgctctagataagattagctattatacttagttgtgtgcatgtcatgccattgactataaaatatatatatatatatatatataaattgcataattttaaaaaggttgaattagtcgatctatatatcgttcaattctatagttttaattatatattataaagtacattaattaattaataaataaataatagttgcatgatgatgttaattagttaataatgaattaattatatattacctgatagggcaactaggtcagttgagtcgagacccttatccatgaatttggacttaagtacgtctagggttacaaaaggagatggaagcaagatgttggcacctgtctgatttgctattcttccatcccttctccctaataggttcgcccatcttggaccacctgcctatttttatatagccataattacatagaatattaatttttataaaaaaaaaatttatttatatttttacactattctatacatacaacaaaaaatttacataacagtaacacaaaaataatatccaaacaacattaaaaagaataaaaaataacatacaaataataaaaaattaataactaaattaacaagagtacaatataaaaatatatcagaatatcattttttcgtatataaaatcattaaaattgtaaaaatatttaaaattctgtaaaattatacttttataatttttttgttgtttttgtatatttgtgaaataatctctacaaatattctttcatttagttatataccacaatatatttattttaatatataat

SEQ ID NO: 84806 - DNA, 647 bp, Cannabis sativa
aaatgggattttatcttaaaattaattagtaataggaggagtagctcattcattttatatataataatttattttcactacataaataatgtaggactaattctaatacactctccttacatttttggactagaaagtatgggtatataacgaacgacctttaagagattacagagtcgaatgtgacatttaaaagaatcccacaagcgaaaggctaaatatcgaaaactttgtgggtgtacatgtcaaaaaatttgtagattatgaaacaggtcaaaaatccctaacattaaaaattgacaaacattggccgaaatgtcccaaataaagattaaaagggagacaacaaaagtatctttttggaccagcagtacttcgaacaaatgactttttgggccgatagtattttgggctcataacagatcacaagtggctttgataccatattaaaatttgggatgagatgaggagtatctcatttatcttatatatgacaattaatgatcaacttttactcacttgatatattaatctagacatgaattaagaaattaaaactttttatgcagttgtgttaggaatttttaaaggcatattttggtttttttttttttgaatggaagggtatattttgttagttttttgtt

SEQ ID NO: 84807 - DNA, 1553 bp, Cannabis sativa
agaatttggttacaaaattaataaatatgatttaataaataatttgaatttaaataattaattaaataaaatatttatcaatttttatttaaatataccgtataactaaaaactggtaagtattatttttgggaagtctaaaattgattaatcagattaatcttttctctccatcatcactatagaatagttctactcatgtgttgagaattcaacaagaactttgtatacactttatcccactagcccacactagtccttgtgtgtagtggaagattggaagactacagtgtgagttcttcaaagatacaacatacaaaaagaatcaaggataccctgataggcttcaaaaggtaaattttcttttcatcttattatttctgatttaatatatatatatggtgatcttgaggataaagtacaatgataatcagaaattattattccgctgcatacttgatttagtatcacaaaactaacagccgcaaccccaggcattctcagcttaatttcctcttctagagccatggctccagatttcggagccatggccccgattgattagtttttctaattttttccttcttggtctattcttgctcccgaacatcgccaaactcactaagacgaaaaataactttatttaagctcgcttttccataaatttagcttgtttctctttttttatatatatttttatcatattttctcgaaacaaaagaaaacaagcgtaaaattgaaccaaattgacataaaagacactaaaacatgctctaaactaccctaataaacgagtacaaatctcgtcgatcaagtattttttttttttttgaagtatgaatcttgaagagagttttgtttgttgagctttttattgtaaaatatatttagtatcttcaaccatgctctctaaacacactttttagataaaatagggagtgtgattaaaaaaatgagctccaactttacaaaaaatgactttctataataaagaatggatattgacctctctaaatatgaataggagcgcttttttttgtgttaaatttttttattagtattttaatcaaaattattattacttttcattattttataaatttaatttttatttgataaatttaaattataaatattattaaaataataatcaaatattaactaaaataatgagtatgatttaagcaacaacaataaatatgattttttattttaactttttagctattttaattaaaaaatagaaagtacaatagcattaaatatgcatataaaaagttaaatgctaaatttgtatgagttgaatacacttttgaatttttatttttatattataaagagattctaacttaagacttagatgtagggatgcacacgggacgtggtattggcggggagtgcttctcccgtcctcatccccgttaaggattttaatcctcattttcgctttttctcatcgaaaatggggcagggaatcccctaatagaaaaataaagtttataataaaattttcaatatacaaaaatattaaaatacataaatataaaaatatt

SEQ ID NO: 84808 - DNA, 542 bp, Cannabis sativa
ttcatgatttgaattaaaactcattaacctcaaccttttgctataatatatactcgcgttgcggggttttaaaaaatcataagctatacattattaaaaaaaatttatatttttaaaaaatattaaattaataaaatactaattaattattagacaaataaaaaatttatttacaatttacatataagaaaattataatattttttaaatttgagttttttacaaagttagatcataaaaaaaactaaagtttctaaaaaataatataaatgcattaaaaaaaatatgatctatcttattattcttggtcttacatatatagatttttttttaattattaacaattaatttattaaaatatattttgagaaaaattgtcgaggtgtatttttttattagaaatcaatgatcactactttttaaaacgaaattaatagttactaataacacgcataatttttttcactgatcaattaataaaaaatgtataaaacattatttcaactttcaataataaattacaattattaatatcaatctat

SEQ ID NO: 84809 - DNA, 562 bp, Cannabis sativa
gtgccattactactaatacagctgtaacatctaaagttaccatcgctaagtataataggccaaataaggaattggctcactaagtctaactaggctgtttttaaacattaatcctaattggatcgtctcttggatctcgacactatagtattttttcctggcactttagttaactagatagttttgaggaggataaattgccaaaagaggcatgagttatagtttttaattaatggaaaacctgtgaggttttctttccaaaaatttgcaatagtatctggattgtacactaatggtggcccaacacctgaagaaatggaacttgtttcttctaagaacaagttaaaggaaaagtacttcaagaacacgatgtctattaaaataacagatgttccaagtgctctagatataatatctagaaaaataaagactagggacagagtgaagttgtacttaatctatttactcagtgcatttctaataatgccaagtccttcttcggtaatagatcttgaatggctacaactagtggacaatctaccaatatttgacaattattgtt

SEQ ID NO: 84810 - DNA, 626 bp, Cannabis sativa
ttacgacatgcatcattaattgttgttatatgcttcaaagtctttagtcccatgatggctttacactggcgtgataatcaacgataaactttatttacataatgatatgtggaatatctatcctgagttttagcaaagtatactagtatcatatgtattggatatacatcaaactaggccgatattgactgtggagaagatatcataaacgtactgttgtatctcttctatatgtgtttttttttaattaattttaaaataatctaataaaaaattaattatgttgctaatcaattttaattaggttaaactaatataattagcataatacaattatttaaatatggtaaatgggccttcacagttagggtggttcatgtgagggagggctgtgttcagtatgttgtacccactactatggttccctaactctcacacaaggcccaaaagagaagaatttaacctttcattaaataattgtcattaattgaataagtccaatactaattgagcttaaataaaactaccaaggagatattttattttagtaacctagtccatttagatataaaaattaaatgggcttcctatatgcatctaagcctaatagcaaacatataggctca

SEQ ID NO: 84811 - DNA, 751 bp, Cannabis sativa
gtgctcttgacattatattaaaaactttaatgatataaatattattttgaattgtgtttttttaaatgaagactcagtatttgttttttgaaaaaaagatagaagataatcttttaagttcaatttttattaaaataaaacgtaataataatatggtctagaggtgttatgatcagggtgattatatattttgcatctgttcatttttgtacgagaacttagcttgaggtttgttattttaaaaataaaaatttatgaaagtagaactgagtattatttaatgttattttattattctacaaaataaaaagttcaatcaataaattttacaaaatattgagttcaaaataattatacgaaaacaagtcacgtggtaatagcatgaaattactcaaatgactatataacttttgactaaagctatactaccacgttactcaggatatgtccaatgtataacattgctctaaaaaaaactcactattccataatggatttgatctcaaacaacatataagttattttcactagaagaatagaaaaatgtaacttatatggtgataatgtgcaaatttttaaatgggttggtcaaaaatgtctttgttagtgttagaaaagcatcgacaattgtggattatgatgataatggtggtggtggtgatgagtgtgttttgtaaaagactaggtagcaagtaccaacacatgttattatagcaaatgagattaataagttgtaggtgaggttgatttt

SEQ ID NO: 84812 - DNA, 722 bp, Cannabis sativa
  modified_base (601)..(617): a, c, t, g, unknown or other
tcttatagtgaatgtaatttttttattattataaatgtgagtaatataatttagtaacaatattaaaatgtcactaaaatcattttaaatttaaacaataaacatagaaaatatttttagtaacattttcaaatatcactaaagtgtactatttagtgacatttttatttacttcacatgggggtattccacattttttttacaaatgttacaaaagctataaatgtgaataaaaatgtataatagtgacatttttgggtgttgctgaatattatttttggtgtagtgtgtaatttaactgccaataaaattttacccaataatattgattttaagcaaaataaataaagaacaacacaagatcgaattgataattctattattattatgaataataattactaaagagataataattaatttatcaccatcaagaacaatattttagagctatataaatataactaacaatcacgtcaaaaaaaaatatatataaaatgtagatataaaatgtcaaatcttgatttaaccaatttttttggttttttagttaacttcaacaaaatattctattaattaacagaatattttttattaattnnnnnnnnnnnnnnnnnatatttaaaaataaaaattatgtcgatatttatataaggaaattttaatttaaattcaaaatattcaaaatattataaacattttaattatattttaaaatttat

SEQ ID NO: 84813 - DNA, 609 bp, Cannabis sativa
taggcattgggggcagcaggggcaaatccatctgcgactttgctgatagcttcattctcgacttcctcgacgtccgcagcatcagcctcctcgagaaatagattccctccaccgccttgagtttgcgtaggcgacatggtgcggaaagccttagccattttagcggcttctgctccgatgattgagaagtcaaagtccagagttttggaaagggtggtgtaaatgtagtctgagaccgcctggtcatactgcttcttcccattctccttctcaacctccaagtcgcgagatatctcctcgacctttgtctgagcactcttggcttcgagctcgacctactccttggccttgcgaagttcctcgagctctttgtccttagaagtcgcatcttgttttagcttcttgatgtcctcctgaagctgaacattctgtttcttcacaagttcaactgccttagatccagtgacaaaggcctttgagaacacggtaataaactgcgaagccaactccgcagaacgaggcaacagctcttcagcaggggccttgtcgatctttgacatgaattcatcgcccacgaacttctcttggagagtcaagatgttgcgagct

SEQ ID NO: 84814 - DNA, 557 bp, Cannabis sativa
tttgtctcttgtttcctttctttcaacatttttttatttttctaccaaaggaatttggcaattatggaatatggaaatgtagatatttagtgattttttttcttcttattacaagataaaaatccattaaattcaaatgtaactaatttgaattaccttatataaaattgtaaataaggaatattctagaatccttacaaaaaaaaaaaaaaagaaaagaatattctagaaattacatataaaaacaaaaaaaaaaattctaaatatagtaatttagattttaggagtttcatttcaatttttttttaaatcatatattatttacgaaataatttgaaaaagatactatccacatttaatcaaacaatatatctaaaaagatatttagaatatactctatattaattagttggattatttccttaaaattattggataatctagtgtaataaattaaattaaatgaatatttttaattaaagaatcaaataatcatatagcctactaaatttaacgttaaaaacatattcaaaatattaatttatttacattaccta

SEQ ID NO: 84815 - DNA, 1096 bp, Cannabis sativa
agatgaatcacgagcaaccacacaaaaccgtaagcattttctttctcaaaaaaggctccatgcatcaacattgatcttgactgtatttaaatcgtgtttagtccattgctcaattttattatcattttgttggagagacaatgataataaactattcttatcttgagctttacaccaatggtcaagtgtaatccatgctgatacgagaacctgcgttagagaagaagctttgttgttccaaactagtgtattccgcactttccataaagcccaacaaaccatgatagcacgacaagaaacatcatcatcataattgttgaacaaatagtcaagccaatgacaaataattgctaattcatcaaacggaataaacaacttagctttgtcccgacaaccggttgcaagactgtagttaaagaaaatgtgagagacagtttctgcacagagatggcaaacagggcacatgggagatatgttgatgtgtttagttgtaagttgaaggcaagtcggcagggtgtttgtcacggctctccacatccagttcttcaccttaggaggtatttaaggtcccataacttatgccagaaccctgaattgtttgtaccattctgctctagtttttggttatgaagcatgtcataagcacttctaactcaaaactcaccagatctttccccagtccaagaccaacagtcttcggctgcagaagaactcaaaggaataccaataatcagctcagcatcttgtttattaaacatatcatttactagaggagtatcccaggctttagaataaatctctaggacggaacttaccatttgattagcatgaccgatctcaggagaagtgacatatgggttcgtgggatcaggaagccaaggatgtttcaaaatgttgtttgattcccctgttccaattgttctcctagcactgagtttaacaaggctttgagcactccagatacttcgccaaaaaaagctacgattgttgcctagctctacattaagaaaatcagtttgggggtagtaattggccttatatagacggcttgcaagagacgaaggagagcataacaaccgccatccttgtttagcca

SEQ ID NO: 84816 - DNA, 1509 bp, Cannabis sativa
tttaagattaatattgaaatttgtgaaggactatcgtaaaaaaaacctatataaatgtaaaacaaaaaaaaactcataattaaccacttaacattattaatttatgtcgtaaaaaagtaaattcttataatttctcctacaggtacaatgtaatttctactatttaatattggttcacacacaatttattttaacagctgatattaaaaaaaaaaaccactcccaacccacagcatatctgtatagcatagtgtgaagcaccttcaaattataacaatactcatttaattatgcatgccaaaatgaataaataaaaaaaacgtcccaagcgtaattaatttaatactatataaagcagcgatccggtgttcttcatcgctgaaacattacgatagtacctataataatacgcagataataataataataataagaacacaatacacacaaagacgtacgtaggtacaactggctatctataaaagaaaaacccagataaaataacatatgcagatcaggggaaatgccataacgcgcggttcctgtctatcttcaattcgtgtcaattacaatgatttctgttgtatatgtaacattgaacagacactttttttccattaagtaggcaatactgagcaccaggctttgtttttccacagggctgtacatttgcgttcttattgtctgatccgccagtacctgagccatcagtaggaagcaaaattcggccgacgtgagaatccatcaaaaactccaactccaaatcctccgcaatgaggcagttgtcgttgaggcagtaccgatcataagtgacattgctcttcagaagcatagctgcatcacaacagtgattaatcgtgttcgtcatcagcactactactactacaaccgccgccgcagtcgttaacattgttggctgaggaaaacgaaatgatgatgatatcattgctccccccttactactttttgtactgtaaaacatcaacattattaatgtgttactactccaactcaactctctctctctctctctatctctctcgatcacttttatcccaacttaacatgatccggctcactagtacttaatacttatataatggttagtgggagagagtaaaaatgagtaaagcataataaagaggtcaattgattgagtcttcaattacaatataaattataggctaaataggattttctctctgaactttgatatgtaccaaatcatgttcatgaacttttttgccgttaaaaattccccaaacttttatctaatttcattcaattttagtattttagtgattgtttatgtactaaaccatactctgagactttaatatctaccaaatcatgcccttcaaactttaatatgtactaaatcattctgaattttcgttcaggggaaattaatttttaacgcgcataaaagttcaggaagcatgatttagtacatgtcaaagtttggggaaaaaaattcatcattagccaaaattatattgtttatacgtg

SEQ ID NO: 84817 - DNA, 741 bp, Cannabis sativa
cccttggccaccaaacttgctttgtatcgttcgaccgaaccactcgcattaggtttaatgcggtacacccatttgcagccaataatgtgatatccaagaggtggaagaacaagaattcaagcccgttaagattttaaggcaacaattttggtatccatggcagcattccaaagatgattagtactagcttcacgaaaactagatggttcaattagagtacatgcagcaacactaaaaacaaacggggcttgtgaatgcccaatttagcttttgtaatcataggatgcaaattagtaggggcaatgggaagctcatgtgaaccatgatgatctaccaccaaaggaatagtgggtggggaagttgtagacgaggatgtatgtgatgcatttgtagatggtgtataggcgagggtgagggggaaggaggagtggcaacaggaacagtgattggggaaggaggaacaatgggaaaggtagatggtgacacagtaatggctcgggcaggagaaagaacagagaagggaagggaggttaaaacagagtgaggaggcttgtgtggaggagtagacaaaacgggggtagcagcaaactaaaaaaaactcattgaaaattacatgacgagtgacaaaaattcggcccgaggtaggatggaggcataagtaacctttgtgcttactactatagccaagaaaattgcaaggggaggagcaaaactcaactttgtggttgttataaggacgaa

SEQ ID NO: 84818 - DNA, 935 bp, Cannabis sativa
aatcatgaagttttatccaggcccgactatggactaaggcgggctaggcccgtgcttagggcctactcaaacctaagacccaaaattttcatataatatattttttgcattaaaaaaatggtatcttttgaaattttttgtaaaaaaaggcccaataatactcacattttacttttgataaaacacacactcaaacttttttttagtctattattactcaaggtcagctctggttctatcttaaaactaattggtcataagtagaatagtccgtattcttatatatgactcaatattttaccatttaattatttcatgtgggacagtgtcccacaatattcctcctcaagaaagtggtaattttttgtttattaatcttgaaccgtattagatcagtggacaagatcactatttatatatgtgtggatcgggcagggttacatgctcgttaggaatcgatatgtctctgataacatgttaagaatcacgaggttcttaaaattaattggtgacacgtgaaagtaacccatattcttataaatgacttaatattttatgtggaatagtgtcctaaaacagctttaagcataaacgagctaaaccaatacttagaacccacactttttgggggccataataaaaaataaaaaacctcattatttatcgagaattatttttatgttctatataattcagattaattacatatccttactcatatatatatgtactagatagatgttacgtgtcaagtcacgtatgttaattttattttagtttttagttttttttttaatattataattttaaaattaataatattcaatgtacttaactaacagaattcgtggtttatgagaaattattgggtgactctttttttttaaataaaaaaaataacaaattattacatgttgtcacgtaaaggtcagcat

SEQ ID NO: 84819 - DNA, 1237 bp, Cannabis sativa
ctattatgaaccccaatactctttggcaagaaatattttagtcaaaatcatagctttttcctcaattgctgatgatatttatgatgcatatggaacatttgaagaacttgaactcctaactcaagcaattgaaaggtttgatttttgtaattataattattactcaaataatctataatattgtttttctctttaattatatatatatatattaattagtgtatataaatatgttttatacataggtgggatataaattgcattgatacactcaatcaagaatatttgaaaacattttataaggatcttttgaattgttatgaagagtttgagcaagtgcttacaaaagaagaaacttatagagttcattatgcaaaagaagtggtacgtaataaattaatgccttaattatagtttggattatatcaataatgatgaattaagattattcttatcatgtgagtttttttatatattgtactactcacaatttaaattactaattaacagtttaaagagttaatccgatcatattttgatgaagctggatggttgaatagtggacatgtcccaaattttgaagagtacatggaatttgcaaccattaattgtggttaatatgttgatagtgagttctttggttggaatgaaaacaagtattgtaaccaaagatgtttttgagtggctctccaaagatcgaaagattattagagcatctgttattatttgtaggctcatggatgacatagctgaacacaaggtaagaaaatcatcaaccacacaaacttatgtaccattttagatttttgttttataccgctagtgagtctcatattgataatacgtgaaaaattaatattatcactacaaaaaatcttatttttagtcacaaaacttgtgactaaaagtaaattaaaaaattgtgactaattataaattattattcttatgttgtggctaaaggtattactcacaaaaattataatttgttgtaactaaatgtatttttaatcacaatacttgttgtgactagctaaaactaaattatagtgacaacttgtgtctacatgttatgttttagtcaaaaataattttttattgtgactaaaagtcacatttaatcacaattttttttttttgatgaataaggaatcttgtattgctcaaacaatcaatttacatcacaagttttgtacaaaatcagctattactgctaccaactgctataaatctaaac

SEQ ID NO: 84820 - DNA, 765 bp, Cannabis sativa
tctttaataaaatcttgcatatatatattttgacttccacttgcacttgcatcaaccattctgcacatacaagctacgattaaataattaatcaaactattaacaaaagagacatgtatttaaagtaattaacagtgggttttaatattacaatactttaaagtctacaagtcatcataatcatcatcatcatcatcatcatcattaacaggtacattatttttattatcactatcactagtgtcttcatcatcattataaataatgaaactatctaaatcttcacggttaggttgctcacggtccttgttggtcatttcaattgggtcaacatcatcatgaacatatccgacattgtccatttgtgcaagttgaacaaataacgggattcctgaagagtttctttcttgtatagtcgtggtctcatcatcatccttatctgagaaatttcagacattgcgaggggtgtaaacattgacaagcttccaatcaattccattcttcaggtcaggaatgtaatatattaaatttgcttgggatgtaagtaagaatggttcattttagtaccattcacgggcaacgcagatactagtgaaaaactggattatattttactacgacctagatttactaataagtatgtttccaacatcctaaattatgaaattctaaaatgatgaaaaataaacacatataaagtatgaaaaaccttacattgattgcatcagaattaaatgactcattctgctcagatctctaaccctt

SEQ ID NO: 84821 - DNA, 685 bp, Cannabis sativa
aacataactgcaacagaaattcaaataccctacaaatgcagtttcagatacagtctggatatccagcattaaagatcacagatgatgaaagcctggagttttacttgctgttgaaatcaacataaagtgacctgacaaaacatcctttgtgcataaatatactccccaacacaacaataacatcacaaataccttttttttacagaggttgacaaagaaaatgaagtccacatgcttgaatatggaagtcaatcagggggaacaccaacacatcaacaacaagaaaactaaaaagcagataatgatgaatttgactttcttgagtatgctaagataattgctgcagaaatgatggctcaactaacaagacagacaaaggatgaacaagaaagcaacgatgaagaagcatttgtcaccacagataaacatcatccaaaaattgagaaatggcaaatgtacaagataaggaaactttgaagaacgtactcaactactttgcaataaaacaacaatttcattgcaaggtgaaaaaatcttgcacaaaggaatttcaaattgagtgtttggataaagattgcaaatggtcactaagagcttcaaggaatgaggcaatagagaatttcataataaggaaatacaatgaaaaacacacttgctcactaagcatcagatttggagatcaaag

SEQ ID NO: 84822 - DNA, 583 bp, Cannabis sativa
atgagaaaccactataattacctaccatatatgccataaatttttctgtattatcctattatatatatatatataacaggttttgttttttatttatttattagtgacctattcttttaaaatatatattatggcataatattttacacataattactctctctatatataaatatttgtctcatgttgtttggttatgcatgtttctcgttatgcctgatctaggatgtgtgtggctcccaaatataataataagttcttctatatttaaaaaattgtccattttttcgtttaaattgggctatttatttgagtttgttatacaatctcacattgtaaatacccatatataatataagatgcatgtattgttatagttaatagtagttttaagatagtgtattactattagatactagcagtgtctaacattttttataggtagcgtttcacaattggttagtaatattctttaaaaattattttcttaaattatataagacttgatatttaattactccaatgtcgataaaataccaaagaaaatactaaacactaataccttttagcaatagatcaacca

SEQ ID NO: 84823 - DNA, 1483 bp, Cannabis sativa
tttcatctcactcgttttggttacactattacgacttgacttactattgcatataaatttccaataaatagaccatacatattaatttagaacaaatagtaatacatagaattctggaaccaaaagataagggtttcaatcgtcttattattctcctcttttgaggttcatggtttattcttcaatcaatacctctgtttgaagcttcgatcaatttatttttttctaatgggacggagctgctcttgtccctgtttaaactcctgcccctgttgttgccccaggggagcccacgctttgagttacctgcttcaagttcttatggccaaccacatgtaattaagccatatatatatctataaaagaaggtttatatgttagtagttaattgtgtgtgtgtgtttgtttgtaggcattggtagttaactttcagagttatatcaacaagatgactagatgactgttgttctctcgattgatgaaagtgtcattccagatcctcatcaactatgtggtgacattgtagaattgctcaatctcctaaaacactctgtagttgagaaatatcggtcttaaactactgttacggaataataaatattttaagaaactagctaataaattaattaggtgttctgtttctaaaatttctcttttcaataacaaatatgaaaaagaatagtatattgagaaaatgtaatgttagaagaatgtttacttagaaaccaaatgaaagtcatcatgttgagtgttcctttttttgttctattattataacataatctattctatataaaatgtctactggctataggtgtaaggtgatgatacaagctggagatccaaatgacgacgatggtggtggtgcgcaagcaatttatcataatccacatgattggtgcattagtgtgcaattgtattttgtgctttcattcttgagtcttgttgttccttttgtgttgagatggtattttgttaagcaaagttcagtcaattggagaaaaagaaactctcattcatgtacaagcaattcagctgttttgtatcccaaagatcctgttaaatttactacttttttcacctaaacaaaaagtattgatcacctactcttttaaggtaatgattgttctttagggattcatataattgaatctttttttcttcactaccttttttaataactaaaaaaatatgtatttaacttttaatctgtaaatctttaatatagcattgcttgaaatttgtgtgcatgtttcaggaagaatattgttggtcagtattatggccacacctccttcactcttcctaggctcttttgagttgtaaaacccaatggacgaaaaatagagaaaaaattatcaatgaaaaataaactagccatacgtatttcactcttcaccaatttctctaaattttttctataattactgccaaattcttaagaaatttccaagttggtgtatttcactcttcaccaatttct

SEQ ID NO: 84824 - DNA, 803 bp, Cannabis sativa
  modified_base (501)..(504): a, c, t, g, unknown or other
gaggagccaaagtcagattttttaattatttgaattatttcaccaaataaatttaagttttgtttgataaatttataatgaattagtaatcattttgtagttttttttttttttttattttgtgattgtagttactttaattgtttgaaataataatgaaaatatagaatctgccaaaaaaaaaaagatatataacagtccccaaaagaaggacaaaaaggaggagagagagattttaataatatttagttttttgttttttaaaaaaattatgaagttgaccaatacctgagtaacacgtggcatagaaattttctcagttatatttaacagaaaagtagtaacgggagtagattataaaactaaactttgggtatttaatccgtaaaaaaaaatgttatttaagtatataaaattgaaaaatatttaggtgcggtttggtaacacttttttaatcaattttctgtttttaaaattagaaaagtgaaaatatttttcaannnnatgttctataaaactgttttcactttttcaattttttaattgaaaatcaaaatttgaaaaacaaaaaagtcacttttattatttttttaatcaatgttttagactccgactcagacctaaactcggccccagccttggtgccgatgccgaacctagcacccgatccggagccggacccggtcccggacttacccgacttaaataaaatcaaaaaataaaataaaaataaactttacagaacagacttttgttttctatttttaaaattaaaaaacaaaagtggttatagaacgcatttt

SEQ ID NO: 84825 - DNA, 868 bp, Cannabis sativa
aaatggacgcccagcgaaatacaataagccagggtaatatggttgagaccagaggctgtcagggaaatcaaattccccaaaatccccattttcgcgcccatggccgtgacaaagttcagggtggtcgtcctgtaaatccactacaagctctttcgaattgggagcagaggtttgcggaaatgcaagattgaatctgccaacaagaagaagaaattctgggattaaggtagcagggtcttcctgtcgtgcctccacaacaagctcaggtcgttgtagctctagcggtgccaacagaataacctgttgctggcaaccgcatggagccgttatacaaaaagttccataagcaagcacctccagtgtttctgggaggtccagatgtgatgaaggctgagcagtggctcacggtgattgagcgaattctgaatcttatgggggttattggaaatgatcgggtgatcctcacttgggatgtcactatgatgacttgtgaagagttccgagagttgttcaactccaagtattataatgaagccattcgcagtgctaagcagaaagagtttactcagttagtgctaactgaggggatgtcagtcactgaatataccacaaagttcgaccgtttggccaagctcgtcgtgggtattgtgccaatagattttagcgagaaacaaaagtacctgcccggtttgaatgtgaagattagacatgatctggtgattaccactaatgaagcaacatcatatgcggagatggtagaaaaagctctgcgggccaagtgtgcggtaaaattccttcaggagccccgagtgatttcgaatgtttgtggaacccccacccttcctactcctgtttatggtagggatgg

SEQ ID NO: 84826 - DNA, 605 bp, Cannabis sativa
ccggtagaagtaactctgacacaagctcacgctccccttggggattatgattgagtttagggaagaaattactcccatggataatccaggggtcattccaaatgtttttatctctcctattagcaataagtttacaagccaccatcttcaagatttcttttgtacggacaacattcctccaaaaccaagagtcagaattcttaattgtacattcaaaaaactttctgccccgaaggtatttagcactcagcacctgacaacataaggactattcctcatttagaagatcccagccccatttggccaaaagggcttggttcatctctaaagattttctaaatcctaggccacccagagatttcagaagacacagatgatcccaggccttaaggcagattcctcgatttccttgctcatatccccaccaaaaatctcttaccattccgtcaattttagaggcaagttttttagagaatttggtcgtatgcatagcataaactggcaatgctagcccaacagatttgatcaaggtagcacgtcctgccttagataacgatttcaatttccacccatgtaatttatttatcagattatccagtataaaa

SEQ ID NO: 84827 - DNA, 679 bp, Cannabis sativa
gagttctcaaggttacgtacaatattagatctaagtataggaggtgatacctttttcccagtattgatgtcttgagccgtgcgattcgcaatggatagccaatcagagaaatcattgcgaatctcactttgcctcctaatgctctgctccgattctccaggtgacaaaatcttctcgtcatagtgttcattttcattttcctcgtggtactgttccattgattcagcagcttcctcaatctccagttcctgtacccctagcactgcgtccatggatcgagtcttgatgactctatccgaggaagatggaccagtcttctttcctttagctttccctttcccagccattttcgccctttttgccatagctccggtgagacaccgaaagggagaaaaaattcgtgagcggcaggtagcattcgctttttgcttattttctaacatattctacattaatattttatttaataagttttttattatttttagatggctcttttcttttattttttggtacataatatttttttttaaattttataagacacatatattgttcatttgagttttctaaaaataaataataaatgttaaagtcaagtattgttataacgtattataaattattttgccacattaaggataacttgtaacgccctaatgctaaggcacgctacagt

SEQ ID NO: 84828 - DNA, 739 bp, Cannabis sativa
caacaggtatagttttgaaaaaaaaagactaactttaacactcacaacactctaaaatagataagttttaaaatatttagaaaaaaaagtaaatgctctaaattccctcttcattttaaaagtaaaaaactattttgctcctgttaatggaatttctctaaagcattttttttttttaaaaaaaattaaataataataaacaggaagcagaagaagaatcaagttggttgaggtggaacattaatggaatgctactgctatggtatgtatgtatgtatcgtggtgtgattttattacaagtaagaaagtcgataattagtactggtcaattgtaattaataacaagaacccacgagtaaatagttgcttccattattttaggaaatgcaattatttttttactaattaataatatgttggtttgcatttttacgtatttaggcacttgcctatacctacattacatgctttgattggatctagaattttaacaagaaaaaactacattagctttacaaaattacccttattacaagattacttttattggcttgtcctctttaagttgcattttttcttgaaaaaaaaatccaaaataagaaaatatatactttggaatgtacgttatttttccttttaaaatcaaagatccaagcgaggtttattaaacaaaaaacaaggaaatatgaaacttcttaaaatgaattatatgttcatatattacagtttgctttgcttg

SEQ ID NO: 84829 - DNA, 1139 bp, Cannabis sativa
  modified_base (467)..(474): a, c, t, g, unknown or other
tactcaatatttttctgtatagatcccgagactacttactgttacaaatttaataaaatatgtatagtatgtataatcagaatatacatattacataattttttttataattaaatatcataaacacaaaagaatacacacaatgtatttgagtatatagtgacaattaagttgggaattgccacacatgtattttttatttatagaaattgtaagtgatctaattattgaccaaagagtatttgagatgatgatcactagatagagtgaaaccattactagacatttttgttttatataaatatataaatatagtgcttattattcagtctttttagtggcattatttttccaattacaacttttttattattattattttaatataaattttcttgtcttgcttttcacttttaattagtggtcacaatccaattctaccaaaattttaatatatatatatatannnnnnnntataaaaatatatatatatatgtggctgaaattgtcacaccccaataatatttgatagaattatcttttaaatattttatcttgtatattttgttctagaaagaccaataatatataagatagaggattcaaacttttccatatatatttagaggttggggtgtgattactattatatactaattataataataagcttaaagtagcataaatatatatatattttttcataaaataaaaaattccaattataatccattctctctacattttcctttcatgcataattaattatattagagtaattgctagttattagttctcttgtgttttgttaagtcaagtgcattgttgagtggtttggatactaagatatcacactcttgagaaagccaaattttaatgccttatttttggtggataagaattagtatgattatacattaatccattaatactataatgcatgttaatcctattttcaactaattagttatgtcaaattcattggccaggttttcagcatgtcatgttcaaaaaaaatagtttaaaatatattatataatcatcactaaaaaagaatacaatattaattataagcatagtgattccttcataattataatatattaatcgaaaaattccattaacacactgttattata

SEQ ID NO: 84830 - DNA, 1706 bp, Cannabis sativa
gattttaaatttgattttaggttttaggttcaattgttatgttattgagaatgaaattccagatttttttttctattttgtgtgattttggatgtgggatgtaattgttttattttattttattttttctattctctgaaacatcgaaagcctcgtcggactactactgctctccgaagacgacgacaaagatagatagattgtgtcagtgtgtgaacagtgtattaattaatattggattccattccattccatttgaagatttggcttacacgtttaaatgtgtacaaaataattaatcttcttttacagaatgtttgaactctatttcatctgcccactttgtaacttgctgtagtgtaagactgaatactcgacttgtctataattcagttcttagatgctgaacccattcctaaaactttttctcttttatctctctctctctctctgttttgtttctttgcactctgttcttatcgttttcaatctcattctaaaaatttaatttgatttcttttccctgatgcagaacgcatgtgataggggaagctaacattcgaaagaagagtggcatggttataagatagatgacaatgatcgtgtattgcttagggtgaattactgataatttgggtacataagttggagaggtgaagaatcttcttgataaaataattctaataactcttttctaaatgagccaatggaattggtaaaatttcaattagaaaaatattgttaaaaataccaatatttggatgcaacttaaattaattgttgtttgtgtggttactctttttacaatgtaaggcaggcaagatttcagtggatagttatggtgacatctgttctcatggaacttttattaggctgcaatgttgtactctaaattgtcatttcattttttgtttttctaattgatttctaatatatgtatatatatatataaatatttatagtattaccatttaaatgaatagatatttatgttactttggttgtctgtttaagttctattttgaaaaacatacactgtaagattttcttaattactatccccataaattgtattttctcttcttgaaattgatttttcttgctgcatcatctcacctaataattaataatatttttttttaatttttaattgtatcacttttaaataacatagaaaaaacttagcataaaatttagtatacgtgtctcgcacgtaaatttttgctaatatataataatatatcaataatagtaatataataacatacatatactgttaacgctttatatatataatgatatatcaataatagtaatataatataataatatattaataatattattaataataataacaataagattaataataataatataataatattaataaaaataattattaatagttatcctattattttttagccactaaaaaatttttatttctaggacactaagccaaatttcatatactcctaattactctaatacttacattatcaacttatcacgatatttccatcaattatatcaattaaacctgctatgatatttttggcccccgattgagtctctaaggtcgccaaaactgaaaatatttttactacagcgataactcatattacattcacatataccatataaatcttcgtaatttataaattactcttatttatccacttatagcaaatttaaaattt

SEQ ID NO: 84831 - DNA, 559 bp, Cannabis sativa
ttcaagaagaagaagaagttgaagaagagtggaggagaaactaaggtgaaagctaatcaaagaaagtaagttagttgagtaaactaaacatagaaaacttttgatcaaatagagattaaaatgcttatgggggctttctgcattttgagtccttttagcaaattttgaattttgagcttgttatctttttgtttttggtttataaagtattaatgtactactttgtcattagaattttaattatatttcaagactcaagtattaacattattagttcaaaaaaaaatttgaaattttggctggaattgatcaaatgaaactgatgcttctttcaatttgtatttttgattggatagcttcattatctgttgttcttactaatttaggatcataattataaacctcaaattattatatatacatttatatattctatatattcatagttcgtgtaattttatttttccttttcatttattctcttgcaatttaccaagtaatcctaatatgataataacaagcacctttttgtctgaattttttttgtttatgttttgat

SEQ ID NO: 84832 - DNA, 1230 bp, Cannabis sativa
tttatttggaagagagaacaaaaatgattattttagtttgaatatttttgttgggattttataagagtcaacaagttattgagtgtgatcgataaatcaatatggggagtattaataatagagtatagtttgaatacatgatgatattgggtgaatgattttgacgaatttgtctccatttgttagtgttagtgggtaggttaattaggacatacttcatacttgcatatatttcatataataaattacccaatgtcatgttagtgggtatatatatccaagataaggcaaaggtagaccaatccaaatggtaaagcacacatcatcgcaaataatgtacacaagcaatttaataaaatgtatgtattaaaatataaaaaataaaaattacatatatataatatgggcactggttaactaattaataacataacttgtaaagcagtgattatagttaaactactcagtactcactgtcaatatcttgcaatcttgctgtaaaaggatttaaggatatatttggaaaataagacttttctcctacatcataatcattatttgttagtaattaattgcctttttttcttagttagtttcagtttgctactgcctttaagaaaacactagtaggtaccccttataataagctttaagtttgtgacctataattcatcatgacaatgcaataattaatcatgcatgattcattcataaccaagtgaatatattaattaataacatgtgaatatttgctaaaaaaatgtacagaattatatgttttttttttttgttggtagtatagaaatatgtgtaatagtaataaatcataaaagcaaataatgaagtgcttgttcggtaatcattaaaaaaacagttttcagtttaattaattaaagctaaggagaaactagaaatatttttgtttgtaaaattagaaaaaataaaaaacacaaaatggttacccttaattaattatatgtagtgtagagaaaaaaaaaaaaatctcaaataacaggaaagagatagatatatggaaaagaatttgttggtgtaataattaatcctaattggtagaagacagtgattatggaataatacgtggtattaccttagtcgtataataataaaggatataattatttactaataagctatctatcagcaacttttaataaagaatcatatgatgtggccaaatataaatctcattatatcagaataacatatata

SEQ ID NO: 84833 - DNA, 857 bp, Cannabis sativa
tttcaaagcggaatcggttttttcgtctaacttgctgtgcaggttcattgtgtaaagcaatgacaacaacaattgcacggtagtctgagtgaaagtagtccaaaatgagagatccatggaaccacaaagacattatcccaaagattattgatgacacattagtcaagacactcctttaaagtagttcctgctattcgatttttaatccaagtgtacgcatcaccatcatatggtgtatcattcaagtggcagtggtcaagagaggcacgaaagtctgcacttagactttcatttcggaggggaccaccttgtttatctgtattggataagatctcattgaagtcaccaattacgagccacggttggagaggtgagacatcaaccaatctttttaaaagggtccacgaagcagatctattttgtgcagcatgggcaccataaaaagctgtcaagtgaaaagttgggccatcttcaaaagccataaagcagtcgaaaaaagaataaccgtaattcaagagcttgtcattcacattgtgtttccataagatcattaatccaccacttagaccgatccttggagcctctaatctattctgaaaattaagattgttacgaaatcgagtaaacaaattagaaataagctttgtttccatgaaaaacaagacatggggcgattgttgttgaacaagcaatcgtaagtgtctgaatacgtttgggttcctcaattcccgagcattcaaactgaggattttcatggcaattaggcaaaattgcatagcaacctccgctgttaaagtaaaggtgcctgtagaattcgtagaaacggaaacagtaggcacaaaatcatcagcccctga

SEQ ID NO: 84834 - DNA, 792 bp, Cannabis sativa
tcctagttgccataccacttaactagccaaaataatacttcttcggtgtaaaaaaatttgggcagcacctcccctatattttgcacttcctccaaattaatttgaagcagtaattcatcccttataatttctaccagtagcaatattcaatatctaattctccagaaacaatattatgccaatatcacacaatccataaataattattcttcaatcaccaaactttagtggaaagaaaacacttacttgtatgatagaggctttgtaatgcttgaaggtcctcttccaccaagaaatccaaaaaaaattgatgaacaatgaaggctagattttaggtttttgatttttttttgaaatttttgggatggattgaagtaatgtgggtgatttttgatgaaatgggtgaatgggttgtgtttgtggttgattagaatatggattggtgaagaaatttggtgttagaatggtaaaaaaaatagtagaattttgggtttgaaggctgctgctcgtaggttagaaggagaagaaaattagatggtttttgagaaaaaaatgagtgaatgggacgaattgacagttggagtgtttttataaggggtgtgtcgcagcccctgatttccatgtcgtggcccgtcccttttttctttactttgatgtgcaactggaaagcccaggggtcgcgacccattccttgtcatgtcgcggcctacctgtgttttctcatgttgtttgtttgttgcttattattttttcacctgtatgtctaggcactactaaaaaattttaaattga

SEQ ID NO: 84835 - DNA, 2614 bp, Cannabis sativa
actcgaagagtgcgacccgaaatcgcattttttaatttgaaaggataagaaaggttcataattttagtttttcatctcaatttgctaataaaactatcattaaagtttaaaactttacagtaacttaacttgtgtaaatgtatagaaagataaagataatagattaaagactcatttggtacagtgtattaggtcgtattaggttgtattgtattaaattaggttatgaaatgtataaaaagataaagatagtagattaagggcttgtttgatactactaggtagtattatattgaattaggttatatatatattatatttttgtagtaacactatttatatatttaggtgcttataaaagttattgccacatataattttatataaaaatattgcatgaaatataattcaagtataatatggcttactaaaccagccataactgtgttgtggtgagaatgagaatgaatagttgtatgtacaatactaaagtatctaacttttgactaactcgatttgtgtgcaaaacattaactagttgattaaaaatccaatttttttcttttgctgatgaatattttctttctactctttgtttggtttttttgaaggtactatgaattgggccctaatgaccctccatatgcagccaaattctatgattgttgtggggctgaagatcccaaagcacctggttgcacaacaagttctcatctatcctatgatgattaaaactcctccccatttgctgttgtgaaaaactcaatctcaaaatataggcaaatttcagtacattcatcttaactgaaatgaagaccatattgttttgtaatgaaagagaaggactaactaactgtctttacttgaggaagtttcatttttgtttttgttgttgttggaaggtagcagcaaagcaacaaggttggcccaacatttactgagaaaaatggctaagttttgatgaaggtgggcaggaaggtgcagagtatatcagtagcagaagctaagtatgttgtagtagttgtagtagtacattcactactattaaagctaaaggttttgaagagaggaaaggaataatcaaatctcaaatcagttactcatggaatgaatcaatgaggtttgttttgtctttgcattgctgccaatgatacttttttttttctttctttttcttttatatttgtggttgcattttctgccaatcccatgtggttgacagttgtttttctctccaattatttatataatatatactgttattctaaaagtggttattataagtggatttggctggctttgttcttaatcttattattattagttatttaattatgaatgttttttttaagttaaaagatttgaaagaggattcttattctttattctctcttaattatatacctttgaaagttttaatctttttttcttttttactgtgttgcataagaagatatttttgtcatctttatgtggttattaattgattcatggtatatggtaaagaaagaaaataaagcaataccaatatcataataattataataatgaataaaaacataacatgtgaggggaacatgtgtggctttgtttgcatgtgataaatcataaatgagtgactcatcacatctaactcatttgcttattaacattacattacattacttattagtagtaaataacaatacccttctcttcttttctccattattgcaaaaatgtgtgttttaatttgttaattatttatacataaatactaactattactattattaagaaaccctttttcatgttttttctttctccacttgttttgttttgttttttgtttgaaatgctttgacagttgacactttgacaaaatgacaactgggtttggttaggaatcaaattagaggattgttattggtacccagcactatattgatgtagcgttttataatttgttagttatttattatattagttattaaattaaaatatatggaatctgatattgaaatacattaataacaatatttcttatcaaattaaggactacttctacactttgcatgcatacatatatacatacttaaatacatataataatgaatgaatgataatgtaaggaaaggatatgagttgtgttgtggtgattctttgcttgctctagtattggtcctatctcatctcatctcatcctcgtactatagagagaaatgtttttgggtaaaattacatctatgcccttgagagagagaaagaacatagaatagaaccattataatagatgctcttgtgcttttccattttagttagcatggtacaaatttaaacttaattgtagttgtatattaattagaagtgacaacatcactactactactaataataacaataatacttctactattgatatggatttttatttttatggaatagttagaagaatgtgtgtaatgtggtccccaaaaaccccattaaaccaattagaccaattcactatgagagtatccatatgcacatggctttctattattattgttgttattattcatgtgtaccaatccatgcatgtcacgttttactttactctcttcaattattcatctcatttcctcccttcatatat

SEQ ID NO: 84836 - DNA, 711 bp, Cannabis sativa
ttattattgggcaccactttggtgtttattttttgtaactagcgttttagattaacaatattttttaaaagctatttttttgtatttaagcatttatgtattataacaatgcataatttaggactcgaactcaagacctccgacatacacgtacccttctatggccacttgaactaacctcaagtggttaaaagtaattttcttaagttatatgaagcttgatatttaattatatcaatagcgatgtgaagaaaagtactaaacaccagtaatactttgtaacaatttcctttttataaaaaatgaaagaattaaattttttataataagatttgaattcttaagcctttaaattcatgataaaattttagtaatttgataaaaattatatttagtgtgattctatgaaaagaaaaaaaaaatattcgaattatacctcttacagatcagaaatcttttcaactactagctcattacaatgctcggaactgtggtttagaaagcaagaagaaataaaatatatggtaaaaagtatgaatttcatttcaaaatcaatttgatagtaattaatccatggtattattaatgttaagttgaaactatctaacaaatattatctcaaaaccaaacatttatcaaatagaaataaacaaaactaaaaatagaaataaagcataaacaaacaagacaatagcactttaattttgatga

SEQ ID NO: 84837 - DNA, 795 bp, Cannabis sativa
tggtaaccgagtaggcactaagaaaacaccaaatagagagctctcgggagggaaagtaccttcgatcaagagctcaaaatgagtcaagctagagggcgccaaccaatgggtcctccacctgatgttgaacggccttgcaacaatgagagaaccaatatcactcctccaccaagtcctcctcaacattctcaagagaccaggcctcgagaccctgcaaggggaaagggacctgatactcaacccgaaggaagtagtaggagacaatgctttgaaattagaggctacaaaatccggcaagtaaggaccaatgagttgcttcatactcagaattacttttgagatgaaagaggggagttgtgctattacttttcctgtggccttgatggccaatagtaggagtactgttttagcgtacatggagaggaattaaacttgagtgaccaattcaattctcttcacacttgtgaccctgctgaagactactttgagggaagtagccactataatgctccaaatgaacaatctcacagtgggtcgtcctgaaaagattctaagttcatgatcgacctggaagacaaagagacatgcgtgaactcttgaataaaagaagaatggtggacgtgggaacttctagagaagaccctatctgggtgacagaatctccatctgggacacagaccaccattcacagggtcaattaggcagagtttgacaccttgactgctttagtgaaggggatcacaacacctaagttgtttgaatttgagctaaatagagaacgacgctcaccactct

SEQ ID NO: 84838 - DNA, 4817 bp, Cannabis sativa
ttttttttgataaatttacatgaagtacctaaaatcaaactttgtttatatttttacagaattttttttttaaaaaaaataatattgttttcatgttacttttgtgtaacaataatgtaaaaataaagttattttttttttttttacattccatatttttacaaataatatattttatttttggtaaaatatttttgtaaagcattgcattgcatttatttgaacagcctaaacagaaaataacttgataatttttttcttcaccaaaacagtaaagtgactgagttaagtagttagtagtacagtaggtatgtgtaattggagaaagaaaggtgagaataatatgaagaaagtgacctaagcaagaatctaatcaaacttacactgttacaaacaaacaatcatttattattaaccaattatgaacacaccccatcctccattctctgaccacgtgaaaaagagccagaaccccacatctccatcctcatcctcatcataattaaactgttctgttctgttctgttctgttctgacatcccccagttcatctccaccgtccacgtgtcaccatctcaacacatataccagcacctagtatccgttaaaaaggacaacaacaccaacaactatcactactattctctctcgttccaattgtaaaataaaaggagcagagtcatatatagtactactattattttcttctctgaaaaactcagtacccttttccgagatcccgttcttgaacgagttgagtgagtcaaaccgcgagtttaaatgcaatatgtaatttgatattaattaaattatatcaacacacgtggactgagtataaaagactaagacagtgctactaatattcattattcactatattttataccatcaattcatgcgttactttaattttattatattattatagttttaacttatattattactgccatgtgtttgccttggttggttcaagtttcaaccatataatatgtctttgtttttagtatgtaaacagtggatctgagcttcatctttctactatctaaactcaggtaagtctcaaacttcaatgcgccttttaatctcattatttcttctttatcattactattaatcaagctcagaaacacccacttggcagttttttctgtatttgcattaatattactatttggttcacttactgtttgtgaaaatgctgattacatcgttttcactttgaagattaattttttttttgtttttggataaatcccagatgggtcccttttgttgcagcactagagccggaagtttcagatatctctgtgggtttctgtgaagtaacattaatacttgtttgtttgattatatacaaacacacacacacatttgactattaaaaaggcataccatatgtttgatataatttactaagtactattatcatcatcattttatgctgctgctgttgctgctgagttttatttctatggctatcttttgagctcattttatagctgttttgcttctttttatctataaggggtagcaactgctgagtctttgttgagaaatttcaacttgaagcagttcttgtctcacagatctaaagctcattttttttttggtgtgagtgaaaattaagaggcagagagatagaaagttatagtctttgctttaaggataaaatgagatctatagaggataaggggtgctacaaccatggacaagtgcaagagaatatatcaagcagcagtggtttaggctttgagtttcacaaagggaataatggaagtaataatcgcatgtctcaccaccatggccaccaccatcgtacagccttaggcaaatcaacaccttctaaatgggatgatgcacaaaaatggcttgttgggttgtcaagaggggtagagaaaaaccagtccaccaaaaccaaacccagaaactcaaatgcagatgatttgagacttatagcccctgtaccacaaaaggaacaaggaaactctagtggtgatgaagaagaagaagaagaagatgaaagagtacaaaaagaggaacatgattgtgctagttctgttaaaatgactcagtatgatgttgagacaacaaagaaggtagatggtaactatgagtcagtatggagagttaacaagcctgtggaaaactcaactgcaatagtcagatcagtatgtgttagggacatggggactgagatgactcccattgctagtcaagagccttcaagaactgctactcctctaagagccacaactcctgtggtaagaagcccaatatcttcaggctcttctactccagcaaggtgtcagcatcggctgccacctactatggaaggccaacaaacgtttccattgtcttcagatggcagaggtgaggccaatccttcttctggcagaggaaatggttccaccagaaggtatgtagaagaagcaaatgagtgcaggaataaggttgatcctaaccaaaatttagatgagggtgggaaggtgaatccattagaaaccagagcagtggcttgggatgaggctgagagggccaaatacatggcaaggtaacttactgatgtcattatccactttatcttcaaatattttaaagggtatcaattatcagctggtggtaatggagaacttttttgtgtttataatgtttgtactttgtaggtataagcgtgaagaggtgaagatccaagcatgggagaatcacgagaagaggaaagctgaaatggaaatgagaaagatggaagtaagttttctctggattcatatttattcatctcaatacactgttattcttttctacttttcttcaatagtttccttactggttattctcttttctttgggaaaacgactaagagaactaagctgtataatgtacatgcattgttcttcatatctaatataagtcttgtccctttagttgggatcatcaattgaatgggacagtttttttatgtagtgggatacaattattgtcttcagatagttttgatttaagtggtccaatcctagttttatcaatttggatattggtgggtggctagctactaaggcatttgataagcataattgttcagctttctaagtgcaattttgggtactttttttttgtttcaggttaaggctgagagaatgaaagcccgggcagaagaaaggctggcaaacaagattgcatccactagaagaatagccgaagaaaaacgtgcaaatgcagaggcagaactgaatgagaaagctgttagaacttcagaaagagcagattacattagaagaactggtcacttgccttcttcattctctttcaagttaccttccctttgctggtaggtagctagagatgtcaatggggcggatttcggggtggggagaaaacttccccatcccatttaataccgagcataaccgccccgacccctttaatacgtggaaaaaccgctcccatggggtagattgccaagactgctactggtagcaaatccatcaatggattatggaagcttgtttttccaactcttttttaattatacatatcaaagcatgttattttttctgaaatatgtcataaaaatgttacattctgtagtaaagttcttgtgttttaagttcaatattgaatcaacttactgtgattgattatgaagattacttctgttttcattgtttttatctatttagcttgaaattgaattagtaagctggtgcctgattagcctgctttgtataagggatttgaatattttggtgttttgagtataaagtaattaacactttatacatagttgaaggcagccaaagaatattcattatgctgacattgcttaaggttttaacttttaatgtttatctatatattaaaaaaataataactaaaaagaagaactaatattctttgataaaaaacttggaactttcaatgaaaattctttagtcttgaatgcagaaagcagtcttacaaatgcagcaacttttatcaacaaataacattgacaagcattaattaagtgttagtttcttttgaaaatgaaaagagaatattttgctgcaatattctataatctagattttttcttatgacatcgttgcacaattatagtttcctaattgttgtgatcatacatctttaatagcatatttgtactagtattttttgatatttcatttaaggtaaaatgtgaaagctaaccatttttctaatctcgcattgtgttcatacagggtgtgtttgaaataaggttgttcatacaattcacagtttgtggttccaaactctaatcaatctggactaaactatttaatacttaattaaataaatctaacgttaatagttagtcaatctggattgtttataattttctaatttggtcacggttttagaatttttgacaatagttcaaactaaaccacctcattttttatatatacgtatgttatccgtgttttcccatgaaccatcacgtggtatttacatacaacaacattgggaccaaatatcactacggttgactcgagaacggtctgtgggccctgacccatctagcatcacctgggaagggtatacccgagatccacaccaatggcttgggcccgagtacaataaaatgtcgctaaggacaaaaatgcaaatgttaagcctcaggccccaggagagtggaatctacattaaggtgctcacaagaagacaatgtgcctgacgttgttaaatttttttatattatataatatttagattaaataattaagttatacataattaagtgtgacaaagtattaattttgtcaaattgtaacatacattatggagttacaaaatgt

SEQ ID NO: 84839 - DNA, 628 bp, Cannabis sativa
aacattacattctagatttcctacttgtgattgtgagccatatttttatgttacaatcaaacataattatataaattttcatttaattaatataggcatataaaataaattgtttgagcactattttttatattataaattattctaaatttatcaatactttataaaatgtcttaaataattataacgtacatgactataaaaaaattagactaaacttatttcaaaatagcaaaataataagaaatgcatcaatacactttttttttttgttttcttgagatgtattgtagaagaatcctatttttttttttttaactccaatccattacatttagaagattattatgtcttacaataaagtgtcactatgtgaatagttaacagttcataaataataaaaattattaggtaattatatagtacaccttctacgatagtagtttcactacacttagggatgcatattttctctatggggatggggcctagcggggacctgcccttaatagggtgggaataaagattactttttgttcccgaataataaacagggtaggaacgaggatgacactctctgccactgtttaatttattaattagctttttaatattttatattttataa

SEQ ID NO: 84840 - DNA, 672 bp, Cannabis sativa
  modified_base (503)..(503): a, c, t, g, unknown or other
tgtgtaggtatgggactacacagttgaagaggacttaaatggattgattggtactacccatatcaacaaggtgcatcttattatttggtaacccatcacgaaataactccacggttgagcgtgcttgacttcagataatgtcacgatgggtgatggcctcttgggaagttttcataggaaatgtacgagtggggacaaagtacgctagaaacactcgtgttggtttgtagggtcactcgtcattccaagtagcagccagattgacgtactcgtgtaaagagtcattattccatgggtgtaaggacctaatgaggcttgaaatggggacgttacaaatggtatcaaagccttgacccaactagaagtgtggtcgacgaggacgtcggatcccgtagggggtgattgtgacagtcagtagtttcgtgatccgtaagggaaaattccaggtaagttgtgcaatcccacatcgcctaaagacagtcaagtgggatgattctgagacngtgtaggtatgagactacacagtttaaaagagcttaaatggattgattagtactatatgtatcaacaaagtgcattttgtttttcggtagcccatcatgaaagaactccacaatgaagtgtacttgacctgtgataatttcaggatgggttacctcctaggaagttttc

SEQ ID NO: 84841 - DNA, 581 bp, Cannabis sativa
tagttctttgaacttaccttccccctttggtattgtgctcccagattgtaaactcttataagctcattttaacttctctgaactttatttatcttttgttaagcgttatgtgaataaaattgttcatggtgttgctcgtagctcttatttatgcccagcttgcagtttcaatattgataatatccgtgctggatttttatctattataatggttgattctatttattccataattaaagtttccattctttttaataatttttttttatttaaatgtttttatattaataatgaggtatcatacgttttttttttattaagttatttttggcaacggtgatacataaaaatgtaatcatattacgaaaattacaaacatttgaggctagctcaagtggtcataggagggtgcgtgtgtgttggaggtcttggattcgagtctcaggttatgcattgtaatatataaacgcttaattcaaaaaaatattatgaaaattacaaaatttataagatctcaagctaaatataaaataaagtaaaatagaaaatatataaactaatgttcaaatattattctttac

SEQ ID NO: 84842 - DNA, 540 bp, Cannabis sativa
aattttttattttatttgtttgttaatggctataaggctatgtttggtaggaaatagggagattagaatggatgagagtaagatggagggagagtttagaaagtagtgaggtattaattgttaaaattactataatatcttttcttttaatattaataataattattgttttaagagatagttttgatatttgatatatttatttcgttcttttttttttcttttttttttttaatttttaaagggttaatagcggtataaatactcactggtataagtacttaatgtttgtaaaactgtaatttttctctaatttagcccgcacagattctgttattgtcttaaatataacacatataaggctccgattcaagatcattaggtataaacaaaaacatgtagtatcaattacttctaaatgttcttttaataaattgaagaaaaattacagttttacaaacaatagatacttatgccacttgcaaatttaaaactgtgaatatttatatcgctattcgctcttcttcaaaatgtggaggg

SEQ ID NO: 84843 - DNA, 3147 bp, Cannabis sativa
aaaaatccttaattagccaattataaaacattactagaaatataagataaaatactaaacgggttcctttcgggatggagagtgtgatccccattcttgcccagtttaacattcgggaacaaaaaataatctccgtcaccgccctgttccccatttagatggggaatccccgctctatcagggccgagtccccacagagtccatccccgtaagaaaaatatgcatccctaactataagtataatttaatattgaatcttatttattttatttttataaatattataaaaaaaaaaaagattaatcaattataacacaacaattcatggcaacatggatggcaatgctctttcttataggatatagtctcaaggacaagctatctgccacacctagcatttaatttattaatgtaaaatcaatcatataaaagagtaggtgttttttccttcattttttaaaaaagaattttgaagaaaaaaaaaaaactctcgacaaagtaaggcagaatatataaatccaaaatatatttttatatttttatttttttacaatgtaactaagatggcagaagactggccacgtaggatgaacgggacccacagtggtgtttgtggggtcaaaaaggtgggacagactggttcttgattggctgcagaagaattaaaaaaattaaataaagagaaagtcttgttgccaggtcattttaagtttgccctgaccaatcttttaattttcccattttagaatttattgagaaaaattaattattttttataaaataggttaaaatcgggtgggaaaaataataatataaatataggaaaaggagggcccggaatttcctggcattggctcagacttcaggacggtgagaaagagagagatagagaaggagaaagagaaaggaaaagagaaagagaagaaagggaaatagagagagatagagagacgaagagagagaaagtctctcttttatgttttttttttgcctaaaaccctgtcctctctctgtctctctctttctctctctagaatctctcttttcttcagttttttttttttttttttatctctacactttcttctctcccttcctcattgatctgcaacctcaacctagctctctccctctctctcccttccctccttctctctctctctctctccctcgcccctgacaaggataatttgtctttgtattgtcattgacatgaatgagcctcttcgtttcaggtaacccgttttgttttttgtttttttttttctgggtcggatttagttttgttcgttttaatgtgaatacgttttaattgatttgaaggctttttttttggtacgaggattgtggacttgaatttatgattgctctttgagctggacattgtacaattttctttttcttctttttattttctctcttttacagctctaaataaattttcttagatttttttttttttggattaatgcagtattgggtttggaaaattcttaataagctttaaaaaactttcataattttctctttggttttggattttttttttaattagagaggatggaaaagtaagtaggattacaatccactctatttcatttatattatgtatctataatctaggcaaattttgtctgttctcagatttggctaaaactttaattcattactcaaatctgaagttttgaaaaagttagaaatctgggtatacaacgcatttagattatagctccaacaaagaggcgacttttttcatcttcttttctctctctcttttttttttccttcccgttatttatttatttatttttgaaagtctttatttttgcatttcaattttgatgctctacttttgattttgcttgctgggtttgataatacaatggtattgttttgcaggaatttgtgaaaattcaatctgggatttctgcaaatcgggcctttgaaagagaaatttgccataatcccaaaaggggagacgaagatttgggtattctttcaggtgggtatgtaccaactctaatttattttgagttgaaactggtgagagatgacgaggggaaggataagggctaagctccggcagagcaacttgtacacattcaattgcctccggccaagtgccactgcaacagatggcccgcttccgatcccaggtcctggccactccagaactatattttgtaatcaacctcttctccatcgtaagaagcctttgaaatattgctctaattttatatcaaccaccaagtacaatcccattacgttcttgcccaaagcgctttttgaacagtttagacgggttgccaatgtatattttcttttggctgctattatctctctcacggccgtttctccattctctccagtgagcatgattgctcctttagcctttgttgttgggcttagtatggcaaaggaagctttggaagattggcgtaggtttttgcaggatatgaaagtcaatcttcggaaagtgagtgttcataaaggaggtggtgtttttggctacaggccctggcataagatttcagttggagatgttctgaaggttgaaaaggatcagttctttcctgcagatttacttttgttatcctcaagttatgaggatgggatttgctacgtggagactatgaacttagatggtgagacaaatttgaaggtaaaaagatgtttggaagttactttacctttagatgatgatgagtctttcaaagatttcaaaggtacaatccaatgtgaagacccaaaccccaatctctactcctttgtgggtaatcttgatcttgaccgtcaggtttttcctcttgatcctagtcagattctcctcagagactcgaagctgaggaatacagcttatgtgtatggggtggtgatatttactggacatgatagcaaagtcatgcagaatgcaacaaagtcaccttcaaaaagaagcagaatagagaaaaagatggattatataatatacctccttttcagcatgcttgtgtttatttccatggtgagttcaattggttttgctataaagacaaggttgcacacgcctgatgcatggtacttgcaacctaaaaatgctgaagatatgtataatccggaaaaacctgccttggcaggacttattcatctagttaccgctctcatcct

SEQ ID NO: 84844 - DNA, 1179 bp, Cannabis sativa
aaaaaatgtacttctttgtatagaacaacactacatcttaattgatgataatataaccttaagtatatatgtcaatgtttgttttattctaactcaatattaatattagataattgttaatatcaaatggttatttaagcatatatatatatgacacatcatggtgtttagaaaaaataataattttaattaatgataaaatattggttcaaaataggaattaaagacttcaaagctagcttagactcaatatatgcctcatctgttacgcaataatatatatatgcaatctatgcattgaattaaaaaggtagaatatgtcaatgtagtgactaagttaataaaaatgtatattttaattaattataggaaatttccatgaaagtcaccactattttagtactactaaaaataataataatataaaaataaaaataaaaactatagtgaaaattacattatgtgtactcatttttagactttctcgttctttaattcttaaatagaaaatctctagatttataacctttaatgtgattaattagtgtaatttaatattccaaataaaataacaaaaaaattccaaggaaggcatattatttttgacccaacttcaaaagaattattgtgtttcttttttttttgtatgcatttggtttttttattatatattttattattttgaagaattttttttttggtgttaatacttagtcttgtcgttgaatttgtgtttatgtgaaaggtctcattctccccatattacccattactttttccaattttagtttagatattatcaactaagggcttctttagtacatcatgatgtattgtatagtgttagattgtattgtactgtattagtattatttaatacaatactatgtttgacattaacttgtactaataggttttgtaaaattataaattttttacaataaactcaattccaaccccgaccacggcctggactcggaccctagaccctggacccaaatgatgccatggacccaaactgggacttggaccccaggctcaaacctagactcaaaccccaaacctagacccccgaaccagaacccgatcccagacaacatactcagactcggaccctagacccctgattaaggctcaaattgatacattttaagcctttatttgtacacatataattaa

SEQ ID NO: 84845 - DNA, 632 bp, Cannabis sativa
caattattcataattatctaattagggctttgcaaatccattcataattccagggtattacaatatggatcaatgtaatcactttatatggaataactcattaattacgtaagtatcaaagtatatttgtaacatgcagactgtaaggtcttaggcaaggaatcaatatacaaactggtacttagtatattagcgaaaaaccatatgttgctgaaggcgaatagcgaggcatcaaggagagtacacgtagggagacaaaagcgccatatatcaattacaaaagcccttagtgtacagtctatgtgttatagtcggatcgactcaagaccaagtaagcgaggtgtccgtctcgctatgggaagacttcctataacttcatcctgttagtgtcagcgaggcttacgaccctggcaagtcagaagctaacattcaaatgagcttcgaagaacccttcgtaaataagaactgcgatcgatacaagacatgcatcttcaacctcggaaggaaaaatggccccagcttgctattaagatcactggaaccaatcttctgtcgagacaactctagatacaataattaaggacgtgtttaaaacacgatcattttgacccagtaaaagtgggaaaatcaca

SEQ ID NO: 84846 - DNA, 963 bp, Cannabis sativa
aaaaacactttgtaagtttcatactgtatattgtgttaagttttcactgttgttttatgattattttttagttgttttactgttgtttataatccttcacttttgttgttttactgtaggttattttataaaaaaaataatatttttgtaaaaaattctatatgacagtaaaactataaatttttatccaaaatttattatttttgtaaaaacctttttttttagactattgcccaacttgcacgcccgcataccaagcacaagtgtcttttaacatatttctcttaatttattggtatcaccattaatataggaacttttttttttctagtcctattggggactctattgaaaattgccttccttttatgaaaggtttctttataaaaaggtaaatactattttaaactttttattttgtaaaagttactaattgtactctctgttttgttaaatgacaaaatggatactgcattttctaaaatggtaaaataagaccctgagcttaatttttttgataactttcttttttaatataaccaacttgaacacaattcctaatacgaacagatacagaaaatgttatcatttttgtcataagatcaaattattattaaattttcttttgacaaaaaatcagttcaaggtcctatttgtaccattttaaaaaatacaggatctattttatcatttaacaaaatagaaaagccaattaaaaacttttacaaaacttataatccaaaataatatttaccaaaaaaaacaaaaatcaaagctttcttttcgtgtttggtgggatgattcccgaaaccataccccctttattttctggcctcacatatggtcacatgcctttacctaccaaatcaaagttaaccaattatttttttcgtcaattaatactgataagattcactatattttcgtgtttattggttgtgacaaactaactaattatttttt

SEQ ID NO: 84847 - DNA, 747 bp, Cannabis sativa
cttcatctaaacagattaatggttgttttctgcctgttctggtgttgttgtagtggttttgtctgcgggtgtgaaacatgtagacctcgttttttatttttgatgtttacagtataaaagaaaaaaaaatctcaaggcagtataaaagttatttttgccgtgtggcagtacttttgtaaagatttagtcaaaatccaatatttttgtaagtttccctgaaaatatgatattgttaagaatatggggcacaagcccagctcataaacgatcaactttatttattattgtatgaacatttttttgaaggaattatttatcttatttatactgttactgtctgtgagactattatttccttttcaaaagtatcatatctcttacgtcactattaataattgtaacatgtaactatcgtagttactaaatcatatggtacctaaggtgtaacttagaagttacaaatatggtaattgtgagtaaaaatatgttaattcacaaaaatgattaacaaacagtaatcaaaccataacttataaatttgataatctcttgaaaatattattatcacatagttacaaaatgattagtataattagtttcataagtcaaacaaattgtcaaaaagacatcaatttaaaagtaaccaaatcatagcatatagtaatgataaaattgtaacaaagagttccaaactattaagtgaataataattggatgaattctttcaaaaaaaagatcggaagagcg

SEQ ID NO: 84848 - DNA, 1612 bp, Cannabis sativa
  modified_base (1442)..(1442): a, c, t, g, unknown or other
aatataattagcgtacctgaaattcaggagttagtcgactttcaacaaattttaaccaatcagcaaggtcgatttcgggatgcttttcagggacttgtgccactcgtcccacatccttctcttctattgcgggcataataatatcttttgtcatctcattcttgaagtctttcattaacttcccagcaaggatgagacaatcatgtttgaaggaatccggcacaatgaaacccgtctagtttgaaggaaacaaacacggttagagttaatatctgaattaataaaaaataaatcaaaattctaacaaataactgcttacctgtatatctgtccaaactttatttttcagcgtagggttgacttctttccaatttatataggacaaccctatcgtctgatggcatctaactcctaaagtcgatataagcttggagtaacttttgccgcagtattgtcctttgtcattaatctcgagggcccctcttttggcttgatccattagcttggatatttcattcatttgagtaggtcctcatgtaggcattattgttggacactctgcctctgggtctgaatctgatcctgaacccgagttttccatatctacaccattaataaacataatttaaagttagttatatatataacaagtaatctatacgaaatattaaatgcataaaaaaattatgtattcagcataaacaaacacaatataaagtaaactatattgtaacaaacaaacaaaacaatacaaaacttggtttatgctaattctaccaaaattttgacagcataatggttgtaattggacgttcccaaaaattttaaaagttcctaaagtaacaaacaaaacaaatataacaatacagaacaaacaaaataacataaacaatacaaaatttctccacccatttgactgtagtacatgtattcgcagaacctacttcactacggatgaataattaagatattcaaactcaactaagcatgcaatgataattaattataataacaaaaagttagcgaatggatatacctatggaaaatccgttcaacacctatttatgtcgaccctcaaatattagcacacaaacctataatataatgcaatatacaaccaaattagaattttaattattaaattacttactagttattaaaaattgtaacaagttactagttactaaattttatagttaactttttaaaatatatatatatacatatacatatacaatcaattatatatcactaacataattttaaaaatattaattctaaactaattaaatccctactacctcattctcattaacaataaatatatacacaaaataattacacaaaatacacaaatagaatatatacaatatatatacacacaatatatataaacacatattcgatgataaaacacaaaatatatacatatatattatatntcaagttaataaatatttaccttatatacgctatccggtgataaattgcgacaaaaatccgaccacctatagcacacacacaatataatattaataaaataaaaaaatcctaaaaaattcatagaaacaacataataccaatgtaaataaataaaataaatagaaagcat

SEQ ID NO: 84849 - DNA, 1433 bp, Cannabis sativa
caagtcccggtatgggttcttgtctgagtataagtttaggtttgggtcctattactgtctcatgtctgaattctagtccagacctagtctgattccaattcagggtccgagatcgggtttggatcccggtctgggtttgagtttgggtctggatcccgatctgggtctgggtccaggtataggtagggatccaagtccgagtcctagactcaaacactgactacgggttaggtgaaagccataagtccaaattcggatctcagtcttggatctcggtcttgttctagtcccaatcgtgggtgttcggctgggtccttaatttgggtttgggactgggttcggggttgtgtccctgtagtcaggtcctcagtttagggtccaagcaaggtcaggtcccgtgtctcgagtctatggtcaagttttgggtctccgtcccggttttatggccttgtttcaggtccaagtgcctcacctaggtcttgatccttggtctcgatctgggtctaggttcgggtttggggcctaggtcccccatctaggtccggatcctaggacccagtcaaggtccaagttcaggttcgagtttggctcccaagtttgggtccgagtctaggtcccagtatgggttcaagtttgagtctgggtccgggtctcgatctgagtccaagtccctattcggttccgggtcggggacatgatccgggtcccactcaaggtctagaccccaaaccaggttgtggtctgggtttgggtccgggtttaggtcatgagtttaggtctaggtttgggtttggatccgggtctgggtctaggtcttgggttccaatctcggtatgggtattggtctaggcccgtgtccatgttagggtttagggtttagggttttgagtttaatatttagggatttagggtttaggatttagggcttaggtcttaggggtaactgtaaagagtttagggtttagggtttagggtttaatggtccgcttccagttccggttcaaatttcgggtcacaagatacgatttaaggtttgggtatgggtcttggtccgaatcctagtttgggtctaggttcgtgttttggctcaggtctgagtcttggtccccaatccaaacaccaaccacatgtcaagtctagtttgagtttttgtatgggttctagttttggtccgggtctaggtcaaggtagaggtcgaattctttaatttagacaccgactatgggtcgggtccaagcctcggatcttgggtcctgccccgggtcaaaatctagatcctggtgcagttttagctcatgtcttgggtcctggttcgggtcttaggtctaagtcatgggtcatggtccccgattcaagtcaaagtggtagttcccgatcttggttagggtcccagtccgcgtgtaggtcctggtctgtgttcagtaatggtcctt

SEQ ID NO: 84850 - DNA, 564 bp, Cannabis sativa
gggaagttggtggagtgacattattggttgatccaatcttggtgggtaatttggattttggaatcccgtggctttatgatgctgccaagaagtttttgaggagttttcaggtactttctctcttgtactgcatcctctattgttatctttagtcctcttttttccttttgggtgaaaaattaatggtaggaatatttattttgggagagtgtaaggttaatatggatgagtgttcttattgtttaattttaaatgcagctaagtgatcttcctgaaattgattgcctgttaattacacaaagccttgatgatcactgtcatttgaagactttgaatcccctctctgctaagtaccccaatcttagagtgctggcaactcctaatgccaagaaattactcgacccacttttcagcaatgtaagtaactcaccttagttaattttcttcatcctttttctggtttgtattggactgcatttataccggttatatatttggttgttgtgaaatataggtgatatacttaagaaaattatctcgtaaaaataagttgtggtttggtta

SEQ ID NO: 84851 - DNA, 3790 bp, Cannabis sativa
ttaatgttatgtgtaaatcaatcattaaatccactattaactattaagtattcaaaaccaacttccaagtgactatttcgttacctgattagacaaatgtgtagctagttagactttttagtaagcagatttcctcagttttcttttgtttgataaactattaattaaatttctctaacaacgtttggctaaaactaggtaattatgattatattattaattaaagttaggccagatactactatttaatatataacatactagctttcatgatgatgatcaattaattaataaattagttattgcatttcagcctaaaaggagaacaataatgttggcaaagatgttaaatccaagaaaggaaagaagtgactctccactcaagatcaactcatcgcaagacaataagtgtagctagtacaatgatgtacctcaatttgtcatgtagagttaataatataaaggttgaagttatattatttgtaccgattccatatactttgttgcccagaaagcttcaatgcttcttctttttttcatcatctttaattttgttttctctcttttcagggtcaaataattgattgaacctcactttctcgaaatacagccccggtgtcttcttttttaaaacatttggtatctcttactcaaattaaaagagggaattatgcaaaggaacaaaagagaaaccaataactaacaaaaatctttggtagatgttgggaaatcagattccatatttagtggagagtacgaattgaagatgtctagtaatatttgcacaataaataagattggatgtgtatggattggaaattgagataaggtagtttacagctataaaagaaaaagataaaaaaagatttgtactatatagctatactccccctctcccttagtctcctatagaacattataattattctatttgtgtctgtggttgagtctgttgggaaagctaaattaaacaaataaaaaagaaattgatcaaagtgaataatagtactacgtgctgaatcaatacaatactgtacaaaaataccatctcatattggttgccatagaaaatgcatgtttgccactgttcggttctcatatttgtaagttaaaagtgtgtggacgacattaaaaagtatacaataatttattaatataatttcaaaattatatattgtttttcttttgaggcaagattttgctccatctcagatttaaagatgtaattatgatgttaaaaagttttcccgaattataaatagtactaaaatgtattaggaatactggtggcaaaattattcgaactttttttttttaacacttaatcacataaactcaatttttgacagcgaaatttactgattccagtttgttctttacacttccttccaaaaagctcacttaagtgccacaatggacaatccacatgtacacaagtgtacacactacaagaatgatgggcatcaccaacaacactatcactgacgccataaagtcttcactaaatataagagtatcaccagctgttaacgcagattttcgttaaccaaaattaaatacccttacagtaattaatatctacagaaattaataagtaataaaagatataacaactctagatatttttacgtggctttgtaattaaaatttacatactccacgagtccttattattatgcatatttatgtttacagaatacaatcttttaatttgaataatgatcgttaagtctcaaacttgtcgcccccgaatataggttgacagttatcctatttgggattgattcaagtataattgttcatgaaacgtggacaatctttacgttttatttaaatcacatgtgagataatattaaataactactcaagtgctctttagttatcctttacatggttattgctgatgtggaaggttatatctttttttattcgagtaatcttctttgtccatcttgataagaaaaaacgctaagtgttgggaagatttccatctcgttatgttctctttgtgacttttgtaatgcgaggtgatcttctcgctatgtgtaatgcggcagtttatgttgatacattcattctcctcgggtggatgaatattctcttcttgtttatatattctgaggcatgcatatgtctcgttaatctcaaatcaataattattattcttgtctcacttttgactataaaactaatgagttttcaatattatctatttaaccttttattaaatagcaacgagttatttaacatgcatttattgaataaaactaattatattattcagaattgattcatattccttctattggactcctgtcagtttctgaagtgtattctaatttcgaatataacaccagcaaaatttaagtgtacatctgtgataaaaatgttttcttttgtaaaataatatatcaatagcaacaagcactatattaatgacgacaatgtcgtcattgataaatatattaatgacgacaaagtcgtcagtaaaactttttttaaaaaaacagactgttggaaagacatgctttttccctttgaaactatcgctgacgacaaagtcattaatactcactactataatatgggcctttagaggctattttttttaactcttttcataaaaagggaagctaaagggtgtaaaaatacccgcctaatacaaaattgacatttagaggaagtttttaataaaaattgtaggtatataatttatgaagtacatttagaggtaattttgggatcaggagttggaattaccctctatggcgtcgattatttgaaattaaccgataccatctgtatagctgacacgtgtaattttttacactaaggcgtcagttaattttaaataacggacgccatagaggtatatattaaccctttcaacatacagggcctcatttcgtcttcttctttattacgatacacacagcagcccataaaccacccaaacccttgccaaccaccaccctaaatccttctatctccactatttttacaccattttaccctattttttaaaaaaacttctattttcgatacttaaacccatataccaaaaaagttacaattttctcctatttcagtgttaaccaaacctattggaaaatagtggtgggtataatttcggtcaccgattttagttgagaaaatgttaaatttcaacatctattaaggtataaatatgatttctattcatttttgtattgtacattgctttattttttgtttttataattttttttttgggatttttttatattattaacattgttgttgtgcatgtgcatggtggctggactttttgcagaattgatcgccagattgtgcttataaggtaaaaatttaaaccttaataaatagtatgtatatatatatgtattttgaatatgtgtatatattgtgtattttatttatgtaaatataatattgtaattgtattttatatattctaaataatatatatgtatatatattgtgaatgagaatgagatagaagagattaatgagtttagaaataaagtttttaaaattttgttagtgtgagatataatttattatatatgtatgtatatgtaaatttttcaaaaatgtatataatttagtaactagtaactagctacttttttatagctagtaagtaattatataattaaaattttaattttattctatttcattatattgtaggttgtgagctaattttcaaggtttcaaaaaaaattagtattggtcggattttagcttgctataggtatatatattcactaactttttattattaatt

SEQ ID NO: 84852 - DNA, 504 bp, Cannabis sativa
aaaaacccagctgaattatcaccgagaaagcataaatgtgactacaacgggtcttattatatgtattacaaaagaaggaaaagaaaaactccatgaaaaggagccgaaataggagaagaagaaaaagtaccttatgtaacgaggagttaaatcagaggcagaatagattgaaggatcgagtccatttgcgtcaagaaaatcaacgaatgcatctggtaagggtgagtttgatgttcgttcttccatgaatacgaacctgatgactgatcagtactgctttctcaagggaaacgggccaaggagacgaagctgcgaaccctaaacaaaacgacatgcgttttgcatgagttgtgttttatttatttattctcttcttttttttccttggcggagtagtaatatatttatgggatttttttaattatatacttaaaatacaaattaatcacgaaaatctcttaataaatctcaattacaataataccttgacacatcatcaaaaaa

SEQ ID NO: 84853 - DNA, 624 bp, Cannabis sativa
  modified_base (592)..(593): a, c, t, g, unknown or other
aaaaggaaaaaaaaaacaaaaatttttacatacattaattcgaaaagacacaaaacaatctaaaagtaataattcaaattatattgtgcatataatttgataataacacaatgaaaggagaatcgaagtttacccgaaaataacttagaagaattttacaatgaaatacaaggtactaatatttttagtattttttattcagttgttggaggaatttagacaacaccaaaataaataatataacaaagatatgagcagagaatatgcgagtactcaacctagaatgaaaactatttaagctacgaacacaaacgtaccagaattatactgaaaaaagaacacaaaggaatatagtgattcagtcagatcacggtctgcttagtccactgttgcaaggattttctgtcttgtccatttcatgttggatcactcctttatatacaaagcaagtgccctttaattatacaaagattgaattcattatcaatccgtttgtacattaatttacaatagttaaattaataaaaatgtaaatacaatataaatgaggaagagtttcgtcccaatttactgttgagttttatgccctaannaaaactctatttcaatgtaatccagattatt

SEQ ID NO: 84854 - DNA, 813 bp, Cannabis sativa
agagagagagagagagagcgagaatgtgtgtgtatgagagaatggggttagagctatgtaatcaagttcttatggtgtcaagaacttgagggtgtactcggggttggttgtgaaaactgtgactgttcttacggtgtaattctcaagattcagagtgttgtatgctctaccattggtgtttgtaaactgtctaattctttattaattagagcttgatgctgtttcttagctggagtatggccaaggatcatgttagatatcgaggacaggaaccaagataaaaattggcgttcttactcttgtttttttctgttctttttcactgtgttgtttaagtgtttgtgatttgttgttgttcattgaaatggttgttttgtaggtttcactcaagaatcttgttcttgttactgtcaaattttcaacaaattagagcaaaggtttaaaatccatattgagaagggaaaggttcaagattcaatcaagaactcatctgcactaagccatgaatagaacagcaaggtttgaactcgagaagttcaatggaacaggggattttggcctgtggagagaaagcctgaagggaatactcattcatcaaaaggtttccaaggccttgaaaccaaaagaagaactgactgagaaattgaagaaagaaaaacttgaggatatggaagaactggcctactatacaatcatcatgtacctgtctaaaacatttagaagaaaagttcaaaacataaagacagctcgagaattgtggagaaaacttgaagaaatttacatgacgccatctctaactaacaagattaattt

SEQ ID NO: 84855 - DNA, 628 bp, Cannabis sativa
gtggtgaggcaacttgaatcaatttgtagagccttcctatggaaagaccaagcttaatcaacaggccctggtttagtagcatgggaatcactgtgtcaatctaaaactgctggtgacattggatttaggaaaatataggaatggaaccgagctacaatggggaagtatatatgggcaattgctcaaaaacatgatagattatggatgagatggatacatagtgtctatatcaaggatagagattggtggagttacaaggcttcagatcattgtagttggtattggagaagccttgttaacttgaaagaacactttaaaggaaaagctggacagcagttatttactcaacactatcagattgaggaaggctacaaggtactttgcccaacccaaaacaaagtctactggtctcgtcaggtatagggaaggttaaacactcctaaacactgctttattatgtggttgtctcgtcagctgtctggtgtatacaatttggagagctcggaatctttttgtgtgggaaaactcaaagccggatgtagagaaggtaataacaggagtaaaacaagttgttacatatagaatcaatgtagtatggccaaggaaagtatctgtagaggatactgaa

SEQ ID NO: 84856 - DNA, 1099 bp, Cannabis sativa
aggtgaaggggagttcgaacatgatctcattgtggccatttatacagttggaaaatacaatcggttgaacaaaaataggggatcgtgagtataactgacaggaaagagagaggttaaaaatgatagatgaatcgtggctgaaatggatattggggaaaggcaagggttagggcttcaacttcaacaaaactatccaagaaatgaaaggttttgtaaaaatgtttaaaaaaacgattggtattaaaaatgtaaaaaaaaaaaaaaaaattatagctaaatatgacacctagtgttaaaatccctatttttttttttactatgctagtatattattttttttatagtggtatagtaagttaggattggggtatatttttatacaatctaaattttattattttattttgccgaatgttaaatttttatacacaaaatgtatataccataatgcaaaatgtatataccacaaactaaaaattaatattccatcatttttttttatcttagtataaataattgatatatcataacttttctctctctaagttagcatgaaatatataaatcatattcatatataaaaagtgaacagccaaattcagtttataaaaagtgaacagcaaaattcagtttataaatcatattcagtttattgtatatcaacacttgttaataaaaagtgaacagccaaattcattcaatagaatatatatacccatccattacagtatataacatactccaactataattgaaaaataaactgatgtaccacaatatgataacaccttatgtatagtcaagggtatttaaggtagcaaaaagtaaaagagaacatttgctttattattctaaaaataaggaaacattagcttttactagagagaaaaataaagctatttactagcatttctctaaatttgtacgcgttgttacggattgcatggtgtaaagctatgtatataatgtgatatgataataataagattatttatatatggccacatcccttcactatatgtagtttatgataagttggtctctattttttttttttttttttgtaagttgatcttttaattttaatttttaggcaatt

SEQ ID NO: 84857 - DNA, 830 bp, Cannabis sativa
  modified_base (410)..(411): a, c, t, g, unknown or other
aggtctacttatccgattttgattcatttttatcgtccatctagttttcacaataactaagatccatgaagtcagaaaattcaaattcataattttttagttctcatttctaacatggaaaactcactcgaaaatgaagagttttgagtctctctttttcacagaatggcaacatctccgagaactaatgatcaacttcgccaaagcacagaaacagactaagtgatgtcaaaatatcacttaggcatcatatagtacatccgacccttggatgttttttcacttacccaccatccaggttgatgtcaaatgttaacctgggcactcagatgtcaacttgggcgctggatgttaacctcagcgctcagtcatgaacaactttcaataaaacagccataactcactcaatnntgatctgattgacgcgattcaacttgtgtttcaaagctattttaatgctccatgaataatgtctcacacttcaatcataattctgaagttatcggcccgaaatttcaccctaatagagttacgaaaataagctctaacttacccgaagctgggcctgccgtcgtgaccctttaaaaattgatgatcaatctcagaagttaatttacactattagatcatcatctactgtaaaaaataggcaacatgtattttttttttctacttttgtgggcctcctttacctgtaaaaggagaaaccccttagtttattttttaaattctaaaaactactcacaaggttagagcttctctctctagtttctgtctctataaattggagctttgacacttagcatttttttgtaataccatctcgtgag

SEQ ID NO: 84858 - DNA, 719 bp, Cannabis sativa
taaaatatatttatttttataaattattttattaaatttataaaataatcaacttctcttaatttactctaaaatacaaaatgtttccttatatagagttgtgcattaaattaatatttagcaagtaacataagctacttatcttatagaaaccattaaacaaattagcaagtaacataaacttatcttttatattattattattattattattatttattttgatacccattaatataaaattacatatgataccattatgtaataataacacataacttatatataataccaataaacaattaaatatatgataccaaattattaattatgatagtaaatagtataaattaggaaagtatgtgattactaaatatcaatattttaatactaatttttgatacatttttgttgtattaaattatattaaatgtatctcaatcaatatatcaaatcgtgccaaaaaacaaaaagaataattacataataagctattttttgtaatttttttatatttatacgtttaaattatttttttttacataaattttacggtatgctataaaaatatatataaaaaaaagaaaataataaataataaaaatcaacaaaaataataataaaattacaacataaaaatacactaataggtagtatttttcatgtaataaaattacaaaaaccataaaatgttagaaattctacacagaacatatttt

SEQ ID NO: 84859 - DNA, 1003 bp, Cannabis sativa
caacatccttcttgtgtatttcctaaaaaccagcaaaaatcttctccttcaacaagtttttttcttgtttatacctcaacttgtcacattgactcgaattatcaaggcctgaaaccaaagcgaactcctggatgctaaaccttagcatccaaccaactacattaaaccacatctcatttttattcggctggacaacctccctcaaaaacaaactatggaacaactggtgttgcatagtataagaaggagttcttaaaaagactccaaaaacagtttgtccaaacaattctttctattctggggtcaaagtagaaatgatagtttcaatgattttaaacgagcaagtagaagtcaccagtgtggtatgaaaatcttcattacaaaaattttttatcccataactgaaaaaacaaaatagtaaaatcaattaaacatataaactacaacaactatgaaaaataaacataaataaacaatgcatacataaaaaaataactaacaccaaaaaaaagaaacaaattctgaaatcaagaaaacaatatatatataaaaaaaaggacacacaataacagaggatatacattaattttaaataaaatgtaaatggaacctgtaacatgaaattaacaacaaatgtataaaataaaaacaaaaaaaacctaaaaaatagaaaacaatcaaaaaacatcgaattgaacaaaaaaataacaaaattatatgaaaacaatcacaatctagaaaaaacaagggtaaaaaaaaattccaatacagattgaacaaaaaaccttgaaaaaaacatattacaaaaaataaacactaagataaaacatgaataacacagaaacaataaataaacaaaaagcaacaaaaaaaaaacatttagaacataaaataggattaaatgaatatgaacaaaatttaaattaaacaactaaactaataacacggaacttacaaaactaatttggaaaaaaatgagattgaaacccacaacatcaaaaaa

SEQ ID NO: 84860 - DNA, 1129 bp, Cannabis sativa
tttattgtcaatgctcggggaatagaggctaatctagagaaaatacaagccatcctggatatgaattcatcaacaaagataaaggaagtccaaagcttgactggtcagatagccgcactcagcaaattcgtttcaagatcaacaaacaaatgtgttcctttcttcaacatccttcgaggtaacaaaaagtttgaatggatggaggaatgtgagaacggagaagaattgtcgctatagtagacacgtgtacacatgcccataaggcgtcagttattacataataactgatgctgtaggccttaaaaatcctacaggaaaacctaaatgaatcacttcatcttctccaacgttcatctcctctcaaaatacaagctaaaatcctcaccaaacactgcctattcagtccaaaacaccatttctctaccattttctttcattctttttgcaacttttttaatttttaatacccaaaaaaatattatcagtattagaacaataatatttagtcttaaaagcatagagtgagtgtgttggtgtggctgtggtggctgtaactttgaagaccagatttgaggcataaaaacgttgaatctcaacgtttattaaggttaaaaaaagttatatttaataattttattgtggtatattgcattattttttattttgtaataatatttagaatttgatgaggtaaaactataatctttaatagttttgttataattttttttggattggaataattcttttattggtggttgtgtttgtattacaataatagttttgttataaatttattattttttttaatattaatatattgaatattgtgattgaaaaatgaaaagagagattgaaaattagataggaaacttttaaaataaaagtctagaaattagattctaaaaaaatatattagtcaatataatttattacatatgtataagtagtcttccttatcaaaatagatgtaaatataagatgaaaaaaaaattaaggtttttttttattgttatgtgcatattaaatttaatttcattttatttttattttaactagttattatttttaattcatgttcatatatttttattattaactagttactaatttactaactagttactca

SEQ ID NO: 84861 - DNA, 726 bp, Cannabis sativa
atacgcataacgcaacaagttcccaacaagttcccaaaagaggtcaaagttttattttgacacctaaattctgtttaaagctatatattgtgattgaatatctcattaacaggtctttgaacacttagggtgccccttatttgactagatgagtgatcatttttcagaaataatctagaaagataatatcatatataatataaagtttataaacgacctattttacacataccctattcaatctatctcaaccatacacttcacattctaacatcatctaattcaacacattatcattatgatcttttttacataaagaagtgtaattatataaatgaaatcaagataagcctcatgactattacaaatagtgttatttggtattgagaaagactcaataatgctaattatattttaagtaaagtacagacttaattaaattgtgagcaacaaagctaaaagatctaaaactctttgaataattacatcccaaaaatgaatttataagacttttacaattagcaacaaagttgtcaatttcccacctcgagttggcaattttagagcatttctaatagcgatatcctttaaaggtgtcaaaaactttcacattacctaaaaatataatattttattttatttatctttcacatcatttttagtattttttattctacaatattctaatagtaaacagttttgaaaattattaaaataatattatat

SEQ ID NO: 84862 - DNA, 532 bp, Cannabis sativa
tacatcaatcctttccctcttaatgcacacttaactagatagccaaacacaaaaacaaaaatattgaatacccaaatgattctgaaaatttaaacatacagatccaaattaatcaaaaaacaagacctgaatagtaaaatggaagtttaaacagaaagaatccaagttgagctgaattcccaggatttcaaagcactaggcaaaaataaagggacagaaatctttctacaaacaccaaaagcttgaaaagttaaagaaacatcttctcaagcttgaaaataatgtttacgagtacttgagtacgcaattaatagtgtttgaaatttctaggaattacaagtcaaaatgaaaataggaatgggattttggaggtggaagaggcagtggtggtttacgagcatggtgataatggcagaagaagaagagaagaaagagagagaaaaaaaaagatttttttttgggaaaaaaatagaaaaaatccaaaaagggtaaaatattacaatattactatgggccggcccaatcaacattt

SEQ ID NO: 84863 - DNA, 529 bp, Cannabis sativa
aaaagctgcaatatacatcatgattaattatttttcttttttatttatatatacctttctttttatgtttgtatatattagggaaaattaattaacacatgtgatgatcactatatattatatatagtctactatacactaattctatatatatacactaaattatttcaaaagaaaaatgtatacatgacactattatgattgtctaccctctctattctatatatagaagatatgaatatatgttgtgttttagggcttagctaggtgaaatcactacaaaagcttactgtgacagaaagcttcatcaattgctttgaatgtggcctctcatcattgttctatttgtatttacagaaaaatgtaaatctttatatttttattatatattggtgcaaaaaaaaaatatttcaaatttgttatattaaaataatgataaaaattaagtttagggtattaatttgtactctttcaaaaaatacagattattcttattaaggtttgatatgtaacttttgcaacaaaaaat

SEQ ID NO: 84864 - DNA, 641 bp, Cannabis sativa
aattaatggtaataaataaataatttggacattcacatcattattattatttataagaagtttaatttttaaaaaaaaaatctaggcaccacttccacgttgaagacccgtatgatttagtatatttaagtttggataaaaatcctaattagtgaattaaaaattagaaagaaacgtggatttagccttgacggaaaagaagtgtgatttagctcagctgagctcagtccaactccacccgctgcttttcgaatcatttcttgttcatttcattcctcaaattcaatacacaccaccaatgcctttctagggtttccttcccccaatttcattctcacgatcttctcttttcaacatgcgatttcatacagaaaacgacaactttgtgtcttttcacccaatttacaatcaccttctttcttgttcaaacttcaaagtaattgtgcctcagcctgtcaattttgggtagaatgatttgtgttttcagcgagacgatactttcggctacccccgttcttcaccgcacactaccgtctgaattttgaccgacagtcagtatcacatatcgtaatttttttaatggaatttctgtttttctttccctttcaaatcaactgaaggatttttatggtttacgctct

SEQ ID NO: 84865 - DNA, 973 bp, Cannabis sativa
actacgagggagtctttctattcatggattaagaaatgtgagtagccttgaggaagtttcagatgcaacaccattattaaagagtaagaagtttcttagtctatatttgggatgggccggtaatcataaagctgaacttgatttgcacaaagaaagagagctactcaattccctccagccacatccaaacctgagggaacttacaatttggagttacaaaggcaacagtttcccaaattggatgggagattggcttgtctaatttagtaagcctgaagatggtaaattgtcataattgcatctgcttgccgtcgttgggacaactgccttctctcaaagttcttttcattgagcattgtggtgtggtgagaatagattcagagttttattgctctactagtactagtgttgattcttcaattgcaatacaaacaaagccattctttagatcattggacaccttggaatttgaatatttgtccaagctcgaagagtggtcatttatagaaggtggagtttttcctcgtcttaagaatctgcaatttaagtggtgtgagagactcaaagtgtcattgttagcagattattttccatcattgacagagcttgaaatatttgactctgaccaactaataccgttattactcccaagagctcaactcatgaaggcccctttgatcagtttaaagagaatcatgattagcgagtgtttcaacttgacgcgctttgacgacacggcctttcagcacctcacctcccttgaggagttgaaaattagacattgcagtaacctccaatgcttgccaaaagaactacccacttctctttctgatctttacatcactggttgtaaattgctaagaccacgagtcgagagggagacagggaaggactggccaattattgctcacatcccaaatataattgtggatgacaagaaaacataggtattactcttttctcttccccctgt

SEQ ID NO: 84866 - DNA, 1318 bp, Cannabis sativa
gatccccgtggtcaaggccgaagccgtggcagggtttagggtggtcaacatgtgaacccacctcaagctcctccggattgggagcaaagatttgcagaaatgcaagatcgtatcggccagcaagatgaacaaattttgagactaaggtaggagggtcctcctgcaatgcctccacttcaagctcaggttgttgtagttcctgcggtgccagcagaacaacctgttgctagcaaccgtatggagccactatatgagaggtctcgaaatcaagcacctccaatgttcttgggaggtctagatgtgatgaaggctgagcagtggctcacagtgatagaaagaattctgaatttcatgggggtttgaaatgattgggtgacctgcaccactttttagttcctaaaagacgctatcgtgtggtgggaattggtgtccctcacccgagacgtcattgttatgacctacgaggagtttgaagaattttttaatgccaagtattacaatgaggcagtccgcagtgctaagcggaaagaattcttagaattggtgcagactgatggtatgtcagtaactgagtacacaacaaagtttgaccatctggccaagctggcctcgggtattgtgcctacagacttcaacaagaaggagaaggagaaatctagaagctctaaatttgaaaattagacatgacttggtgattactacaaatgaggtgacatcttatgtagagatggttgaaaatgccttgcgagccgagtgtggggttaagtttctacaggagcgctgagtgactccaagtgttggtgggacccccactcttcctactcttgtttatggtagggatggtggtgattccaccactaatcaaaaaagaaaggctaacccgacatctggtggttcggggcagagcaagcggttctgtgggaactaaggcagaggtggacgccagggttactcttaccctgaatgcccatgttgtaagaaatatcatccgggtgagtgcaactggaagacatgcttccagtgtggcatggtaaggcatttcaagaaagattgccctcaaacaaagaaagaagagtagaagccagaggcaaattctacacctgcttgggtgtttgccatcactcaagctgatgctgcagctagttcttctatggtcagcttcctgttaacaactccttttttactgtgttatttgacttgggagctacacattcatatgtggcaacacgggtaattgatcttttgggtaggccatctgattttatggaaagagggtttggaaccctaatgcctagcggggagttggttatctccaata

SEQ ID NO: 84867 - DNA, 697 bp, Cannabis sativa
caattcaatataatacaatgcaatctaattcaatataagatattatataaaaatatgatatataatctcattcaatataatataatacaatacgacttaatataacatttcaaataaggccttaatgaatggatgacttgggcttagctagagagattgtactgtgcacgcgtaactggtagaaaggaggattttgagtcagcatcggcggcgatgccttacactatagtaaaaaatgaatttggatcatatatatatagatatatataaattatgtatttacatcctatcactgccatatgtcctgatctttacatcttttttatttattttattttatttcttcatttcattttactttttacattctaacattgtaatctacccccacttcagctacgataggtaaataagcagtacttatgaaatctcaaacaataaatgaagttcatcactttttttagttttcaaagttgaacaaccactttattataaatatatatagagattaaaattaaattgttaggatttgttcgtaacgtcgtattgtattatattacattttattatattatattaaattaaattatatattatatttttatataattctatgttaaaccttaatttatattaaaatattatatatttatattcataaaagttaataacccatattgttttacataaaaatatt

SEQ ID NO: 84868 - DNA, 657 bp, Cannabis sativa
tcttttagtaaactatattttaaaagtatatatttcataaacgtttaagtcacccacaatttttaaatgtgaattatataaaatttttgattaattaaataaagaagaaagttacaaattattttgaaaatcattataaataatgcttagtttttggatcaattggttatgataacgatgaattattttttataaaatgattttaaaagagatttttgaaaaatatattttttttttttgaaataaactaaaatgtgtacctctaatatacttttcacttatacaaataatcatcttcgaatgtagattgcaatgacacaattcttcatgccaaataattagtggagtagccatttttttaaaaaaaatataaaaagaggaggaaaaagaatatctaatattttttacaattgtaaagttaaccaaaaaaaaaaaaaattagtgaaaaacgtggaggaaagagaaaatcctttaaaattaaataatatttcacatatataaagtaagaaaaaaaaaagcaagacaaagtgttagctgaaccaaaaaaacatgattaaaattaaaacggtataaatataattgtagttttgataattttaaaagttacggtatatatgtaaattagatgtattttaagggtgcagatgtaaattttcc

SEQ ID NO: 84869 - DNA, 679 bp, Cannabis sativa
acaattttctgattgaaccccatatgaagcaacatttgctcaagaaaaacccactccactctatcgtaggccttactgaggtcaagttttaacgccatatacccctctttacccatcctttttcgtttcaaatagtgcattatttcaaatgagatcatgatgttatcagagatcaaccttccctccaagaaagcactttgattttcagatatgaccgaaggtagaattcctttaattctattggctagaaccttagaaattaccttgtatatgacattgcacagcgaaatcggtctaagatcactcatagactcgggatgtttctttttaggaacaagcacaatgttagtttcatttaattcagaacagaaagaacctgaatcaaagaaacctctaacatggttaataacatcactgcttaccacatgccaaaacttctgaaagaaacccggagtcataccatctgggcccggtgatttatccgggtgcatttggaatagagcctttttgacttcttcatctgtgatcggctgttggagataaaaattatgctcatccgaaaccaccttaggaatagaattcaccacctcaacacagtcggccgaagatgaagtaaataaattctgaaaataatccgtcataacatgggccaaaccactttcccaatccgaccatgtac

SEQ ID NO: 84870 - DNA, 1070 bp, Cannabis sativa
gtggaggcttctgataatgcgtattttgccgggtggcaaagtacacacgctcttgagaatccgtgagctcagtgtacagtgtgtattgtgggtatacccctttcgttgccttttgttctctgtccgcgtgctacctttagaagatctcttgctccgggagctttgctaagctcctggcttactggtggctggtgcggattggggcagaagttggacgctcaccctagaggggttgcttacgggtgccccaaaatgcgatagtgctagagttaaggcgaggctctggttgtaccctggggtagcggagaactgtattccgcttgtttgaggagtggcaggaggtggacctcctagaagttgtgctcctagtgtatatctcgatactccggtcaggtaataccctccgtaagccactatcttggcttcttccaaattaatgtatttttggactctcttctgaaagtcctggaggctagcggctccttcatgccacaattcgttccaaaaaggggttcctgtatggatcccggcctgaagcagggccagcagttgtccgtcgtccaccttcttggttttcgaggcctcctccttgaatctctttatgtatttcggtagcgtatccacgggaaatttttttatattggttatggcactaacatcgaggttaatctttcttaccgtaacaaacttccgccggaaactcacttgtaacttgttccaacagtccaccgatcctggctccattttttgaaccattcttcagcaaacccactcagtgtcagtgaaaatcatatacactttgcgtcattactgaccctcatgacggtcatcaccctgttaaatcgggatagatggtcactagggtttgagtctcctgtgtaggttgccatttcgagcattttgaaattttaggggagttccgcctctaagatattttgggtgcaagggtcccggtcctcacaatcaaaatctgagtcatccccattttgtctctgggagactctagcaatgtctttgcggaggatcaccaattctgctaagattccctcattcaaggcgtcccctgacac

SEQ ID NO: 84871 - DNA, 516 bp, Cannabis sativa
aattaattaattaaaaaaattggcaattaaatatccttcggtacactcttcctatattttctccgtagtccaactacataattagctattataattattttattaataaaaaattctttattagttggttactaattaattttctctttccttgcaaggcgcgcattccttttatttcctcttcccttatatttcccttttctattccgaccgtttaagtagtccaaccaaaccctaaacgaaaaaatatgaccgttgtactcagattatgatcttttcactgcagcagcttagcagtcgaagggtttttatgatcattttcgtgggaaataaataaataatatatacgttgatattgtgcgattacatatatataaccttcactctcatcatcattcaaaaaaaaacaacaattactaaatttctctgtacctcgactgagtgtttttgaaggttgagttttcttgggaaatcatgaagaagaagataaatatggggaatgagagaaggatgatc

SEQ ID NO: 84872 - DNA, 813 bp, Cannabis sativa
cagttcttggttttattcttgattatagaattcacatttgtgggtcgcaatgttaacttctactggtaacattgcttccaagtcgaatgctaaagagaatggagtgtatcatgttgctattttctctgttgttttgtgggcccaacacacttgtggtagtctgtctacccatcttcctttagcagcatccagtttcttcttaatagtatattttaagattttattaacaacttctacttgttcgttttcttgaggtctcgatactgatgagaagcttttaataatcttattcctttaacagaattcaatgaataactctccatcaaactgagttccgttatgagacactattttgattggtatttcaaatctacaaaagatgttcttgataacaaaatcgagaactcttttgcaaattatggaaactagaggtttatcctctgtccattttgtgaagaagttgactgctaccactgcgtatttttcccctccttgccctgtgggtaattccccaatcaggttaatgccccatattgcgaggtcatcattctcaactttgctggtggtatgcgatgtatatgtgaaaatctttgacatttatcgcatctttttaacaaattcatgtgtctttgttaattgttggccaatagtatccttgagagataattttctttgacaaactttgcaaccttgcatggtatccacaaaagccctcatgaatttccttgattatttcgttgccttctgctggtaacacacatcgtaagagaggcatagaataacctcttctgtacaatttagctttggctattg

SEQ ID NO: 84873 - DNA, 652 bp, Cannabis sativa
gacatctctagagatgtaaagtctaccattaggatcaaggcacttgtaccctttgtgatttagactatatcctaagaaaatacaaggagtggacctatactcaagtttattcttattataaggtcttatattaggataacacctacaaccaaaggttttaagcattgtataatcgggttgaatgttaaacaagacctcaataggggatttgttgtcaagtatgggagtagggagtctattgtgaatatagacagcagtcctaaaggcttcatcccaaaacttgaggggtaatgaggcttgagctaacaatgcaagaccattctcaacaatgtgcctatgttttctttcagctaaaccattttgttggtgagtggtaggacaaggatgtctatgttgtatcccatggtctgtaaggtacttagagaaggacctaaatcacccccccaatctgtttgcaagcattttaacttcttgcctaactgcaattcagcctcggctttgaagtttaagaatactttgaatgcatcagatttgttctttaagagatataacctggtaaatctagagaagacatctacaaaatggatataatatttgtaattgttgagagaagtagtgtgagaaggagcccataaatctgacacaacaagct

SEQ ID NO: 84874 - DNA, 1199 bp, Cannabis sativa
actgactggtaggagaagctgaagtatcagatgcagctggaacctgtaactcaagagactgatctggttgaacaccagtaggctgaggtaaactgagtgcagcagcagggatgacatctggtgcagacacctgatctgtaggcaaaacagaatgttggctgggagaccaactgttagaaggcaaaagcagtgaagaaggtacagtattagtgccaacaggttgatcaatctcattatgggaactcattagatcagacatggagtagatgcatggagtgtgagaacatttgggaataatagcagtcactatggaagacctggaagaactagaaggtgtaggcttagtgagactgtcatatgggaaggaaaattcttcaaatatgacatctctagagatgtaaagtctcccattagaatcaaggcacttgtaccctttgtgattgagactatatcccaagaaaatacaaggagtggacctatactcaagcttatgcttattataaggtcttatattaggatagcacctacaaccaaaggttttaagcattgtataatcgggttgaatgttaaacaagacctcaataggagatttgttgtcaagtatgggagtagggagtctattgtgaagatagacagcagtcctaaaggcttcatcccaaaatttgaggggtaatgaggcttgagctaacaatgcaagaccattctcaacaatatgcctatgttttctttcagctaaaccattttgttggtgagtggtaggacaagggtgtctatgttgtatcccatggtctgtaaggtacttagagaaggacctaaactcacccccccaatctgtttgcaagcattttaacttcttgcctaactgcaattcagcctcggctttgaagtttaagaacactttgaatgcatcagatttgttcttcaagagatataaccaggtaaatctagagaagacatctacaaaatggatataatatttgtaattgttgagagaagtagtatgagaaggaccccataaatctgacacaacaagctgcaatggttctgaaataacagtattggatgccttaggaaagggaaatttgtgtattttgccaagacaacaagcagaacatatggaaaaattggaaattttattgctgatatgaatgttacaagcttgcaaaacattgtttacaattttctcagagggatgccct

SEQ ID NO: 84875 - DNA, 635 bp, Cannabis sativa
ctatagcgagatggacgcctcgctattagttgtttgggtttacccgattgttatacttagtttgtataatgtgtattatacgctaagtgtcttaacattcattatatcttgcctacgcctcttcatgcgtaatgaggttgatatctcgccttgcacatccaatgttgtatggtttctcgttaatgcacgaggcaacaatttttatttctttatctcgcgtaagaccttacagtcaacaagttgtaaatatactctgtcaatttcgcatttaatgacttattctattttcaaatataattatcattacatttgttgattcgtattcttcccagtttgacacgtgtcttcatctgaagtgctagccgaatttcgggtataacacttaatcatatgtttctattattgggattatttcaaaaaaataacaaaaatacaaaaatacgattatacagaattttaaatagttttatagtttttaacgttttatttacataagtacggtatttccgatatatttttatgttgtatctttgttattttgttgttcatttttttttatttgtatattatttttcatattattttaactattttattgttgtttagttttgatgttatttcattatttcatgtag

SEQ ID NO: 84876 - DNA, 718 bp, Cannabis sativa
aatatcttaatcatctgaagtaggttctgcgaatatatgtactgcggtcggatgggtggataaattttgtattcttaatgttattttgtttgtttcgtattatttaatttgttttgtttgttactttaggaatttttaaaaattttgggaacgttcaattacagccgttatgcagttgaaatttcggtagaattaggataaattttactaaaaaaacataaatattgacataatacaaataactagttaattacaacctagttataagaaactaggtgacataacacaaataattatatacacatttatataaacttttcaattataaatgacaaaccaaaccaaaccaacattccaatcaactacactttactagttagttacaacttttacaacttaataacatgaaccaaactaaaacaataattttagtaatatataaattaatatgaattaattgtgagaaatctagttagttacattgtgtaattagtaactagttataattagttactaaatactgatttttttgttaggatctttgttatggataaatcatggatgcgtgaggagagagacaaactgcgattccaagtagggttcgatgtatttttagagtttgccttaaagaattttaaaattcttgaacgtattcattgtccgtgtgtagattgttgtaatggatctaaaggaaatattacaatgattaaggaccatg

SEQ ID NO: 84877 - DNA, 851 bp, Cannabis sativa
ccataattacataaataataattagaagtctaattataaaattactctcattatctactaattctcatattaaagttaagctgtcactacacattgtaggtctaaaaaaatctctatcgatccgttagaaaagcttgaattccattattgtataatatatttccagccactcatgttattaagttcctaaacaaaaattgtaagaatcatcttctttggaaaactttaacgagtgaatcaaagaatttaattgacacaaacaagagttcatgtatactcacgattcaggctgatatactaatgatcattgttgtgatatgaataactccttcatggtaaacaacacgttaatgaaagatgtttattacacaatcagtcaaggcatgcataatcgaatcatacacatcacatttactacatgtctatccacatatgtgatctgaatcaaaatcacacacactagaagtatgttgtatagtaaaccgtacttaattagcagttccatattaaagattctcactactttaatacactgctaacttgttttattcatatcatataatcttaattctcgtacatccttataggattatacattcttcatatgaataaaaaaatttcaaacatttattagttatactattataattaatgtattttataattgtattttatgtattttataatatattattcattaattgtttacttttaagacataaattttaaatatttatagtagacaacttaaacaaccatttatgaaggacagatttttttactaattttataataaattaacattgggtgattctacaatgcaccccttaaaagggatatactgattcacc

SEQ ID NO: 84878 - DNA, 573 bp, Cannabis sativa
aagtagttagcaaattttgaaaaagatatttaattgatctataggatttgacgagcatcttcttagatttaggatgccccccactcgatggggtgatcatgccaaagccttttatttttccaacataggtcattttttaggctagtccaggatatgttccagaccccttgcacccattcctctggatcactcagcttatttgtcttccagctggtttctcccctcggacagctttcttggggatgatgaagccagtattatagtacaagactttgctagggctgagttagatagtaagggtaggactagttatatcgctttgttttcatgtgcatactcttttatggccattctgacacttagtttatttgcctttttgaagcagcccagccaatggaggatcttttagcgaatcttgcccaaacatacagctcgaactcttctcttcctccggcactcgcccagacggtgaccccagggaggtcttcttccagtgtccccttaggcccaattgtcttgatcgacgaagaccaggaggtcgaggaggatgaggaaggtgagatcgtggccccg

SEQ ID NO: 84879 - DNA, 822 bp, Cannabis sativa
ttttgcaattgtttggctgataataagtgttatgtgttcctaatgattgggaactctgtgtaggttgggaaaggaacaagaggtgacgtgaccatattacctactcttgttgtcaataatcgacagtacagaggttggtctttgtgcttcattctgtagaccatctggctctgtgcttctatcattcactaattatgtatctgtttgcaggaaagttggagaaaggtgctgttttgaaggccatctgttctggttttgaggaaacaactgagccagctgtttgtttgagtggtggtatgtattatttgtagtgtttttgtgaactggttgttgtgtgtagtttatgtaactttttcgtattgaagcccatttattttgtttggttgtttgatttgtggcagacgtggagacgaatgagtgcttggataacaatggtggttgctggcatgataaatcagccaatctcactgcctgcaaggtagagtttgaacctttcttttcttgcaggtgtctagttgtccttttcatcttctctgattattatctcatataatcaggacacgtttcgtgggagggtatgtgagtgtcccctggttgatggggtgcagtttaaaggagatggttataccacctgtgaaggtaaagactgctccagcttcttgcaatgaatattaataagtattataaatttagttagggaagcaatgcaattgccactctgccccttctaatggggaagattaagaggttcaccaaaagaaaaagataaaagagcaagaagaaagaaacatttaatacctggtgactgcacccattaaccat

SEQ ID NO: 84880 - DNA, 935 bp, Cannabis sativa
aagaatgggctttgatggtagatggattaatttgattatgcattgtgtgggcactgtctcgtacacgatctctcatgggggaaaggagttgggccctattgttgcacgaagggggttgcgccagggtgatcatttatcactatatttgtttattctctgtgctgagggtttctctaatttgttgcgtagttatgagcagagtggattaattacaggttgtaaagttgataaaagagctcctgttatttcacatatgttatttgatgacgatagttacatctattgtaaagcaacagaggaggaagctcataatgttagagttattgcatacgtatgagattgcttcaattttatgtgacccttggcttccactcaacacgaatggctatattatttcttcacatcctgctcttgttaatcaggctgtaagcagccttttcaaaatgaattcacgagagtgggatgaagaggtaattaaggatctctttgatgatagagaccaagagctgattttttctatacaattgagttctactggcatatccgactattggagctggcggttcgaacgattggggcactactcggttaagagtgcctacaagttcttacaagaagaaaaaggagcttggcttgttactagagctaccgtcgtttggaaggatttatggagtttaaaagttccccctaaagtcagcaacttcttatatagggcgacttcaggctcgttactaacttgtgtccaattggaaaaaagacatgttccagttaacccaacatgcccctcatgtctcactgtagctgaaactatttttcatgtgttagttgggtgtgtcatgctcgtgcttgctggaacaggacaagtgtggatgtcggcagtaatatggatgatgatttcaacaattggctgctggagctgcaatgccgaggaagag

SEQ ID NO: 84881 - DNA, 954 bp, Cannabis sativa
atgtaatacttattattgtataagtagtatacgtaattaaaatactaaaactaattatataatattttaatatatttaaaattaattatttataaaatgatactttaaataataaaatatataatgacattgcaacaaatgtgagtaatataatttaataacaattttaaaatgtcattaaaattatttaaatatataaaaaaaactattaagtgacatttgaaatattattaatgattatattagtggcattttcaaatgtcactaatgtggcccatttagtaacatttcacatgggcatatcttacactttctacaaatgctataaaaactataagtgttactaaaactatataattgtgacatttataagtgttactaaatggcaattttggtatcaccgatcactactaaataactaatttttctagatgattttaaaagtcaggtaaagtattcctgtcgatttctataaccgtcacctattcaacagtcgcaaaactggtggaatggaagacaattcaaaactgtcacccaaaacgcattcccaatggtgtaaaactgtcgcgtatagtgtacaatataagacacgatttaaaaccatcgcctatactataaggtacgacttaaaatcgtcccctatagtataggcggcgattttaaactgtgctttatagtattataagtgtgacagttttgaaccgtcacctatagtataataacctattttttataattttaaattttcatattcttatatttttattatatattcatttatattataatcataatcgtcaaataactcaagcataaataaaaatttattgagaacaaaaaacataattacaatttatagtgtactagtttaggcttacaaaattttatactctattctaattctttcatcatcaactatgaagcaaaaatgtgtttgcaaaatgaaatacactc

SEQ ID NO: 84882 - DNA, 546 bp, Cannabis sativa
gctctctgtagcattacaaaatagcaagctatcgtccgcaaaaaagaggtgtgatattggaggagcccttcgtgtgagtgagtaaccatggagattacctaagcgttcttcgtgctgcaacaagcaagacagaccctctgagcagatgagaaacagatatggagacaaaggacagccttgccgaagccctcgggaaggtgtgactgagccagttaattctccatttaaaaggaaagtaaaattgttcgttgtcaagcatgtcataataagagatgtccattcattagcaaatcccattcggtccatcacagctttgatgaaattccattcaacccgatcaaacgctttactcatatccaacttcatagcagccactcctttcctacccgtagttttatgtttaataccatggattagttcaaaagcaaccaaaatgttgtccgtgatgaggcggcttggaaggaaagcactttgagtctctgagatgacatggggaagtacttccttaaatcgaacaactaagattttggtgatgagcttggagac

SEQ ID NO: 84883 - DNA, 692 bp, Cannabis sativa
gcaactgagtttccattctgagcattatcacttgttatggttgctgccttggtcttcttgtctggcttatttgtagatagcataaccatatcagctgttacagcactcaactgctcttgaatcctttggttaactgcctcgagtgatgtgtcagtttgccattgcacatcatcgtcatcttccatttcttccttctcatcagcatggctttctggaggtgatggatgaccatcatcagatccacctgttttctttcttgaagtgctattttttgtgataccatcttttgaggatgtgccctttttcttcacatccttcttcactttctttagctcctcatcagcagcctccccttctttcattcgctccttctcagctcttctcatagccttcttgtctttggatcccttcttctgttcaggtgggttcttaagaatgaaactggtcagcttgtccctcatatccacatcagacacaaacccacacgcagcacatttcagttggagcatctgagtttttgtaataactatctcagtttcagggtttccgcaaccatagcactggacgtatttcttaataaaattttcaagaagtccagctagcttagaagtttcatgtgccccgttaacaagagaagttccagttttctcatcaaatttagactgggctccaagctcacaaccaaaatactt

SEQ ID NO: 84884 - DNA, 1135 bp, Cannabis sativa
  modified_base (65)..(69): a, c, t, g, unknown or other
atattataattgtgattaaatgagaaactgggaatagggttattaccctaaagtgagcgattatnnnnnctagggttattaccctagtgattgaatgattttaaatatagtgtatgttatatgttgaataaagaattatgtgctcaaggcataagtagattagacttggtaatcaaaactgagataaaattattgtagatagacatgtgagcgtaacacgtgggtcaatgctacatagacataagtaggcgtgtgagcgtaacacgcaagtgtatgtcaaatagacaatgggtgcagtggcatcagtaattacatggcatttgattattgtgaatattgatatttttactgtcttgttcggcttagttcacgggtgctccactgtgtaggaaagagtaaatctatttataatcaaccatgagtgtgacgacttggtggtggattgtacatattcgggccatactagaccacgcgggttcggtctaccagtggatgtattttgtattctcggatttttccatctaggtcggcatgtacaagtaactagtaatgtcttgtaaaaaaatgtgttacgggatctcgaagcatgtttaatattttggaatggtttgtaaagtttaaattattacaagttatgttttgatttcgtatgtaaaagaaagtttttattctgctcttatttctagtaatcccggtttcgcgggattatcgcgggattaggttatatttattggaatcgtagcgtgcctaattgttagggcgttacataatgtctccttttgtttagatctctaacccttgatctctattgtcgtagagtatgatcaaggtctaaacttggattttcttttattgttggaattcttcacaatcttccacaaaggcctgagtatttgcttgaattgtgtgggcaatttctcaattcactatagggcacggaaattttagaggaagaagaagagggtttcgaattctaagaggctctctctttattttttaagttgtttgacaaagtgaagtttaggtttttcattagcctagaaaataagtgcatcttactctatttataagatttcatctagggctaggtttagaatcatatggtattaaaaaaaaaaaagataaaataatggct

SEQ ID NO: 84885 - DNA, 680 bp, Cannabis sativa
ttctattttaccagcgcaataccaaacttttaccagcataaaaatgtgttggcaacagtgatatttctgtagggtatttagatttgatgttttagtcatttatttgtgattagtttgctttgttttggtattgtaatatataatgatgtttatcattttatcatctaatggaccttgccatatttaactgccttttggtctgatttttcttttaactagtttggccatcaaagaaacgaatgggacacacttaatttaggcacatgtataattattctcaactagataattagaagtgataggatcctacttaaaaatagaaatgaccaatgttcatggtgtaataagtgtgtgcaatgtatctagtattactgttagtgtttgacacggccttagttgaaatgggttatagacaaaaaaaatttttttgacccttaatataaagataaatggtatttttaaaaattatttaaaaaatatatataatttttaaaaagtatttttttttatttgggcccctaaaataagtaggccctaagcatgggtctagcctgcctatgtctagggccgaccttggtgtttgacatcattgcttaattgttgtgtgaatttgtttgagggttttgataggcacattctattactcaggtcgtgtttattactatattaaagtatttttt

SEQ ID NO: 84886 - DNA, 560 bp, Cannabis sativa
ctacttcatttcctccaagaagtttcactttgagcaaaacaatttgttacaaacttgtctcagatcaatagagatcgatctgagaacacaacatgtataacccttttacacccaagaacttgagcaatcactcaaacctcacaactctcttctcacatcccatacaaatctctcaaaagtgtttcccaaaccttttctctcaattctctctctagatctcaattgctctctctttctcctctttttcttttaactttctcaccctttgaaaatgaggatggacttcagagtatataggtattaattggtctgctacaccaaataccaaaaaagccttttaattgagcctggaacaacaaaacttaacaacccagaccaatctggcaagttgttagttgaaactgttaggtttatgagaattacacaccacaagttgttcataagtttcaaacaggattttcttcacttgacaccttgtgaagttcaatagtcccttattcaatcttatcccttatctaaaatagtctcacatctatgtgttttgatctttcatgatacac

SEQ ID NO: 84887 - DNA, 6866 bp, Cannabis sativa
tttagaatagttttcaagtcaactaacactgccaaatggaattgttgatgctgcaatgcttagttgaaattagataattttttattctttcaaatattttgaaaatataacttgttaacatataatataactataaatgattatgttttctaaaaaattattgagggggaaaattattctaatacttattaactttttcccgtatgacattttagtgattaattttatttttattagtttctgtaaaaccgatctaatcagatgctactaattgaaacaatgacatttaatcacacaatataaactcttgtaggtttactacaaatttgtaagaattattaaaagctaaaacgccaaaagtaaatcaaaatgaacaccacagatttacaagtttcatctgccctagaaacatattttaggcagctagtgcttgggttcctcaaaccaagaaaaataacttccaataaaaatcaatgtcaagatacaaacttcagtttgtaaatcaaatgtatgtaaaacaatacagtaaagattcttacaacaatttaccctaagatcctcttcaacactggaggaaccgacaagaaacaaagaagaaggaaaagaaaaagatttctaccgttgcagagaaaaacctcttttcaaagaatcaaaatgagtgggacttagttagaatattcaagaatcaactatgtatatcaccaactcacgcaaaaccgactttgatagctcactaacaactcattgacagttgtccaaaatattttaacatgaaaatgttgatctgttaaagctaacccataaactagtagcagacatacttagatggaactactgatttctagatagaagaaaactcataatttgacaaacacaaaaacatggttcttacaatctctcccttgacaaataatgatcaatgcggccaataacataaaagaaaaactaacaaaaaccaagatgcaaagctgtcacataatagtcaccaatatacaatatctccccctcattgagcataatgaaacacgcccatcatgaaaactcccctttgtaagagggctctacaggagtgataagaacataacagcatcaagatgcttcccctagacctgatcagacctattaacactcaaatgggaagactccccgtggatacaagtagagggaactagagaagaagcatatggaaaaaccaaaattgtgaaactccactgtattgaaaaagaaaaaaacaaaataacccttggcccatttagaaataacccaagtccattaacataaacaaaaatcaagtacaacaatgctcttccagatcataacaaagacacgcaatacaaaaataacacaaataacagaatttaatcatgtaaaaacacacacaatgcaaaagatgagcaattttcacaagaaaaatttacaaacaacattaaacaacaaacactaaagctcaactagatctgaactaagaaatttagtaatcaacacaagcaggattagaacaaatgactagaatgccaattgtagtttgcccaaaaacaagtcaaaatcatatacaagctcacaaaaaaactcaacaggagatctgaacacttaattcgtcattagtgtgtgaaagtatcctcgtgtgagccaccaagaggtgaatcaaggcagctcactcttctgaaagcaatatttctatttttcacaattttgaaaacacatgatctcttttgcaacaacactcaatgagtttttccaacaagttatggctttcttactcccatagagatgtagccagtgccttatttattcttctcaatgaataacaagagaaggaccaaacttcccaagccatacattggtctaaaggaagctcttcccattacttttatgggaggtagccttttcaactgggacgactaaatgttaagaacacaactaaaaaaatcctgtgaagctcatatgtgattagacatgtaacaaaagccaacaataaatgaaataaaactgtgttgaataccaaatgcaactgtgaccaaattagatggtgtacacaccagtacaatttctaacatgaaaaaatgtgtgggcatctaaagcctttgtaagcaagtcaacaagttgagcgcctgtatacacatgaaaaataatcaaaagtttagattctaccatttgtcttatgaaatgataccgtatatcaatgggtttagtacaagagtgttgtaccaaatttttgaaatgataatggcactagagctatataaaaatgacacttgggaaaaatcataatttgtcgacatttcattgaactaaatcagctgagtacaacaactatcaaaaactaagaaataagacaaacacaagacaagcaagacccaaactcatatgtaccacacaaacaaaatggaaatgattagaattaacatgagaataaaaatagagacccacaattgaacaaaaaatgcagacaaaaacaaagtgatccctaacaaacttctcaaaataactagatttgtagagttatcagatacaactttgatgcctatgggtgtgaaaaatcaacaagaatgatgacagcaaatttaccaagcccacacaccctatcctttgatacttaaagctcaagaaggccacatatctggtttgtccaagaatgttcaatgacaaacaactttattacaaagagcataataatggttaaaagttttgtaacctataagcacagaacaatcattagatgaaactaaccattgggttttaaaaaaacttatatcaaagttagcatcacacaactaactaatactcaggaggttgactttgagcctttgtacatacagtacatctgttagctatggaatgtcatttaacttaaggtcaccttttcctacgatctgtcctttgtttccatctccaaaaagcaccattctttcctttgcttccttgtagttcatcaagacttcaagatttctagtcatatgtcataaaaagtcgctattaaggtattgttgatccttcatcatagctaatggggatatgtgtgccaccaaggccatattttcagacttaggtctccaactcactctagaaaagtttctttgattttgatttgactgtgagaaggaaccttgtcgttgtatcatatttttcaaatatgtcttcaacttatagcatcgatgtcttatgtgaccccttctattgtagaagtggcatgttggtataaatcgttttgaaatgtttgcactctttccactagatgacccttttggtttctcagctttactggcttcaagtgatgcttcttcaaatccatctctgctactgcttccaacagcagtaacaaatgatagtttggtacctgatgcgaattcacttggtccttcatttgacaagttcagtcccttcttgtacaacattttgtagccaatagatgttctatctctattgtgcttttggagctaaagtgtttggctgaaagttgttgtaccaggaggtatgaatttaagtgattgttttgctttatcaagttctgcagtcaacttgtgaatctacctttccttactctccagctcatgaactagttttctaactttttcgtctagttcaacattattggatgccaattccttgttaatgtcttgcaattccttcaccttttagccatataactccattgtgcaaacatctcttcatatgctttatttgaaatgcaactagagggacctccctacctcgcggcaggttaactagaggaatttttttctgcaacatcagaatctgatttagaggcagattcatctacatcaaatccttcaaacatgttttcgttaaccacaaagcaaccacagatttttcttcctttgactcatcactggtttcttcctcttcactatcactccaagtgacggcaagagccttctttttctacaaagtgttcgcacattggacctgattgtgaccaaaactttcacattcttaacattgaatagattgctcttcgtctcattttaatgagaatgcgtgtttgaattagagaaatttttaatggaagaattttcttttctcccaaatttgttttcgtaaaattctttttgagaaagtgagcataattcttagccaaaagagcgtaattagcatctgtaaaacatttagataagtctgactctttgagattttcttccttgggaataaaagctactcccatctcagctttgtccttttctgaatctttgatcttcttgaccttgtcccatctttgtagagtcaactcataattttgcaggaaaccaattagttcatccaagtcaagagcctcaattattgactttcctcaatagatgtcactttaggcatggatcttttaggaaatactctaagcacttttctcacaagttttttatttgaatagactttttccaagggcgtaagtttcattcaaaatatcaaaaagtttggcatgaaactcaaaaactgtttcattttcatctatagacaaattttcaaaatacttggataaagctcttaacctcgccttcgtaacagcctcaattccccgattctttattttcaacttctcccaagcatccttagcaatctcactattaaaaatcactttcaactgatttgtggagatagcattaaagagagcatgcaagacttttgaattaaaatttgcttgttccatgtcctcaattaaccattccttgaatttcttattcttttccccctcattatcaacaactatagatggagaccaacctttggcaacaaccatccatacccgttcatccacaactttcaagaaggctctcattttggtcttccaataggggaaattagctccctccaacataagaagtcgagatgtagatccttcttctcgaaacatttccatttcctattgatatacacacacacacacacacatacaacactttttttgcactgcgagatgaatcttggagtggattagtttttcaaaaaataacaaataacaacttcgttgcactgccagatgaatctcggagtagatcaaatttccaaaaacaatatacaaacagatggaggatagccagattaaaaacaccaaacaagaatcaacacacacgacctaaaatcaatctagtagcaacaagatctcaatttcgttagtcaaaaaagctagctttcataacaattgtaaaatcgatctaatcagatgctactaattgaaacaatgacattcaatcacacaatataaaaccttgtagttttattacaaatttgcaaggattattaaaatctaaaatgcagaaagtaaatcaagatgaacaccatagatttacaagcttcacctgccctagaaatacattctaggcggctagtgcttgggttccccgaaccaaggtaaataacctccaataagaatcaatatcaagatacaaactctagtttgtaaatcaaatgtatgtaaaataatacaacaaagattcttacaacaatttaccctaagatcttgactaaccaacaatgattcatatctaagtccacttatttttgaagacaagctccccttgctttgattgagctaaaatcccttcagctatgactctggactcccttcggatgaaaccgtctccattatcacttcttttcagaagcttgaactcttcaacaatggaggaacctgcaagaaataaagaagaaaaagaaaaagatttctgccctagcagagaaaaacctctatcaaagaatcaaaatgagtgggacttagttagaatattcaagaatcaactatgtatatcaccaactcacacaaaaatgactttgacagctcactgacaactcattgacagctgtccaagatattttaacatgaaaatactaatttgtcaagctaacccataaaccagtaatagacatactcagatagaactactgactgtctagatggcagaaaactcataatttgaaaaacacaaaagtatggttcttacagtttcattacacctagcccaactaatcatgaacttatttattgtgcttacatttatcttcaaaacttaggggtgtagaatgtaatataattacaattcatggcatgttcatcagatatagaataaaaatcatggcaactgttgcaaaatttatgctatgtaagtgcacatatctctttcagtaataaaattggtagaagtaagtatcattctcaatgattgattcactaattattagtcaattaatttttcatttctatttgatcaaataattttttaaaattttttaaaaaataaaataaaaataattaacagtaaaattatgagaaaataacaatgagaattaagacaattaatctcatctactatctactcttttacatcctattttacccaaattattcttcttcataattaattaataagttaaaaaaagtagtttataatcttgttaagacttataaactcattttcataaacaccttttttttttttttttgtgagtattaatttcaactccgtatccttctcaacctctcttttaatgttttggactagatatatatatgcacatacatataccaaagtgtgtaagaggattttgattgctcaaatcattctttttcttttgattaatttgcaccaccatataaaattaaatttctcacatacatatcaatatatatatattaagttcgtcacatatatgaatttgtgtacatatatttttatctttatatgatggtaaacttttttagctcctatatatatttattccctttttttttaagataatagtccgttgaggaatgatatagtgtaaaaagagatattttttgatattttttttaatgaagtagttaaattaagcatagaaattcaaatttgtgatttcattattcgttattagat

SEQ ID NO: 84888 - DNA, 569 bp, Cannabis sativa
ttcttaattaaatcaacacaaaatcagtattaagcaataatctattagtcactgaggctatgtaaatactttcgttttacatcagaacccctacttccgtacctccaattcggccaacacacgacatttgctttcctaccccagcgccttcgccttcaacacgtaagtattctttttcatatttctggaatgtggttagattttgtgtaggacagataagttccatgctggtgtatctgattgattatgactttcttttttatatttgcatgtctatcgtgattgactccaattaggatttaggcttatcagagtaacttgaatgttgctcgtaatagaaatattggtttatttctatattgtctatagaaaatattagattttgggaactctattttcctttgtaaatttttgttaacggattgaactcagcaaagtgtcttcaaacttgactaagctttactcttttgtctgggacccttatggttctagatgaaatatttcatgggcttcctgtctattctcgtgttcccaatttgatcagcctggagcaatattccctgagaata

SEQ ID NO: 84889 - DNA, 1085 bp, Cannabis sativa
atagttgtagagtctcaaacccccaacaagaaccaaacacaacaccaaatcaagcaataacagatcaaagaatgaatcaaattgaacgaaacaaactcgaacttgaaagcatacattgaacacaaaaacttacgtgattggactacacaatcagggagatcatgagtttaatccacgagagaaggaattcttttaattgttgtatatgaaactttattaatgctagaacagaggtacaacacaaggacaaaaatacccttcactcgatggagacttgctccttacataaacctcacttgagatctctcaatcaaacacatgagagtatctttcacaaccctccaacacctttcttttcttctttcaattctcaataaaacatattacatgtgatccctctttatagtgtcactcagacctcctaaaaggctgaagacttaattaacttaactatcgaattagtaaagtctgttgagatcaattacaaactattctaactaatagttgtggcacatgttagtcaaacctcaataattctacctagtttgatcatttgaacactttgtctagcataaagggctgagctgctttctaattccaatgtaggttgtctttgtaaagagacattaggcttctttgactttcagaaagtttagacaatgtctaaacttatcactagttatgcccttagtatagatatctacatgattgtcactagtggtgctcttagtatagatatctgcatgattgtcatttgtgcctatcttcttgacttgaacttgctttgaactggttatgtcttgaatgaaatgcagttttatgtcaatgcatgtgctttgatctctcataaaaaatcccatgcagagcacttttcttgtcacagaaaactgtgatatctttagagtatattcccatttctcttgacattcccttaagccagatagcttctttaatgacgtcttttgtggctgccatctattctgcctctattgatgatgaatccaccgctttctgcaagtttgatttccagctaacacatcctccatagacagtgaacacaaaactagttagagatcttctagtgt

SEQ ID NO: 84890 - DNA, 1702 bp, Cannabis sativa
  modified_base (1143)..(1166): a, c, t, g, unknown or other
atggcataaaaaaacccatataaatgtaaaaaaaataaaaaaacccataaccctatattgttatttatttatgccataaaaaaataaattatacccttaattcctatatttatgaaaatccctcttcttttttaactgattatcaaacacctttttatcacattttttttaaaaaacaacttttgactttttctaaagcggtgcgaaactgatctttggtattaaaatgagcaattcatggtttagatcaaagagaaaagggtggtatagatcagctaacaatccaaaaccaaaagcaccaactataaaattattttagatgaggtgaatatttactacaaattgaccaaaaaaaaaaaaagtatttatttttgtttatcttccataattttgattttgaagtataaataattttttaatagattttttttaattattactgttttcatttaagaaatactaaaatacttttacaagcatattaatactttattaaattaaattaaattctcacaatttttaataaaagtattaattcaagaatgagtgccaaaacaaaattgaagaaacaaaagtttaagaaattttcttttttattgctcaatattgttgaaatagtaacagacattgatataatattacttgaaaatccaacacacatgattctatttataaataataatttttttaatattataataaaaagataactatttattaatataataaataattatatataaaaataatgttaatatataataataataaaattatattatctaatttcttattatttccgtttaaaaaaatttatattaattttaaattgctttataaaaaaattattattataaaaagagttatttgcggcataaatacttaagtttaactcctacttgtaaataaatacttaagtttaatttttagcgataataaaacctaagttatatttttggaactctgtaggtacttaatcgttaaattttaagtcattatacacgtgtcattttcttattggtatatttaaattatttaaaaaaaataaaaatttgaagaattgcaccaattagttattgacacgtggtaatttacttaatacttaacagctgggtacttacaaaagttccagaattataactnnnnnnnnnnnnnnnnnnnnnnnnaaacttaggtatttatttacaactcggagttaaacttaggtatttatgccgcaaattactcttataaaaataaataaatagagtggtgtagaaagaacttagaatatttcccgtaatgtaattatttttatatcgatccttcaaagtcgttgtcattgttgaatctctcctattgcttcactgtatcttactaaatgtcatcagtgtatctcacattcggcatcaccatagctcacttgtagtcatcactattgtcctttccaaatctcaatcttaatcttagattctattttgaatttcaaatattttctttaacatagttataagatctaaaaacagctataatcatttcataatcatacatatcattaaaacaaaaattccaacttatgatttgatgtgtttactaattagtcttgatcatctaataattttataattttacatcatcaaatataagtatgttgatctttctttttaaatacaaagctaactctaacattaatttaaacctcgtctctcttaatttgagtcta

SEQ ID NO: 84891 - DNA, 990 bp, Cannabis sativa
ggctaaatataacctaacaatagttggtacccacctttccctgtacaacgtagttgcactagctcttattaggggattgtcgagcaatatgggaccatgttggatagaacgaggccatccagattggaacttagacccactaaacccctacaacatattcatggtcacaggatctagggaatttagtgaatattatatagtcctccttcttcgtcatcttatgattatggtaaattcccttaagtggggattcacttcccattttctcctttatctgattttaaacaagtgttgatacatttctttgtctcgaagatattgatttagaggaccttctccacacttcaagaaaaaaggggaagaagagaaaaagtgcctcagaaacttcctcagacatcaacatggagcctctcaaaaggcccaagaagacaactactaataagaagcgtgccttgtagataatcgatctcaaggcttccgagaatcaactccagacccatcctcctaccctcacatacatcaaggagcctgttcgaaaagctagtcaggccaccgcttcttcgagtcaggcgcctgaaactttgcccattgaggctggggctggtacaaggtattgcgcgtaggatgccgaaacgtgctagagccactttcgatcattttaacccaacgactgggatttggtcaatagtggcaccccagccgagatgctttagaggagcctcgcctttgctctctcggttaggctccttgtccttttcttcattttgtcttttaattcaagaatcctcaaaaattcttatgcatttttattttttacagcaaaccttcctctccttcgttgcccaaagtcggggtctcgaaaggttgagacaattagagggaaagcttcagaggaccattgggcaatgcgaggccgttgccaaagagtggaattaggctcagtcggagatcacccatctaaacaaagagggagaggaggtgaagagggcc

SEQ ID NO: 84892 - DNA, 813 bp, Cannabis sativa
tcctccaaaataatctatatatatattctttcctatatataatttcttacttcaatctttatatataattaagttcttgatcattttgcaaaaatgaggccatctttcataatctctcttcttctaattttgtctcttacactatcagagcaagctcaaggtatgcagcagaaaagtatattttggcattatttacatatatataaatatatatatacatataatgatcgatttggttatggaaaatacttaactctaaatctatattttttttttcagggattcgtttgggaaaatggcacttcatgtcatcactgcttggagctaataaagaagaacataaaccaataatccatcatgtaagtatatatatatatatacacatatttttttctctttttttttttattttttaatctcttacatattacatattcaaagcccttaccttttctttttcttttctttcaggagaaggaaattattacttcatcaagtaataaagctgtaaagaacaatgataaagatgaagagggtaataatattatgtgcaaagatggagaatgttcaggtactaataccatgaagaaaagagttactactactactactaccacttctaaagtctccaagaaatcatcatcatcatcatcacattggtccccaagtattcatgaagattattatggacctaggaggcacagatccagacaccacttataaccattacttaaaattaattagtatttatttattattagctatatagatatttatatatatctatagttctttcatttttttatctaatta

SEQ ID NO: 84893 - DNA, 612 bp, Cannabis sativa
ttgttatttataaaaatgaaatattataatattcaaaaattgttgtgaattataattttaatttaaccgtaatatttttaattttttagaaatatcatatatagtgttttttatttttttttataaataataatagaaaaatattttttttggtaactgctcacactagtggtttttttaagaaatataaatactttttctattttattgtttaaaagaaaaataataatataagtatattttttagatatatggattggtagaaaaatgataatagaaagataatatttttttttagatatgtgcaatatgggtttaaatttgatgaattgcaatgttaaaaaaaaactttatgttataaagcaatatttaatataagataaaaaataaaagagatatgtgtacgtagtagatttaaattttaattgtaatattttttttatttgttaaaaaaagcacatttaattattatatatagacacatttgatataacataaatatattagctagattaattattatatacatgcataattttttttctttggttttgtattttaatttttaaatatataagctgaaaatgttattatttaatctagatttcttat

SEQ ID NO: 84894 - DNA, 784 bp, Cannabis sativa
  modified_base (190)..(190): a, c, t, g, unknown or other
aataaaaggtgttgagcatgtgttaggttttaaaattttatatgattagaacatactcacattatacatgtatttacgatctactgtaaaaggagtgtattaatgcatttcttcgtagttttaataattaaatatttagtagtttaaaattttttatacaataatacatattataattatttaagatatnttataaaattttaaaaaaattaaaattatttacaatataaaaaataagaatcaaataatttatttacatacctataaaatgaaagaagtataaatgtaataaattgtttaaactttatttttgatgcattaaaatttttaaaatttttcaaaaatttgtagaatgacttagataattacgttgtacattgtcatataagaataattaagatcaaaactatctagatatcaaaaatacaaaaaagataggtcggaaggtacaccacaaaattttcttgtaattagttatgataccattaaaaatgatagaaaaatcctacaatgcacctttatctatttcgacatttgagagaattttttagtttattttttttcatagttgtgtacattgtagttatttaagatatcttacaaaattttgaaaaattcgaaaaaatttaacataccaaaaaacagggttcaaacattatgttgcatgcacgactcttttatttgatatgcgtatgaaataaattatttggacattgctttctatattgtaaattattctgaatttctcgaaatttcgcaagatgtcttgaataactataacgta

SEQ ID NO: 84895 - DNA, 632 bp, Cannabis sativa
gctagaatatttatcattttagatcagttgactactttattcaatggatgacgctttgactctggcctaaacgggacactgtatcagtttgttgaaaaccatagaaaataaaaatatgtttggtttttggtatttttatattcatatttgttatacttgttattttctgaatttgtgtatgaatttattaaactaaatgatttacttctgtttattgatattgttatactaatctttatgttttgtaattgtttccttttacaatgaaaaaaccagttaaacatgtgaatgtaactattcttgtgatgttttcatataattagagataccaagcagtgacaagtgcatactatagaggcgcagtcggagcgatgctggtctatgacataaccaagcagcaaacatttgatcatgtggcacgatggctagaggaattgcggggacacgtagacaaaaatattaccattatgctagtaggaaacaagtccgaccttgggacactccgggcagtacccactgaggatacaaaagagttcgcccaaagggagagcctattctttatggagacatcagcacttgagtctataaatgttgaacctacatttcttagtcttgacagaaatttatagggt

SEQ ID NO: 84896 - DNA, 717 bp, Cannabis sativa
aatcatgctcacttacatacgctgttgttctttttgggataaactcatccaagtcatgcccattataagtcacatttccacaaaaaaacactaattcacttatataaacatacatacataaataagttaaaaccttgaaaattagttaatttaaataaaaaaaaatctcactttcaattctgggtcaagctgtccagccaaagccagtaaaagagttgtttttccagaacttggaggacccaataacaatgccattgtaaaaataataaactagcttattgatttatttgtttacttttctttcacatacccaaatgaaaagatattaagtcattcacctgcatggttttataatttcactaagcccatctagtatagcaatttttttcttcttgcttcgaattatatgtagataatttaagaatccttgaaaataaaatcaaataacaaaatagtgatagaaaattattaaatgttatggtttaaaaacaatttttttttacctcaatgacattcgttgtgaagttaatgaatgaaggtagagctcttttcccacataaatttctgtctcaacaatgagatgttcaaaacgaacttcaacagtaggtagctcaattctaacactattgaatatggccaaaagaaaaatgagtaactatttctatttgcttggaatatcaaacaaaacacagaaagtgggtaatgaacctgtgaatg

SEQ ID NO: 84897 - DNA, 508 bp, Cannabis sativa
gattccaaaactttccataccatttgatctgatgcctgcaaaacctctttgacctgcattctgagctttttcgaaaatagaagatccaagattaagcatttaaacatatttcttaaaattttcaagttccttctttaaaagagtgattttttcatctttaacacaaaaatctatctcatattcttttatttttaactcataaatttcaatttgatgagacaattttttatttattttaatcaacaatctatttttcagaagtaacctgaatccacttttcatacatgactttgtatgattcagcaagagactcttcacagatttcagaatcatcagaatcagattctacttgttcagtggtattattcaaatataccaatctggcttctgcctgtgaatcacacaacacattagttataacagaagttaaggcaatattcttagaatcttcttcatcactttcagtttaatcatcactccctgtgacattgaaacttttcttattctt

SEQ ID NO: 84898 - DNA, 645 bp, Cannabis sativa
tcttgattttcttccattgtaataaaatctctaacagtgtgagtataaattataagcttcaaattaccaataaatgagataagtgattgagttctttaaaataagcaagttggaagcatccttaactattaaatatgttcatacaaataaggttatcctaggttgttagtccatgattagtcatgtcttgtcacattaaaacaagattgtagctagagaaaattaaaaataaaaaataaaaagaattcgcgaattaaaatcaaaattaaacctcacgattattaaaaaaaaaaaaaaaaacaatcgacaacaagaaaaagaagatcttttacgatgactagtacatgtagacgtgtagacatttggtttttttttttcacaaaagttacacttaaactctttggaaattttgacggcaaaataccattttattacaataagatatttttaacttaagtatcaattaagctcgttaagtaccacgtaaagcacatagtgtaactctttattagattatgtgttaattaattaaaaaatctcatttctaaaataaatttgatagaactcgagtgtaacttttgtaaaagaataagaattttgcagcaaattattcttctgtatgtaatatatttctccaaaaaaaat

SEQ ID NO: 84899 - DNA, 606 bp, Cannabis sativa
tgtatatttgtgagtagaatgagagtaccaaacctctcattttatactttgaaaaatatgatacaacctgcaaaaagacgaaataggagaaagaaggaaaatattagccatgatgggtatatgtggctgtagaacgttacttatattgtgtaataaaaattaaacgaacttgacaactaagattcctagtttttttttcgagtgggggtaaaatctatttttatatttcaaaataacaaagcacccaaattattcattttttatatactgtacaacaaaataaattaaatgttcacaaaattttaaaagataatatgtgaatatatatatcactatttaaaggctaattagtttatagtttttttcttaaaaaaaatgatacgatatttatagttctgatgatccatgtgcggtgataaaataattaaagaaaattaaagagattagagttattttatatctactgtactagcagtacagcttacagaactagcgagttgttaattaatggagacaagtgccttggcaaaattaatatataatatatatgcgttaaacacacaaattaaaattataaatatgcgttagcagaatttcatgaattaa

SEQ ID NO: 84900 - DNA, 693 bp, Cannabis sativa
atttttatggaacaaaaagtttattcacataatttccttaacaaatgtaatctcttcacccttcaaaaatgagtctctcacatcgttgttattttggatatctacaccttatagtttgggctacttacaaggaaaaaaaggggtaaattgaaaagtatctctttcatttattaattaattaaatttacttctaatttatacttaattaaaacatacctctttttatatgtactgtacttaaaatactctaagataagtcacatagagagtattttaaaatgttaagagcaaaattagtacaatttttaataaagaggtaaaaatgatggattttaaaaaataggataaaaataaaagacaacaatataaaagaggtacagaatctaattttctcgaaaaaaaaaagtagttttgatatgtatataaagttaattgtactaaatatgatattaaaaaataataataaaaaaaaaaatcttaaaactatgagataaatctactataaaaaaacttaaaaatttatgtaaattttacttttatataaccaaaactaattttttgatgaagaagttagtttcttgatgaattaatttttcgataaaaaacaggttttcatagataaaaaggaatatcataaaaaaaaaattaggctaattagcaattttttcctccgaactttgacatatattaaat

SEQ ID NO: 84901 - DNA, 645 bp, Cannabis sativa
gtgaaaaaatgtcatagaagagtgacaaacctataaatgccatatttttgtaaacttttttacaaaatctcatatttgatgtaattttcactatttgtaagcaataacgtgttgaggagagtgggtctcgtaagaccaataaagaaaacaaatgcaaagagaatagaataatagtttggggtctaagtgtgatactactttaggtgaatagcattgcaactgttgttaatgtttcatcctttgttcgtttagagtttgtaagctccattaccgactaccttagtgatcaggtagggcccttcccatgttggggctagcttacctgctcttgcttccttggtgttttgaaagacccgccgaagcaccctgtctcccgccttgattgattgagtacgggtgttcttgttgtaatgctttgctaaacactgttggtaggctgccattcttatagatgtcatttctcttctctcgtcaactatgtctagttcgtggcacatgacttcccaattttgcatttcggtagttagttcatgtttagttgttgggacttcgctttctgttgggataactgcttccattccataggctaaagagaaaggtgtttctcctatggatgttctagctattgtgcggtaggaccatagt

SEQ ID NO: 84902 - DNA, 1134 bp, Cannabis sativa
  modified_base (1064)..(1066): a, c, t, g, unknown or other
gcacaaaaataagagagaaaagggagatttttcaagcacaaccattatttttcttcaattcttctcttctatcttttattttaagtttcaatttttcatttacaattgtttagaatgattattatgagctaaactcatacataggatttttaatggatattaattgatacttttctatggtttaatgcaattctagtttttttcttcgatttcttatgtgaatctatttcatttgtgtttaatacttttaattccttgatcacaaattatttgttttataatctcaatgtaaaatttgaaaagtgagttttgattatgctatagtgaaataaacgtagatttcgatattgaacgaacgtacttgtatggtctatgtaacaattaggatttctttatttaatgttatttaatttaccacagaagtgtaggactttttcatatgatttagagtttgtatgtgctcactaaaatatatattgaactaataatctgccatcacatgaaattgaagagtaattagattgtatttttccatcggaaattgatgtaattgacattagatactttatatttttaatcattgttaattatcgttttctttatttattttattttttattattaaattacaactatcattcaaattattgccaaatagaaataaagattcaattatttggtaattagctatagtccttgtaggatcaacctcactcttgtgagtattacttgtaaacgatacgtgcacttaggggtgttcaccaaaatttacaaaccgcccaacccgaataaaccgcccaaaccaaactgaataaatcgacaaaaaatacaacctgaaataatacaatgaaaatctaaacctctcaatgaatatattgggtggttaacaaattattctaaaccgcccaattaactcgaataatctgagttaaactaatttatatattttttaataaaagtgtacatatattatattacataaattacatttatttgttaaactattttatatttaaggtttggacattttagtgtttaactttgttatagtgagatttctctcnnntagaaactcgagaccagacccctccttgaaggacacgtgtatccagacttccagtgaaggctgaaatg

SEQ ID NO: 84903 - DNA, 581 bp, Cannabis sativa
taaataaaaataaagaactaaactttaaataaaattaatatttacgtgcctcggcacgtaacttctaactagtatatatatatatttataggatttttcttagatgagacaccacttttgctctcactcatacccataagaacattttcttttgcttttgattggttaaataataaaggtgtatgaaattaaaatgagttagtttacatacaataagtagtattaattatgctaatattattttatttttttaaaaaattgactttattaaaaaagttagtgatattttccaaaaaccaaaataaactatgcttagttgtattttatgacctgttaggttttttttttttttttttttatcatctccaaaacctctcgatagacaccattttcaacatcatgatcatcaaaaaaagtttgatacttaaattgagtgaaaaagaacaatatattcttataaatagtataagatatgtccatgttaataatataactttaataataacattattaatctcataaatttgtataatttatataattttcaatgtgtcttaataattatataagaacgaaattgt

SEQ ID NO: 84904 - DNA, 1094 bp, Cannabis sativa
atgagttaagcttttcttgcattttctctgtttctttctgttatgagttttactctcttggtcatacctatagctggttcttaccaattcatgcttgattagcttctacaaaccacaacactcaaactaactagtatgtcggtacctggaaggactcgataacaaaccaaatacttgatcatttgcatatatcgattatagctacgaacaatccccatatgctatatggtttaaacaaagtagattagacacacagttatatcgattcccagaacaccagcaaatagaagatcaagtcacatgatagcttggaaggactcgagagcaaaccacatacttatctatttgcttatatcgattccccgaacaccatatagtagatgaagtaattattttatcataacaaacatatatataaatctagaactgttctaggaccctggaagatctcgagagcaaaaccacatgcttgaccatattaacattcaaaacagcattaagaagtaatcaagtaagatgtcatgaatactaatcaagtaatacctttggtggtttgaatgggtaatcaggtgggaagtgaatagatataagagaaacacctcagtaaaaggactatcagttgggcccatgatagttgcttgccaatgaaacatatcatcagccacaggacctgctcaacattcattaaaccctttagttactaatctatgccaattataatgaaataatagcttcaaattcataaaaataaataaccaaaattgcattctcctccactccatgaatcaaaagttgaatattggacaaaatgaaccctttttctcttagatacataaatacaatacagaattacacttgttttctttttgtttcatattttagtaacaatctttgtttattattattattaacgatacgtacatttcacaacagatacatacatagttaataatattttttaaaaacatatataattatctagagttctcatataatccgtaatccgtggtttcaaaccctaactattacggacgaaaccatttaaggccgaaccaaatgaatacattgtgaatgatttggtattgataataagc

SEQ ID NO: 84905 - DNA, 597 bp, Cannabis sativa
aaattcctccaaactatggtacttaagagtcttattcccaaacttttttacttatggttattgtagagttttgtccttccaaccatttttcttcaacggtttgttgatgtagttacatgacacatcaatgccacgtcaatgctacatcagcaaacccttagaaaaatgagaaatgttaagaggcacacatcattatggtgttggacacttcaaggggcctaatagcaatgctctagaaaaatagatgcaatgacaagactctacaaggacatttatgtgaaaaatgtttagatgcaagaaaggctacaatttgaggaaaattaaatactttgtccatttattaataagaaaaacttcaaaacacgtatgcctctgtatggagataaaattccaacaagtgaaaactggtgatcgggttttcaaaaaaactgtgataaaatacacaacagaaatattgatcaattaccttcgataaaaacccttcatcttgtcatttaaaaccccttcaaactcaatatccaaaatcccatctccaatagggagtgtctgtggaaactccaacaccaaaatctcatcctcttcgaaaatttctacttt

SEQ ID NO: 84906 - DNA, 798 bp, Cannabis sativa
ctctttgaaccctctaaaggcccctggaagagatggcctccctggcctctttttccagaagtattgggagattactaaaggtgatatcattcgggtttgccttaacatcctcaacaacaatgcgccaatggatcacctaatgacactcttattgcgctaatccccaaagtagacaaaccgtcaaagatggaggaatttcgaccgatcagcctgtgtaatgttatatataagattatctccaagtgcctagccaatagaatgaagatgtgtttgaatgaggtaatttcggagtttcaaagtgcctttgtgggaagtagaataatccaagataatgcaattgtcggctttgaagggattcattgtatgaagcgtaaccggtttgggaatggttcaaaagtggctttcaagttggatatgtcgaaagcgtatgatcgagtggaatggccttttgtggaggcagtcatgttgcaattgggatttgatagccagtgggttaggaaaatttcttagtgtatttcttcggtgtctttctcggtgttgattaatggaagaccttcgaatatttttactccgaagaggggcctaagacaaggggatcccctatccccttttctttttctgttctatgccgaggcgctgtctagtctaattctggatgtggaagagaagggtctctcacctgttctttgcagtcatccaagcaatgccttgttatacgatgggggtgttccgattacccaagaaaaatatccatgagctccaagggatgactggaagattctggtggggctcttcaaa

SEQ ID NO: 84907 - DNA, 1067 bp, Cannabis sativa
  modified_base (851)..(854): a, c, t, g, unknown or other
cgttggcaacccactaaattgaccaactgtttggagcatttgaaacataacgggcttgagctcaaagtgaggtgcttaaattttgggtctcacaatacctggattatgctcgttgaacataggggctgcacactctcttattgcccgggctctatcatcggccaaagcaataggattggcaccagtatgagcacccccaaccttaaactcatcggccatactgcagcgttttttagccttttgttcctttctcctttgtctgaaagtgtgttcaattttagggtcaatagtagtaagttgaagatcttcttcttgctcgttcatgcactaaattacacctaaaaaggaacaattgagcgcaccaaaatgggattagaacctcaaaccagaaaatagatggcaaaatagttgataatacacaatttttttagtttcaatccccggaacgacgccaaaaacttgttgtaaaaattaatatacgcaagtgtacccagtcacacaagtagtaaagtgataagtaagatcgtctccacaggaattgcaaacaaaatatgatgtaaaaccaactaattacaacttaaagcaaaaagaaaagtatgagaatggttgagcaatgattcaaaattaaaatgactataattaaacttgctaaaattaatgctactgttgctagaaaattgcttgcaagaaatgtaatatggtaaaaaatggcttaaataactaatcccccctagtcaggtttttcccagttgctatagcattacctcagcattcctgcagagtgataaaagaattttttatgtgtttatgagaattttccaaaactcacaatttaagttctaccatctagnnnnacatattcctatatcaaaccagattgcagaacactaattaagcatcaattcttaagttacgcaaggtaaatgaaatattcctaattccacttacaaagaaaaacctaaatctagaattcctcttgttccattcaagtttaactactaaatctagcccttccggaacaagatctagcttaacaaattgttactcatggccaagaaataacaatc

SEQ ID NO: 84908 - DNA, 862 bp, Cannabis sativa
tttcttctttcttcacctgagaaggtaccggaattgacgattcttcgccggccgaagtaggagaagtgtagtccgggaagaagaaagagaagtccttcaaagggtcccacacatcgatagcgtaagtgtccaaagggtcacctattcttccccggaaggggctgggaacgctcgacatttctggtaacgacagttgtatatatttatatatattatgtacgtacggtcgcttactgaaactatttttgcttagtttggttattgttttacttttgtttttcaataaattttgatgagttgatcgaagagcttagaagtgagccggtattataatactcggagtcggagggcagtattctagtgctttcctgtatatttgtctgtttgctacagttttggataaaattttgtcatgtatcctatgtgtttccaattctaaatttaataattcacgactctattatctaaatcttatataaaatattaatatatattgatatatagtgcctatatcacattcttcttgagatgattgtttttatttaattccacgtatatttccgctgctttagaaaatatatttatagtatatattttgtggtgtaatcaaactacacctatcactaacataaaccagaagagagtatagtaaaaataacaaagaaacaaatgaaaaacttgaaaagaaataacaaagaaacaaatgaaaaacttgaaaataaatagaaattgaaattttgcaaatgtcaataataaatacgaacatataaaattgtatacgtttgcagaaacagaatgtaattctgttactgcagaaactagttttgcagtgataaagcagaacagaaagaatataaaaata

SEQ ID NO: 84909 - DNA, 1509 bp, Cannabis sativa
  modified_base (741)..(744): a, c, t, g, unknown or other
cgctcttccgatctaagatcctggtaaaataatttccaacagagacaatctctatggagcaaccagaaggttataagcttccaggacaagaagagaatgttttcaagcttaataggtctatttatggacttaagtaggattctcgttcttggaacaaaatgtttgatgaaataatcaaaacctacgagtttcaccaaaatgaagatgaaccttgtgtttaccaactcaaggataatcaagtggtaatattcttagtcctttatgttgatgacattttgattattggtaacaatatcaagaaaatgattgacattaaggaatgacttaacactcaattttaaatgaaagatttgggtgacgctggttatgttcctagtattcaaatcattataagtcggaagaacatatcacttgatctctcgcaagcaacttacattgataaagtgctagagcgattttatatgagtgacaccagagggcaagttatgccttctagacctagtatccgtctatctaaggaacagtgtcccactgatccccaagagatagaagacatgaaaaaggttccttatgcgtccgtagttagaagtctaatgtatgctttgttgttagactagacatttgctatgcaataggaattgtgagcaagtatcagacaaactcaggagaggaacattggattgtagttagtatattctgaaatatttgaaaagtacaaggcattatgtgttagtctacaannnnggtgctttaaatcccgtaggctataccgacttagatttctaggcttgtcttgatgacatgaagtctgcatctggggtatttactcttgggtggagcaattgtttggagaagagtgttaagcaaactgtaacatcagactctaccatggaggccgaatacatagctaccactgaggctgctaaggatctggtctggctaagaaagttcttcatagaacttggtgttgttcctcgaatggaaaaacaacttgttttactttgtgacaatgttggtgaaatagccaacagtgacctcgaagccacaagagaagaaaacacattgagaggaaataccacatcatcagagaatatgtcgcaagaggggacatactggtggagaaaattgatgctaaaaacttgatgctaaaaacaacttagttgatccattaaccaagattttgacagtcaatgcatttgaaaagcataaacggattaattgaaatgtactgaattttttatgttagtgtaagtgggagtttgttgaattttatgccctaaataaaactctatttcaatgtaatcttcaatattcatttatcaataaagaaacagatttatttcattacttctttaaagtgttatttaattcatgtgaccacttctttgatttataaattcatccaaatctctatcacattgatattcttttttattgcaatgtaaacacaatggaaagtaatcaagattatgtgattaaatgtatttttatgatttataagtacatagg

SEQ ID NO: 84910 - DNA, 775 bp, Cannabis sativa
ggctttaagttaaagataaatcttatttttaaaagttgttttatttaattagattattttgtgtttcattacttggcttattgatctcgattaactggatttgtgtaatataatacaacacgtggcgttcttttaaatagggcattgcacggatggtgtcaagtgggattccatctctattctttgacaagtttactcctaatgatgtaaggaaaatcttatttgtttctccttttgatttggtccaggaggattgtgtggaaactataagctgaccttctctctcaaagattcttgttcgactcttaatgtgaatacctttaatggtagtgatgagctttataggattttttagggatccaaactttacccttgcctcaaactattcttatggaaagtgctccctaatgctcttcctagtggatctcggcttgaggtgatttttggcaacaactcataatcttctattctttgcggtttgcctaatagaaatactactggccatctcttcgatcttttcttggtgttgcgaagactttctttcaagtcaaagtggaacttaaggattgaagccttctatttggatccagggatgtggttaatttgatgtaatttgattcttataactctgttagagtcccacattgttaaggtgtgaaaatacaatataatatataagatgtatgggctacccatctctttgccaattggttttgagatagaaaacctcatgcactttagccacttgagtcctttgtgatctgttgtgagccca

SEQ ID NO: 84911 - DNA, 575 bp, Cannabis sativa
atacataaatgtattgttattagtacaaatattataaaataatttaattaaaaatttaacaaatagataatacaaaattatataattattttttattttttttattatatttataatatttacacaattaatattatgtggactaataaaaactgtaatagcagtttaccttatcacttaacataccaaagtgaatgaaatagtaaaaaccaaaacagattcaaagttcagatagtttatatactaataaaatttctacacatttatggtggtacatttggtagtcctattatttagtctggtaaaatctaaatattttgagggcttactggattgaactaacatactaaggaagctacaaatatctcaaaaaatacatataagaaagatctaaccctgccaaactttttctgtgagttggcagcttaaaaaaagggaaatttgataaaaaaaaaataagaatattggcagtaaaaattatttaaactttatattttttaatacctaactataaaaactgaaattttaagggtaaaacctaatgaactcaggtttcgttttgctctttatacttc

SEQ ID NO: 84912 - DNA, 600 bp, Cannabis sativa
aagtgtattagaccaaacaaacaatttatataacctaagagcaccctcaatagaaggcctcaagaaaaactataatctttacaatgagttgaaccaactctcttcactactagttatatttctaggccatatacaagttattctattcttaatgacatctttaactttgcaaacaactctatcacaattttctatctctccattccaaaaaatgttgtttcgggtacaccaaatcatgtagatcaaggttgttatggcagcagcaaatactttttttttttgaagctattgcatattgcctttgacagccacctgcttatagctttcaaggaaatagccttggctttccattgcagccaacctttgatttgtatcaaacattccttcgaatactggcagcagaaaaagatgtgctctatggtttcactgctgtcattacacagtaggcagatatcctcctcaattactccaaatctcatcagtctttccttcgtcttgaacttcccaagcatcgccaacgacgcaatgaaactatgctttgggatgttgaaccgattccaaacaaacttgagtataatatatacatatattttatgtata

SEQ ID NO: 84913 - DNA, 955 bp, Cannabis sativa
  modified_base (853)..(853): a, c, t, g, unknown or other
ttgacggttcttcatttattttttaatttggttaccaactaagaagttgtttggtttcattattcctttatggaggcagttccttatgtcgaacatcaattctcatagggatgcacgccatgttcaaattctctacgaataaataacatggaatctatggtttatcaatcctcaaagtttgagctggaaccggatcagtggcggacaaagttcaaattcaatatggactttccaagaggaggagagagagagattaccagttgccggttgcgtgaagacgtcgttagaagaagcgagagaggatgaggatgagagagacagtggctgagtcttagaattaagggggttttttttttaacttttacttttaataaaaatctggtaattattttttaataaaaacctgccactaaaactttagtttttttaataaaataaaataaataatctgctaatattttaaaaaaatataaaattgaaaattaatagtattattcgggttatttcgagttaagtcggtttaattgggcaggttactttattttcaacccgcccaatatacagattgggcgtttttttttcgtcgggttttcggtttttttttttttgcagtttttttggtttggtttagtcgggttattcggtttaggaggtttacgaaaatatatgtacaaccttaattgaggattagtttgccttttggaagccttctattatctgctatgtgttaggatccaatctgtcattgcatattttggaaggtttcacagaaagagtttggaagggaatgctagcttatggtatctttatcagacgcttttgctcacttgaagtgtaacgccctaaataattnggcacgctacccaaaatacttatggaatcctaatcccctaattcggtattactaatcaaaatagcgcagaatttaaacttttaaattaaacggagtgaaaat

SEQ ID NO: 84914 - DNA, 2256 bp, Cannabis sativa
  modified_base (482)..(490): a, c, t, g, unknown or other
aaaaaaatatacaaaacagggttgaggtaaagatcaggcaatacaagtgtcgaggacaactagacaatgtatagtgtggatattacttcatgaagattattaaaagcttaatgactcagcacaatcctgcaacttttttgaagaatgaggtaattaaacatatatgatgtttatttgataattagtttttatttcaaatacatttaatattatttatctctggttgtacagttcaaagatgacaagactgacagcaatcaggagataaacgaaatacgggatgaatgtggcagttttgtgaagtcttatatattgaaagaatgaatacaggattttttacattttgttatgatacgtgtaagatattaaaattttagctatatgatcatttcttttggtgatacttagttttattgatatagttcatattttatatcaattttttatggctaattaggaatttttccccctgaactttgacnnnnnnnnnatcatgccccctgaacttttttggtcgtcaaaaattccccctaaactattgagattgctagatttaaggacttttgtcaaagttcgagggaaaaaattgctaattagccattttttattatgacatgtaggatacaatttttatgatcattacttttgattttattagatgtacttaaaagttataattttcttgattacatgaaaaatcttatcattattatattataaatattattgttagtcatataaatattattttttataagatataaatattattataaatattgttatcaaagacaattttaatatctgaaaatgcaggtgaggaaaattgcaaaaaaaaaatctgcaattttcccctacctacagttatgcgtcattttatagccgacacaaaaagtaaaaaaaaaattgcgtaaaattatgtgtcaagttgtgcaacgcaatataatctaattagcttcggttacaatttgaagctaaatttcttgcttcattcaagaactaatgctaatagagcatactttttgcttcagctctcaactgaagcaaaaaacagtttgcgtcggtttagaaatgaagcaaataacttgactatttgcgtttgctgttattacgtcagtttagacaaccgacacaaaatatttttgtgtcattttacaactgaagcaaaaagctatttttgtagtagtgtgaggtgtcgttgtatatagtcattttgtaaaactttctataatagggatcccaagaacacctttttactgttgttataatgttcattttcagtattttattttagtcaagtttttaatattctcacagtttttaataattaattaatatactagtattatactagttataaacacatgtccctatggaatagggcgttacagcctagaacctgtatggaactctaccttttagcttcggacctgctaagaacgcttccttgccttagcccggtatgtggctcctataggaactctgtccattcttctgtacaattcttgtggggccttggccttatgcattttgagccaatttttcattcatattcggtcccaaggctttcgtgttctttcttttggcctataggcactatgtttttgaacactactattgtttagccttaaagccttttactatggacatatgatcgtcttggctatcttcttattacattgacatgtaagtattcgaatttactttttttatgtcaagcttaagtatgtctgcacttgacttagaagcaagtttagtagcttattctaagtgttaaaatttctatgcataaattatttcactagtttgatgcattttatggtgtgggtgccccccaagtgagcatgcagacttacggtctcttggtcacttacaattcaccaagtttcatagaccttgcctgggaattttcttgggggtgctaccgggtgtacgcatgtggaactgaaaaagaataactttaagaagttatctttgttagcaagtggtttagacacatttggtcttacgtgtaacaaaagcttactacttagtgttcacttttgaaaccatgttttggctacccctacctgagatgtcaagcagaggctatcgctaaagagcgatgggaggccatgttgaaaagcaatgtgtactagctcttttatatttgaatacctctgtagggcttgccgtgcaaatgccatcactgaagagtgatgggaggccatcgttgaagggcgatgggtgtaatatctgttggaatatgttttacca

SEQ ID NO: 84915 - DNA, 1731 bp, Cannabis sativa
atattagcgactagtgaatgaaatatttgcgagacatataggaagaaatatggaagtctacgtcgatgatatgttggtaaaattgataaaaagtgaaggtcacacaacagacctcacgaatgctttgagatattaacaaagtacaatatgaaacttaacccaaaaaagttttcctttggagtttcatcagttaaatttctaggattcattgtcaacgcaaggggcattgaagaaaatcttgagaagatcaaggctttgatagatatgccatcaccgactaaaccgaaggaagtccaggcgttaacaagaagaatggcagcatttaacagattcatttctaagtccagactttgataagtgcctacaattttttaatgtattgcgaggcaacaaaaagtttgaatggacagaagagtctgaggaggcctttaagagctaaaaaggcatttgtcaacacctctagttttggcaaaataattaactggagaaactctacttctctacttggttgtctcgaaaaatgcgattagtgctgaaatagtgcgagaagagggaaagcaccaacaacctatttactatgttagtaagaggttaataggggcggaatcgaggtatccccctcttgaaaaacttgccttatttctaattcacgcaactcgcaaattacggccttacttccaggcacattcgattaaggtgttaactgataaaacctacaagttttatcaaaaccaaatgcctctggaagattgataaaatggtcaagtgaactggggcagttccacataacttatcacccaggaacctccatcaagggccaagccttggcagatttcttattagaaggaataactctagaagaaaatcttcttgttcagtgagacacggatacttggatgttttacgtggatggagcatccaaggagcatggctcgggtgcaggggtgatactaatttttccaaaaggcttcaagtttcacaatgccttaagatttcaattcgacacttcaaacaatgagggtaagaatgaagccttgattgctggtttgaagatagctgaagtgttgaaggttaaaaatcttatatgccatagtgattcacaattgattgtaaaccaagtcctaggggaatacaatgctaagggcttaaaaatggcaaagtacctagagaatgtttggaaaaacttggaaaagtttgattattttaaaatcgaacaaatcccaagagaaaaaaccctaatgccgataattggcctcacattatgaactggatgaattgaacttggtaccagttgagttgtaaagcgagccacgtatatgtgaaaggaaaaagtcgagatgatagatagcttgcctacctggatgacacctatagtcaactatcttctcaatgggcaacttccagctaacaaaaacggcacgaaaactattatatatagtgcctcgctatacataagtagaaggcaaatcatatggaaggggctattcaatgcctctcctatggtgtgttcttctcacataagcaaatgagatcatcagtgaaattcatgaaggcttttgtggggacaatgcaagttgccaaagcttgactaagaagattattcgacaaggatattattggccaacgataaataatgacacacacaaatttgtcaaagaaatgcgataagtgtcaaagattttcacatataactcacataccaccaacggaactgaggatgatgacctcgcc

SEQ ID NO: 84916 - DNA, 544 bp, Cannabis sativa
tgtggtgcagtgcaattggaatcgtatattaacaattcaaaaccgcaaactgcaccgcaccgcgcagtttaggaaaaattcaaaccgcgactgcactgtaatgaattttaaaccatatttttttttttttgcagtgcagtctggtgcaggcggtttgagcgattcgatgaacaaccctaaagcctatgttagcatcgcatttaaattttctactgagtaaaaacattactaattaatgttattagcctacttatttatttattttataattgtctttattaacatagtttcctgctgcctaatttgtcagatttaaggttatatttgagattatcaatcaaaattgttcattgttgctttctgtttaattttgtgtttctactttgttaggtcaactttaattttttccatgagacttgtaaaggcaattacatgagttctagcaccttgatgaaatttatcaaattgtgtagtatatttttttgacatggcgaattggtccttagttatggtaatgggactgctctttttttttttttttttt

SEQ ID NO: 84917 - DNA, 520 bp, Cannabis sativa
cccaccattctactggaatttatcaaacctcaaggaaatggctgcaaaagcctcaccagtttatgagcttcccatgggtattgaggatgccgtgggaatgagcacattgagatttagagcaactattgatctgaattcacctatgttctcaggcttcttccttcgtcgacagaaattgaaggacctatggatacaatacagatacgaaaaactacccaagctttgcttcaaatgtggcattctaaatcacgaccagagcatgtgctttaaagcaccaacaatagtcaaagatgcccaaggaaacttctaccccatgtatggagtttggcttaagaatgatgcaaaggaaaaatccaccttcactgctcccttagcaaagtggtttcaagattgggtgctgcaaaaacaactgggaaaggatccaacccttcgaaaccagttcaagattcataaagccctacaacacgctgaaaacgatgaactgagagagagccgattgcaactaccatcaaaacggaga

SEQ ID NO: 84918 - DNA, 924 bp, Cannabis sativa
gccattttcattcattccccaccaaaaattagccatcatggattcaagttgcttacaaaaatagttgggaaggcgaaaacaactcattgcataggttgggatcgattgtaccaccgcttttagaagaacttctcttccacccgcagagaatattttctcactccaagtatgcataagtttccaaattttatccttgatgttgctgaaaagcacctttttgtctctccccagagtaagatgggaggcccaagatatttttcatggcactcactaataggcatggagagctgtcgatggaagaacacttgagcagctagcgtcgtgtttggagagaaagacatcactgacttgtcgggattgagaacttgcccagaagcacggtggtaagtgtccaaaactcttttaatagcaagacacgaactctcattagcttggcaaaaaagtagtgtatcatcagcaaaaaacaggtgagaaattggcggagcccgtctagtaagcttgaaaccatgtaaccgacccatactttcttcatgaagaagaagtcgggaaaagccttcggaacagatcaaaaacaagtatggagaaagggggcagccttgtcttaaacctctggatgggatgagattacccatgacttctccattgatgagaaaagagaaactatttgttgagacgcaagtcataatgagagaaatccatctaggagcaaaacccatttttttcatcacctcttcaatgaacttccattcgactctatgaaaatctttgctcatgtcaagcttgagtgaagcaatgccaagacgacccgagactttgtttataatggcatgaacaagttcaaaagccacaaggatgttatctgtaattaaccgatttggtagaaaggcattttgtgtctctgaaatgacgagtaggaggacttcc

SEQ ID NO: 84919 - DNA, 810 bp, Cannabis sativa
aaatatggatccatgaggatgctttgcttgttccttcaaattcgaaattctatcgataatgaggtcattagtttgattaatcattgtgaattagttaaagaactaatggattgcttatagtttttgtattctggaaaagacaacatatctcgtatatatgatgtttgtaaagtattttatcatgcggagaaacaagctaaatctcttatgagttactttatggcatttaagaagacatatgaagagcttaatgtgttattgccctttagtccggatgtgaaagttcaacagcgccaacgagagcaaatggctattataagttttcttgcaggactctcatctgaatttgactctgtaaagtcacaagttctctctggttctaatgtctcctccttacaagatgtgtttactcgtgttcttcgcatagaaactacttcttcaactcctcttaatagcgccttggtgagtcgtaataattctacactagaaaaaaactctactccaagtggatacaaaggaggtaatttacaaggacctgataatcgaacaccaaattctaggagcatcatgtacaactattgtaagaaatcaggccataccaagtttgagtgtaggaagttacagttcaagaatagacaacaacactgctaatattgcaagcactagtgatccatctgacaaatcggtccttatttctcctgatgaattttccaagttctagaggtatgaggaaatacttaagtattcatcttcttctatcactgcgattgctgattcaggtaactttaatgcttgccttctttccaaatc

SEQ ID NO: 84920 - DNA, 1579 bp, Cannabis sativa
gtataattacatattatataaatatcagtattttattaaattgcacacacgtggcgtccctgttggacagggcgttacagctgccatatttgatgttaacctcaatacagttattaagagcttcattaatattgtctaatccggctttatcctcagcatcaatttcccgtcttcgaccacttctagtttttactcctgaggatcgtttagtagaatgattaacctcttttcccttttattttcttctacgagtagtagctcttccaggattcgatgcttctcccgccgagcctatacagaatttcccctttgttggtgtccactatgttttcacaatttcctcatcaacaattttgtttgaagagcttgctaaggaaactgggtaaggctcataccacatgtgaacctttcttttcctagtatttcccaataaaaacaagatcatttcagataagttgggaggatttgaaatcaaggattgttggaccttataaaggtttataacatcatcaccatacaactttaaaaacatttcctgggcctctttgtccaaattgggccatcccaaaagggtaggttcagggaatttgtggggcgtttgggaaaggtagaccaattcatgaggaatctctagagattgagcaattgtaggcccaatattaggaattatatctctattttcattgagagcaaagtcaggatttggtagttcaaggaagtttggcccgactccctcattctccacgtgatcaacatgattatcctccatagccacgtcctcagtacgatcaccatggtatcttgtcgcgcctccactactcgtactcccagtgtacgtattgtcctttgtcccaaggatatcccctgcctgacgaaaattccctgtcggagcagcaactttctccttcaaaaccccagcctccagtccactacctaccgtcgtagttgccaccttcaaaggttgttgtcttctccaagtacccctacgttgcttcccatttaactcccactcagggacatctcccttatcaatgataagcttagttacaccctttcccttcatagtaaaacaattggatctctccgtctctgatttaatacaggtaccatacatttgaacagcctctccaatcttggggatcaccatatccaaaggagcagagcattccttattccaatgagcaagtttcccgcagttgaaacacaaatgagggagtttctcatatttgaattggatccaagacttcggtttaccgtccgtagtaagaaaaaatcaagaaggtataggatgtttcagccgcacatccacatacgcacgaaggaaacctcgattgaccagttcctccttaggcttactgtccgttttcaagaaagagcccaccttcttccccataatagcagcattttcatccttcaaaaaccttgtaggaagtccgtggaactggacgcaaaagcttgccacttcgaactcggccacccagacctcaccctccactggccatgggttaagattcagtagcacactattcaccagccacggtctcttttcaagcacaaaagcacagtcatcttcctcttc

SEQ ID NO: 84921 - DNA, 509 bp, Cannabis sativa
  modified_base (101)..(115): a, c, t, g, unknown or other
tttgcatttttacgaaattctacagagaaacccctattgcaattaaaaatcgtatagaaactcctattacaactagagctgcaaccactttagaaacccannnnnnnnnnnnnnnaaaaaaaaattaaaaaaataatacatgaggtaattccttttttttttctttttgaaaaactatatatgttatttttgtaaacctatactttgtttttttgattgtaaacctatacctttaaaaactataaaaccgacttttttttttttaaaaaaaaaacgaaagtttcctgttaaaaatcttggaattatatgatttgcatatctttaaggggccgtttgatatgcaggtttcattttatgggaataggtttagcattacttggaaaatgatgaagagaattataaaactaggaaagcaacattatttggttgtgcgcagtaatattatgatgatacctggaaatatgaaattactttgtttggtattaacataggaatggaatgtgacaatt

SEQ ID NO: 84922 - DNA, 712 bp, Cannabis sativa
tgtacctactatacatagcatcatctaatgctctatgattgaataacgatactcaataatagtttctacattaaattatataaaactcgatacttaattacactaataatgacatgacacttaagatattactaattaagtgttatattagtgtcttttaacatttctctttaaaattcggttaattaactgagatatgtagataaatctacatacgtggtggtgaaagattgttaagggtcaccgctaaaatttggataaaagttctacagtacttgacaaattattcactatatatacatttttacacttaacgaaatactaataaaatatccgaatcttaatatattaatgtgaattttaaatattgaaataatgttgaattgtatcattattgttgggtggtgtgtgtggggctggtaaacattggtcactttcatggtcctttctcatggttggattcttgctcactgattactttaaggtagtattttaatgttacaaatccattcacacttgcatggtattagatagaagtatcaacttacatgaaatttttatttaatcatttatgactagcacaccaccacaaagtaaacaaaacaatactttaatatatgcacataaaaagggaaatgggaaaaaagaaaacactatgtattagactaatcatgatattctttccaccaaaaaaacaagataataataataa

SEQ ID NO: 84923 - DNA, 1319 bp, Cannabis sativa
ggaggattttctaatgtttgtatatgtgtctcttttatcgctgtgatgcatagtggagaatcaattactcatgtctgtgtctttctgagctcaatataaaacatgagggagttatcacttagtagcttcattggtgttgtttctagtgatatatagtagcagatgtcgatgttatttctaatgcaatttatcttagtttttataatcgtctgtctattggcccccattcttgattacacaaatgatgtgttccattcttgcattttaaaagaaaaggtatgattagcattgcattgtaacttcattattggaattgattttttttttatctttttatgtatgtgttgttttggtttttttttataatcttttttttttctttttatttagaattgattttttaattcatcttttattatcaatttttgatgtgtcctgttctaatgtgatattttagttattgctcttgtagtcagaactagtgttatatttatgtacgtgtatatatattaaaattaaaaattctaattctaattcaatatattattattatctatatttcatattttattttatcattataaaaaaatataattttgtgtagaacgaattcacttgttttgaagattttgtaaatttgttggagtgaatgaatatattgctctgttttttggtcaatttgtttattttttttaatcgaatgtttttctttgttgtttgttgttgcagattctttttacgttttatgttttgcaggtcgtcgaaggaatagaagttgattcgatagtggagaagatgattagcactattattgatgatccacgacaacaattgaagctgaggaaggtgattgatagtgaatcaacgatggacaatttgacgtttgaggttgtcaacagcaaccaattacagttatggaggaatctaaagatctcccccgtcaatgtgatcctaattgcaaaaccagcaagaaaaaaatgaacgttgcagaagaagagaagaataacaatagagtattggatgataaaaatggcagcaaccttgtattgatatccaggaatttgagagcctggttctctcccacaattggttacaagctaaacagaattttcatgccttcacaaagaaaaaccagctaacttttattcaaacttacgggtgtagcaaaaactcaccacaccagaccaaaactcacctaaaaaactgtcagctcacctttaattccctacagcattgcccaaacccttttttcatacacctttgagcataaacataagtgataggtggtctatcaaaatcgtagagagagattgtgattt

SEQ ID NO: 84924 - DNA, 1282 bp, Cannabis sativa
ttaataacaaccaaccagcacctgctgcagctgatgcacaaccacgggttgttcgtgattattgcttaccagtggtgaatgaaaatctgacttgtattgctaattagtcattgctgctagtaattttgaattgaagcctgctttaatcaatatggtgcaacataatcagtttggtgggttggctactgaagatcccaatatccatctagccatatttatggaggtatgtgctattgtgaagatgaacggtgttactgatgacgccataagactacgactctttcctttctccttaagggatagagtaagaagttggttacaatctctgcagccatgttccataactacatgggatgaaatggctagaaagttcatggtgaaattttttcctccatcaaagtctgcacagttgagaagtgagattgggcaatttagacagcttgagtcagagcatttttatgaagcatgggagcgattcaaagacttattacgtcactgcccacaacatggctatgagagctggatgcaagtctcaattttctacaacgggttgaatggaccacctaggactattattgatgttgttgttggaggagcattattatctaaacatataacggaagccattaatttactagaggagatggccaccaatagctataattggcctaatgaaagaaatttctcacaaaaaggtggctgggttacatgaattagatcatatgacaaatatagcagctcaaatttctgctttatctaatcaagttacagccttagttaatcagaagactacatcaactgtagaaaatgttgctgctgcatctacatcacaagggcctgagatgagtatagaacaagcacaatatatggccaataaaccttacaataacaactaccggggaaatccaatgcctaactactaccatccgggttgagaaaccatgagaatctttcttatggtaacactaaaaatgtcttgcaactgccttctgggtctaatgcacaacaacaagaagagaagaagtatttagaagacattctgggcacttttatgatagaatccaaaaagaggtttaacaagaatgaaacaaagttagacaacatagaaactcatatttctaacatggattcttccatgaagaacatagaggtgcaagtgaaaaaactggccaatgttgtgagtgctttgcagaaaaatagtagtttccctagtgatacagttgtcaatccgaaacaacaatgtaatgccatctcactaaggagtggtaaagtactagatggg

SEQ ID NO: 84925 - DNA, 757 bp, Cannabis sativa
acagtaaacaattaatatagatagaataatttttgagtatatttgtattataatttaaaataaaattattaattctacttaaatagttttataaattatatataattattgtaaagtatactttcttaattgatagttaaaaatatgtataactagttattttacaagtaacttgtaacttaaatcttaaattatgacataatttttttataataaattaaaaattattcttaatattcttacatagagatcctattatatatgacaattttttttttttgtcctatagtacaaattttttgtaaatataccaggtgaatattataatgacaattaagtatgcacattgtttaactatggtggtcatatgatagagatgtagtcaaactggtgggaaacacccttttgaacgattgattcaacgattcattggaagaagagaaaatgtagatttgggtcaatagttatcaccaccaatgattcatttaaaataattttttaacttgaatcatttagctcaacctcaaaaatattaaaaaaatataaaaggtacaagtcattaagctaatcatcactaaaaaaacataaacatattttgttaaccaagaataaaagaaggatagatacaagtaagaattactcaaaatttttgtacaaaataaagaaccaaacaaaaataattaaataatatcactactagaaaatttgattttagtgacacacattgagtaactctaaaagtgtatagtgacacttc

SEQ ID NO: 84926 - DNA, 652 bp, Cannabis sativa
attgtctatcctaagggcatgcttagccaatctatgagcctcaacattaaagttgcggctaacatgagaaagagatgccccaggaaaactagacaattagactttaatatatatatacctatttttaaaaacatatattaaaaataagtaatatttttttattttgaataatataagtatttttgttcctgaataataagcatttattgtgtaaaaaatttaagaacaaaaatattaattattcttttttttaaccattaatttttgggatgactttgccgttgttgttcactctatattggttgttgtttatgtgcctcactaaaaaaaaatctatttttagtattaattttttagttataatataattttttgtgattaaatataacttttagtatcaataaaaaattaactgtgactaaaatataatatttaaatattaatttgtcactaatttaatttaaacagaacaagtattaactaaaacacatttatatagttacaacaaattatggtttttttatttataattttaatcattacaacataagaatgagatttattataagtcacaatatttttacttttaatcagtcactaaaaggaaaaaatattataatgtcttgtcacttttttttattttttttttctt

SEQ ID NO: 84927 - DNA, 808 bp, Cannabis sativa
gtgggaagcaaggttatatggctttaaaactcgatatgagcaaggcatatgatcgagtggagtggaggtttttgaatgcaatgttgaggaagatgggttttgctgaacggtgggtggatctaattttgagttgtgttacctcggttcgttataatattgttcatggtgggagaagattggggccgattgttccgtcaaggggcattcgccaaggagactcaatctctccttacttgttcattgtgtgtgctgaaggtttctcagctcttgtgagaaagtatgaacggaaccagttgttacatggttgccgagtagctaatggtgcccctcgagtatcgcacatgttgtttgccgacgacagctatatttattgtcaagcttcgggggaggaggctaatcgagtcttggatatgctccactcgtttgaaatagcttcgggccaagtggtaaataagcagaaatcttcgattttctttagctccaatactagggaggacaatcgaagacagatttgtgcagtgttaggaatgattgaagctgatactaatagtacttatttgggtctcccaagtacgattggtagaaataagaacgctgtgttgggatttctgaaagagaaggttcttaagcgcatcaaaagttgggatactaagttcttgtctcgcgcgggtaaggaggtgcttatcaaaacagtggtgcaatcgttgcctacctacgctatgagcgtatttttactaccggttggggtgtgcaaggagatagagagtttgatggcaagattttggtggaaatcttcttggaaccaaaa

SEQ ID NO: 84928 - DNA, 1204 bp, Cannabis sativa
tcgtattatctctcttaatcagagtgcgtttattcctggaaggttgattacggataatattatggtgtcttatgaggttcttcattatcttaagagaaaacagattgggaaagacgggtgtatggcgcttaagctggatcttagtaaggcatatgatagagtagattggcatttcttgactgcaatgctttctagaatgggtttctgtgacaagtgggttcggctcatatatggaagtctttgctcagtcaaatatcatattgttagcagtggttataccatgggtccgattattcccagccgagggcttcgtcaaggggacccaatttctccttatcttttcctgatttgtgcggaggggttgtcggctctacttcaacactatgaggaaagaaagtttatacatgggtgtaaagtggctaatggcgcgcctattgtatctcacttgctttttgcggatgatagcttcttgtattgcaaggctacagaaagggaagtttctaatgttcaaaggatgcttgaagtctttgctaatgcatcggggcaaagagttaattttgaaaagtcctcagtgttttttagcaccaatacaaccacccaaatgagacagattatttgcaacagattaagaattcgagaggctgaagagagaagcaaatatctgggacttccaagttccataggcaggaataagatggcggcttttagctatgtggtggacaaagttcagaagaggattcaaacttgggataacaaatttctttctcgagcaggtaaggaagttctaatcaaagctgtggttcaggcgctacctgcttatactatgaatttgttccttcttcctatgggcatttgtcatcaattagaaagtgctgtgagtagattttggtggaagtcaagcaattccaaaggaattcattggttgagttgggtgaagctcacgaatcataaggttcaaggaggtatgggctttagagattttcgagatttcaacctttctttgctagctaaacaaggttggagattgttgtcttgtgaggatacgcttgctactaaagtgtttaaagctagatattttgcatccgggaattttctcaatgccacccttgggagtaatccgagttatatatggcggagcatcttcgaatctcagaatttggttcggattggtgcaagacgtcttgtgggagatggctctagaatt

SEQ ID NO: 84929 - DNA, 1532 bp, Cannabis sativa
tctcgataggttctcgatagtattaattaatcttttcttgctataatgtttagttgttatcgacagattatcgatgagttcttgataatatttagcctttgtgggtttccatttagttattgtcgacagtttattgaaagtatcacgataggctctcgataggaataagagtttttacgtgctatgatgtttagttgttatcgtcatattgtcgactgaatcagttgtttgtcattgtgttaatggtacattttatacatgaccaattctacccaaaatggggaggaaatgattacctctactttgtgttgaatctttcaaaatattcacattgggtagctgttgaggtggacatcgacttgtggaaaatagcagtgtatgattgtgattccaccatttgccctaaaaaagacttagcagccatcatgaaaacgtggcaaaatctactcccaacattgttccatgcaagtggagaattcccaaacaataaccaaatccttgcggttgaaatgaatgactgcagcaagcttccaaagatgcactttgatagagttagtcatgaaattgttacgaaggtgaaaaccaggtaactttattttttgtagtgcctaattatttttattcttacttttacactaatttcttaatagtttctataggcagtggtgattgtggcatttattccattgagtatgtggaatatccaatgataaaacgttccctaaatgatgtcacggataagaacatacaaatgtttcaagatcggtggtgcgtggacctattctatcagaacctcagttgagagaacattggtgattgttgactgattattttttggtgattgttcacacatagttattgtcgaaaacattatgaactgttaatcgatagctttgagatatgtaattatcttttgtgataggtcattatcgacagattatcgatattttgtcgattgattcttgactgattattgattaactatcgactgattgtccatggtgattgtagaatggaataattatgtgttatttattgtgatagttcattatcatcgattgattactttattaagtatgtgtgatgcaagaatgacaaaacatttgccattacatcaataaaatatcgacaatattttgataatatgtcgacaaaattcaagatacaagcatttcaaatgcagactttaacattaaaaaaacatcgagaaagcgtcgataaactgtcagtaaaggaaaataagaagttttatgtaacaaatctagttcaaaaaacatattattacaactaatattattacaacaatagtatactatgcctcaaatacgggctttgcatgttgttctattgtggcctgaaccgccacagaggccgtagttttgagatatcgtaactttcttatcaccagacgggaaccaattctcccgtcttcttccaaacttgcttttccttggatgacctactgtttttttctccacaggtaccccaactttcatgttcttgatgtgttctgggagaacccaatcatcctc

SEQ ID NO: 84930 - DNA, 645 bp, Cannabis sativa
attcttgaaacttctcaaacgttccagatagaacgatcatctatcacagtgatgaaatactactataaacttcacttacggtgtcggttttttaaactgacacttattatacatttagtgtcagttcatagatacgacacctattctacagtgacaaaaatcagagtttaagtgtcgattataaatcgagactaatgagttttggtgtcgttttacaaccgatattagtgtacatatatatttttccctttagtgtcaattttaaatccacaataaaaggagtattttaaagaaaagttaaaacttaatttttatattacataagttgtatattatttatattaaaataataattacaaatttactaaaatgagttatacaaataaattagtaaatataaattaaattaaattttaataatgcatttagattttttattatacaacaaatattacatattacaaattacacattacaacaactacatattacagttaataaatatatagagtataatatataaattacaacaagtaaatatattacacaaagttttatttaaaacaaataaaataattaaattaaaaaatactaaaacctttcaaatctaaaaataaaacaaaggaaggtcaatcttcttgtgcg

SEQ ID NO: 84931 - DNA, 1541 bp, Cannabis sativa
ttattatatagaaaataataattagagtgaaaaataaaatttagtgtattatttttaaattttactacaaatatgcatgttatttttaaaaaaattatagtatattattcaaaaggttgtttaagtataccttttataccttttatatcatgtatattatagttatttagaataacttgtaaatttttaaaatagttcacattaccaaaaatactaaaaataagattcaaatatttattgcacaagtaactattttttcttttgtagcgcagaataacttcaaattatttgaaatcttttaaaaatttataagtggtcctaaataattataacatacacaatcatgaaaaaaaaaattaaaaactcctaaatatcaaaacaagtaggaagtatgtcaaaacacgccttttaagaggtgtacgtattatagatttatcctattatttttaattaattaagtgtcccttaaaattttaatcatgtgttgattatcctgctttcaaaattctctctgatttatgaatagatcttttatctaaagtaccaacttttattgctaaacaaatgttattttttgtcgatacttatttttaataataacccccaagaatttaattctggctccgtccctgagtgttgtaaaggtgtctagtattaaaataagagtgtaagtgtttggtgtattgtggtctagtaaaacgtgttcaagtcttggtgtaattgcttttacaataataaaataattatgttttcatgtgttgtagtgttcgacagtctaacatcaatctagtttgtatattactatctgtgtaattaaatattgagtttcatataaattaatgtaataacttttaaagaatatcattaactaattacaaggcaccacttctaagtactgctaaggtgcctaataatgctcttagggctcgtttgttaagtcgtattgtattgtatttagattatatcgtatcgtattgtattatattagtattatttaatagaatactatgtttggtatattgatttgtattaataggttgtataaagttataatatatttgcaataaactcgacttcaacaccgaatatggatcgggtcaggtccagcgtccgagtctggcgtttggggttccagttcgggtctctagatctaggtcaaagactagggttgactttggattctttgtaaatatcataatacaagttaatacagattatttattatatattaaataatacattttacattgttttaaaaaaattttatcgtaatagttaatacaatacattatattatctaaatattatgttatttattaatattatttaatacaatatgcttatacctaacaccaactaaaagtggtacctaacaccaacttgaggtgctatattaatcataaattaaatagagaagagtagtcccctcattatttataaaaacgcgtatagatctgcccataaaattgaaatatgaagctgtctaatattttgtaatataatttctttttgtgatttttttttttataacaatttctttt

SEQ ID NO: 84932 - DNA, 978 bp, Cannabis sativa
atggtttttttaaatattacataacagttgctaaaacagttgagtgccatgtaaaatattcattgttattaaaaacttgcactaacaacaaaaacattaagtcccaaattacaaaaataagaataaccattatctaaaaaagattataatcagtcatacataaattatactataacataaaatcaaaaataaaacaatagcatccataaaaaaatatttatcatttaacattcaaaaatcaaactgattcataaatcagttccccataagatgaccctacttcttgcttttaccaatcttttaagacttattatgcttctcatccttacattcaatattttcatcattttttttctaaccgtaaacaaacaagaggacagcaagacgattgcagtaaacttcaatgttaaagtcattagaaacatttttgtcgtggatgaaaaattccacaaaagcagcaacaaatgcgctacaatcactgttcaacaaaaaatataaaaacacaacaattaataaacaattatgcaacacaaaaacaacaactcacttttttcactgaactaggagacttgcaatctctacgactcttagtggagctttacgatcagaactcaagtcaggaacaaatgacttatctttccaaaacccaagaaaatcaaagaataatgagagcataacagaatatgccttcatggcattccttgctgcagcgttcatcttggtagtcctcgaggatttctaaagaaatataattacctcgttcaaatcaacacatcttaaaacccaatggttttctttcctaagatttactatgaaaaaaatatggtaagctccgtgccaaggctcagaacaagagattctcaaacgtttgatataataggcaattggatgagcaacatgaacataagacatttatgttttcaatgacttcaccttgacaaatttctggtaaagagactgcatggaatcatcaaagag

SEQ ID NO: 84933 - DNA, 689 bp, Cannabis sativa
gtgaagaactctcccagaaatcggaaaacggaggagttcttgttcccaatcgcacgacaggttcaccattctttcaagaatcagggttccataattaaggaaccaaggacttttatttaaaattcggttcaagtcttaagccgatttgaaagaaaagaccaagaaactagaatggttgttgttgaatttgatttccactccccaattgttatcagcaatgccccaaacacgacctagaattgtcttcagcagaggacggctcatcggacggtttgagcagatcctagccttcgcacaatgttcgccgactacagagctcccagcggcattactttcccatccatcttcatccaagacagtaaagtttgaagctttggcaagaagatcatccatggtttctacaggctttttcagcatattgaacagaaggctcttctcaaaacgagagagcatgaaagcatccttgtgagaatagagtttatacatatatattttgcctaagtaaaatagagtttataaaattaaaatatactgattattaaacattaatttgaaaataatattgatctcttaaatttaacaattaataaaaatttacaaaatataatataatcaaaacacccaaattaccccttctcgtttgactgctaaaggaaaataaaagattggctttcttggaggatgacttc

SEQ ID NO: 84934 - DNA, 1036 bp, Cannabis sativa
tttaagaattcagtaactaattgtaaattattttataaacgatatgttttatataactaattgttaagaatgtcataattgtgtatataaacctataatatacacaatgttattcatatgttataatgaggatttcaacccatcccgctatacatctcccacacactcacacacccacgagactctcattaataataacattgtaaattatttactaatatccacgagacccttgattctaattaaatttatatttatataataatataaaaggtaattttaagtggagtttggtgggatattattttagttattttggggctttaagaagaggagaaaggagaatggttcgtacttacctatatatttaatatttcttcaaactcaaagttccaggtgctgagttgcactttatgttatggcaaaaagatgcacttcaatggcactaatttttctctctttctttcttgaaactaacattcttgttaaaccttaaaatatttagagattaaggaattagagcaattactatgtaaatgcccaatagggacttctcaccgtgcacaccctcaaccatgcttatattaggaactccagctgcaaaaaattaataaatctatggcctcaaaatcataccctaatgtactaaaagaaaaataaaaaagcaaatataagatctgtattacaattttttaagcattatatcctcaaaattaaacctttctgctctataacaacaaagcttttattttagagttacaaattacaaactgcccaaaagtacatcaaatatttaagatttggaataatcaaacccaacacttttactattaaaatgatcgttcaaatcatagcttcactttaattataaggctaacattccaactgttaaatcaattaaagtttatattatgatttgaagaaaaactgaacaaacccagaagagatttcactttgttgctctgtaaatgtccaataaaatgccattctatgtcatcaggaagctgttcaaaaacaaaacaaaaagatcaaaaaa

SEQ ID NO: 84935 - DNA, 528 bp, Cannabis sativa
cattcctcttatatattctatctcttatatattctattttcttatatattctattttctttcctattctattttctttccacacatattttctttccacacattagcaatgtgggactctctaacataattcaacaataaaaccagcgacaacaaatctaatttatcatgcagaccaataacaaacccaactccaatcccatccaaaagccaaattttttgttagaaatgttgaaagaccacctgtattacaaaaacgaactccaagtagtgtcccttttaaatttttatatatatttattgtagaaaattcttacttagaacaaactaaatctaaacaaccggttaaagatgaaataaaaattatttaaccaaagggaagagagattcgtttagttacgaccctaaattttattatagcttattgataatattttacacaattaacccccaattgtggcacatcttagtcatcatatatggcacgaaatagccaccacacagactcaaactaactaaactattaggg

SEQ ID NO: 84936 - DNA, 979 bp, Cannabis sativa
  modified_base (333)..(335): a, c, t, g, unknown or other
agatttgctaatagaagggacagttcaagatgacaatctgttaaatgccaaaatattacatagtgcaaaaatacaaaataaaattaattctttataatatttttaagaaattaatgcaatatatgtttatattggaaatattttatttaagattaattttatctttgtttataaataataattagtatttatggaataatagaggaaaagaaataaaaagttaagaaaatgtattatttttattaaaaagaaatacaaattaaattagatttttaaaatatatattttctatgattttaaagtgatgtattttatgttgaaaatattttgttnnnatttaattttgtttgtgtttgattaagaaaatagcaattatggaaagaaaggaaagaaataaaaaaaatggtaaaactatggtccaaagccatagaaatcggtattattgaagcacaaaagagagcacaaaaagacaaaggcccaaccggcccattttcttctccagccaacatgccctccacgtggcggtctcctactcgctcgcaacagcaatgctagaggcacgcaccagcgattttgagccacgcgttgctcatcacgccccagcccgagagtgggcatccctcctgtctgagccccttcagcccaaagaggtttcaaccactttcctcgtggccttctctcatctcgccatgtgtcaacatgcaaccaatgagagggtgacacgtgacactccgaaattaactgtagggtaattgtatttttacccacatgcaatttgtaataagtttaattgcacattagtccttttacctttctataaatagaagcttaggattttagaattcagtacagtttcagaaaaatccagagaaaatactcgatgaagttagtgttagtttaccgcttttcttagttaattttcttattggtttctaagctcccttattattaaggcagacgatgaaacctagtgtattta

SEQ ID NO: 84937 - DNA, 2055 bp, Cannabis sativa
acataaaagtgatttttgatctttattaattagtaaatttgattatatagggcataaaatccaacaagtaggtcccttaaaagcctagcctctaggtccgattgagagagaagcatcacctactggacctccgctaaccaagcacagacagagggccctctctttcctctctagattctgggcaatgtgagataaaggtacttaatcgtccaagtcaagagctttcccatctctaaggtaggccccatctacagctggtgctcttgcaactccaagaacaggaggatacaagccatacttttgaaagttggccagactagtcaacctcgatataattctagtctcttccgaaagagactagaggtggttcgccctatcccttatttgaaaagtggggatagaacgcttgaaaaatggcactctcttgaagcgtcgattacaaacctctttaacatcccaagcaatgaagtatttattagcacactcaccgactttaggatagatgaacaattagtatcatctagccactggtggccaacttagttaaagtagaagtatccagaccgatgttgctgcaaaacaaactccaaatcaaagtaatatcaaatctcataaagagtgggctgaggccaccctagctccttgtacagaacagacatcactgcaaggtacttgataccttccggggtgatttgtgttggagacatcctgaattaggcagcaacatctcagaagtacgaataaagaggtagcacagctccttgctcaatgtggtaatcttaccacgctatccagttgagggccaatctatgtgctagttgatcttccaggggtatcttacaatgaatactgcccactagcaaagtagcttgtattctcttaaaactgtctatcgagatagaagatataggggaaatccacttgtttccttgtgaactcacatctagaatctcaagctcagaggattgatctaagacattatctaaaccaagtgccaaaggctcactgggcctgttcagcggattaccatcagtatcataacgatccaaagattagtttgagaggacgacacaaggtctgtgtgccttcctcgtaaccagtatgacctccatgagatcaaactcgacatgggactctcatctccttggtcagccccgaggctaacatcaacaataggctgggtatccccttataccgtctcaattcaaacccatatagccaacctaaccgcatgggggtcgcatagagtcattccacaacaggtctgttttgtgctagccatagttacaaaataaacgtggacctatgcgactatcaactcccttattcaacaatcggtgctacctgtatggaagaaataaagggaggtgatccaactgaaaaagctacaaacacattcaagtttacagtacctaacggtaccttcctggtaaaacacaatgtacaaggtcaatcaagtaccatcttaagtacacctactaagacatatagtaatcctaagttgtataattgactataatggattcactacctagacttatacaaagttttgaagagaaactacacataaggccacagttgtatatgcctctaaggctgtcacaagaccctagctgatgtcaaaagacggagaaaaacttgttgcccacttggagccttggccttagctggccagggttccaggccttagtggccggcgagacccaaagacctagtctactggccggccaagaaccctaattccaagcataagttggccagcctaggggtacggcccctttggccagcctaggggtacggccccttaggccagccagaccccttgacagcgacccttggccagccagacttcaaataaggcctccttagccgaccaagatatgcatggatcagaacttgtgttttttcaagaacttaaacatgttttctgtgttcttcatgactgagagagccaagaatcatagtgaacttcaaattcagatctttttttatcaagaattcacacattatgtatcctaaggctatcatgcagatcaaaataccaaaaggataaca

SEQ ID NO: 84938 - DNA, 1546 bp, Cannabis sativa
  modified_base (299)..(310): a, c, t, g, unknown or other
gggactactgactgtcacactatcagtccgtaatcacacaaaaagagcaaggggacggactaaatgctctctctcaaaagtaaagttgatgggacctatgacacagttgtcacctccccagatcaacactcaaaatcacttgcatagaagagacaaggggtggtgacaacgctacagataaggttctaattaactctaccaaagggtactttctaggtaaatcacattatacaaggttgagtatcaacaaagtaccatctcaagtacatctacttagataaatagtgagtcctaagttnnnnnnnnnnnnataatggactcactaccaagtcttatacagagttcccaaggggaaccacacataagataacagttgtatatgctcccaaggctgccacaagaccctagctgaggtcagcagaggacaaaagactggtcgcctgcttggaaccttggccttggccggccagggttccgaagcctcaaagggctggccatgtcccatgacccagcctagggccggccaggaattcaacttccaagaataggtcggccagcctatagggtacccccccttggctggccagaccccatggtgacaacccatggccagccaggtcttgaacaagacctccttggccgaccaaggtgtacaaaggatttaagcatgtgttttttttaagaactcaaatatgttcttcgtgctcttcgtgttcttcatgactcaaagagccaagaatcacaacgaaggttagaatcaaatctttttcgtctagaaattacacattacacatcctaagactaccatacggatcaaaatactgaaaagattataatctaatgtgggaatctaaagacattcaaagcaaagaaaaaggttcatgcatttatggcaaaaccaactaaatcaagtgaatagtaggaataaaaagcttacccacaataagaaatcattgacaaagaaaatggggagcttcgattgtcgaaatggcacaaaaattccaagagatggagcaatgtgggttcgacctctagagagaaggaggagcttcttgaaagtttcttttcctagtgagagaatgaaatgtgaaaagtgaagagaagtttctctccaaaagacttatatagtttctgcgggaccactccttcacttgccacgtagtactcaactaaaaagtatgtagaagtacaatgcagttaacttactgtaacaaatgagatcaggtagtctagagtaggtatttcaaagactaaaattacaacaacatttactcaataaaggctacatcagttccaacttagatggtaagtccctattcgcacaaacatctgcacaggggcttgggggcaaatgttatctcaatttttgcccaccttatgcggcatgtctacgtggccaatatcaatgccacgtggtagtacaactcaccaataagaaggtcaagtcatctactcagtgccctagccaacggggggtcccgacactcaagcgagacgacaagcgacagaccagccacctcaaggggctggctggccctatggccgg

SEQ ID NO: 84939 - DNA, 1214 bp, Cannabis sativa
tatgatatataatccaattcaatataatacaatacaatacagtacgacctaatacgacgttacaaacgaacccttataacatcataaattatgtaaaattcttttcaaaacaaatacgatattatatcaaacttgtacatattattttattccgaaaatctccaaaattagtaaaaataataaaaaaaataccacctaactttttttatatttttttttatataaatgtataaattagacaaaatttttaaatctaacaatcttaataatttaaggaaaatttttaaccgcttgaaaaaattgaaggaacatttatttatggagagaacttttttcaaaagttattgataataatctttattttttttttgtttatttgatgaataatagatatcatttcttttatactcatctatttctttgtagcccaaaatctttaaatccaactcttctctctctctctctcgacaacactctactcctctgatctcacatctgcgccggctcatccccacttttgccgttcgttgccacttctgacagtgtcttcgtttctctcttcttacctccaacctccaactgtgagttctcttaacattgaagcttttagcttttttcttggtgcaaatgtattcaatttggaagatttgatcaaagattctacaccattttctttaaatatataattgtatactgtaaccaggtttttgttctttttgtttgaactatgatttgagttttctgtttcgtttttcacttgtattggataatttttttggattagttcagattgaatgaaagattttgtttttctctttgtaagtaatcaaaatcagtgattttctgtataggtttccttactttgaaaaactctctcatcaagccctagccgccgcttggtgaaccaggtatctctctctctctctctaaatatatcagacgtggtcgattgaatgtggttgattttctttctaatttccccaaaattaaaagctctgtcaatttgttctcgagctccctagtgagaatctttccagcaatatttgtatatgtatatgtatcagtatatgtatatgtcatttatcatttttttttttgttttgttcatattctgtatttagagttgaagctgtaaatggataatcaatttggatttgtgtttaacaacttcttcttcatgaaatctctagtgttctgtagtgtggagttaagga

SEQ ID NO: 84940 - DNA, 529 bp, Cannabis sativa
atttattatgttttttagttagaaataataatcatgttttgtgtatcgttacagggtgtacgttacacgatgacgatactgtacagtctatgaaaattaatatatttatatttaaataagaaaaatgttgcatgacgcgccatgttatactaatctagggtttgtacggttggtctttttatttatcaatattaataaaattagtaatttttttttttcatttttatttattagcccattaaatctatctatctagaagagatgacgtgaaacactcctaattaatcttttcttaattctttcacttttcaattttttattaaaataaaatcatttaaaatacaattattaattttattcttaatttttttagttttttaataaatttataaatatttatatacaattcaaaaaattaattaatcaaatttttttcatttaaaaaaaaatactttacgtatataataaaaaattatagccctcttaataatttggatatttttttaaaagatattagttttaaaaaaat

SEQ ID NO: 84941 - DNA, 893 bp, Cannabis sativa
aggatgagtatctcagattcagggttgagaatccttatggtatcattttttttgcatcaaaataagatttggagccctgagaaacaatagaagggggattatctttccgtcattttcggatgctactcttttgggttcaccggtaagccctcttcttctgtttgtttctggatctagttttgtttttctcatgtctagatttgttttgtggccgactagatctattgtagtagttttgttttgtttttgtttgtttttttttttttttatatattttcttttagtctcttattactttcttttttagtttataaatgaattgctttattttgtttagttctgaaaaatattgtggtgttgtttgctttattttgtggtttgcacctttgggattttcagtatggttttgttgtttttgggtaaaccaatatggttgtaaaatggttggtaagaccagtaaggctgttttttgttggtatgataaattcagtttgtgaaataaagttttgctttaatacaaaattgattttcttttttgtgaatagcaagattgcaagttttaatgataacttggagccttttgtcttgatcgacatagtatggtagtatgacaaatatggcgatttagcatatgggactctcatcaatgttttgaaaatatacacacagatgcgagtggacttttcaattttggaacctgctttaatcttagtttaattttgttttatttttgttttaatttcttttgctagtaaaaactaaaatttgataatctctttcaaatgctaattatgttagatataataattttattgggagaagaaaacaaaagattggaagatcagttttgttgtgttttgaaatgatgtgttttctttatacatgaataagag

SEQ ID NO: 84942 - DNA, 632 bp, Cannabis sativa
aaatcaagaaataaattaattggaatgatttggttaggtttcggtagagtttcaagaggtgtaaaatttgggtttcctgtttcctgcagaaagtgattcaccattttggggcaaacggttaatcgtttcttgctaggaaaccccagggaaacagttaaccgttttacaaaatggcagactatttctagtggtgtttagaaccctattttttcatattttcttgatgttcgaagtatgggtaccctactaatttatacgggacttttgggaataaattatggacctggaataggttaggtcatttggttaatcgttcttttgttgttatgatatagggcccaagatccgtttatcgctctccatacatgttgaccaacatacttgaatcgaaacttgagctaagaaaagtatatttgtaccgcatggcatgataagatgcaattattattgtaatgactcgattatgatcgagatgaaacggtgattactgtcaaagtgaattaagatcatgacgtcatttgaaattgttatcaggtttctagattgtcgattgtttaattacacaatggcagtgatatatggatgtcaggttaggacatcgacttgcctaattaggtaatttgatatatgga

SEQ ID NO: 84943 - DNA, 1644 bp, Cannabis sativa
tttgaaatgagtcttcaaaattacacaacctacacattttgataaatatatacatttcaaaatcttagctcataataaataattagtcatttattacagctagataccgtgttgaaatgctccagtagtagtagttaatgatccattaattaaactactctcttttattaatttgatcagtattatattgattgcaaaccaatgctgttagacaaccttgactccacagtatctctctcttcttcctcttttttataatttaaagaaaagaaggcatgataaaattttcacgagcttattaaatatttctattaatattgaccgattccctcaatgattagagaaatcacaatatggtgtgttatttttgacaaactctacgaaactaccatatatattcttttgttctagatattcatataactaatttgatcactacttaatattacaagtacatcttgttggaaatgatcactttttctaaacttctaaaaatttctaattacatatttcttacttgatttgagacaaatgttagaacttattttagcagaatctaaatttactaacatgtatattaattataaattataatttaatatcataaatataaaatttttaaaataataaaataaacacataaataattaaaaaatagttatattaatagtagcggaatataatgactcattccattcagatctctagcctttaattcttacttgtagcaaagcattatcaagatatgaacctggatcttctctccttcgatttggttcgacacagtcttcctcactatgctagatattactttgacatgtgtgggcatactcttaattacatggacaacaaaattttgagaggaaaaacaaagaggaatttgaaaaatatcaggttttctttgattcaattttgtctgacaagaaagagtctagagtcatcatctgaatcaaaaacatttaatgttctatttaaagggtttcaatgggtttagagttaaacctaatggactgattagaaagatccaatggcttagaatggaccctcgtggctgaatcccttatgaaactcatgacttagtattttgctattattttacttctttaatgaaacaaacttatctttcttcaataatgctattttttttggctcaagttatttaaatactaattctatctatttaagatttataattaattatcaaataaaattactatttgaatatcattattaattaaaccttccaatgtcttttaattaataaataaaccttgaattctctttcttctcaattgtgtccttccttggtaaaattcacatataagatatagtctttatgtagaatcctaatttattaattaaaactaattaattgagactataaataaatattatcccagttatgcgaggaccatgaccctatgtaaccaagctcccaataagtatatccaaaatttatcaagtaaattttctaacttattattttctcctgactccactataaattcagaattacactcttgattacatgaacaccatataccaaaatagatacactttgaagtacccattgtttcaatccaaataatcaaagattctctatagatgatctacatcgagtagggacaaatttacttttctacc

SEQ ID NO: 84944 - DNA, 1133 bp, Cannabis sativa
gcttggagaattcaaacaaaccagtcacctcttctcacccagctctttcaagccaagtacttccccagaacatctttcttagactcatccctgggacattctccctcttaagtattcattggggtaaatctcttctcaaattgggccttcgcaaaagaatcgggaatggggccaacaccagtatctttgatccttggattcctaaccatcgattcattccttctcaaatcccatcttccctgactcatgtatccgccctccttctccccaatggggattggaatattcccctacttcaagctcattttcagcaggacaccattaatgacattttatccctccctcctcctgatccttcccaaccagacgcctacttctggcagcattccaattcaggacactattcggtcaaaactggttactatgtcgcaaaacaagccaccaacttgactcaaccttcctcctcaaacatggaaaccctcacccgatggtggaaatccctctggagtctcccaataccccccaaaattagacactttgtttataggttggctcaaaactccattcctactgctgaaaagctttatcataggcactgcattagttcccctatttgtcctagatgtactctctgttatgagtcggtgtaacatgctttgtttgagtgcagggttacgaagaaggcttggtcaggtacggtttttaattttgccattaaagacaccaaacacttgaacatattagacatcatcttatacatacaacttaatttttccaaagatgcttttaacctattcctttgtatgttatggaagtgttggaatgcaagaaatgcagctgttttcaggaaccaagactcaagaccaatgtccattgaacaagaagctcaagactatttggatttttatcaagcagctcaagataagcggggggcacagacccagtctaccacagacataaacctcttggcttgggaaccaccactggtgggaacactcaagctcaatacggatgctgcaatctcttctcaccagaatagaacaggaggtggggctctagttcgtgatcacacaagaaaagttctagcagcaacaaccttcaatcgaattggacaaatgcaacctcaagtagca

SEQ ID NO: 84945 - DNA, 1311 bp, Cannabis sativa
aaaaatacaaatttagggataatattataacacaaacctgtgaagtaaatatgacagaaaataatgttttaatttaaaatcaaatctcataatatctaagtatgcaattagaggtgatgcctgaccgaaagtttgatgggaagtacactgtataaacattgaagtacgttattgtaagtctttaacgtgttgaaatagggaagatccactttatgacttatcctgcaatcggttctttggaaaaataaatttacattttgactgggttaatatcaatgaaactttgattaccaatgtttattttttgttttttgttaataaaaactcctacactacatatgatgtgacatatatatatttaaaactcagcgaagtacgtgtttataataaaataattatttgtacacttaaagtaaaaaacaaattctttaaagtataatcaataaaatctattgatttgacacggttggaaaaaaatctttcattaccgtattgaaataattattatgatatgacatccacttattatattagcgaattatttaataaaatttgacattccaatttgttgttggtaacttatttgaaatagtgaaactcaatgcctcatattcggttaacatagtttgttcaatgccattggttaatatacgttcacaaacaaattgatttttacaataaaaatggagtgatatctaaatattcggttaagaggtgataccatactgtatttatgatttgacgtagtctgtataactattgatgtactttattttcaaactttaacttattgaaatatgtaagatacagcttgtgatatctaaatattcgcaatgaaaaacacctctaaagaccttccgtttccaataaagggtttaaataatgcagctgatagtgtttgcggttttaaaaaaaaaaacccctaaagtacgattttaaataaatgaccagtacctttttagtttttcaaaagaagtaacattttgataatattttcctatcaatccacatagtgactcaaatcactatgttgtactatctacttccataacctaaaaatagagtcacattattttcaaatattcagttaatagtatacttatgatgtgacgtactctgtagaactataaatgtacgttattttcaaatattcatttaatactgtatttggaaattgattctttcattaataatctacatgtaagagattgaacattgaacgttgtattccaaataaaatttaagtttatagttaaaaagacatacccaatagaacacaatttgtacataacctttagtcaacttttgcta

SEQ ID NO: 84946 - DNA, 1132 bp, Cannabis sativa
tctgtccactcaaattttttgttgcctcgcaatacattaaaaaatggtaggcacttatcagttgacttcgaaatgaatttgttaagtgtagcaattcttcctcttaaggcctgaaattcctttggcttggttggtgatggcatatctatcgaagccttgatctttttaaggtttgcttcaatgacccttgcattgactatgaatcccagaaattttcctaaggaaactccaaagaaacactttttcgagttaagcttcatttgtactttttttaatatctcaaagcactctgcgaggtctgttgtatgatctccactctttaccgacttcaccaacatatcatcgatgtagacttccatgtttcttccaatttgtctcgcaaacatttcattcacaagttgctaatatgtttcccattatttttcaaaccaaacagcatgactttataacaataaagtcccatgttggttacgaagattgtatgctcttggtcagggacatatatttttatctagttatatctagagtatgcatccatgaacgacataagctcgtgtccaacagctgcattcactagttggtcaatccttggcagtggaaagcaatcctttagacacaccttattcaaatctgaaaagttaatacaagttctccaggttccatttggttttgggacgataataggattggatatccatgagggataaaatgcctcgcatataaagtcgttaaccaacaacttatccacttcttgcttgagtgccccttgtctctcggaatcaaagggtcgcctcttctatctcttggcttggtaattcaagttgacatttaagtggtggcagataatcttagggctgatccctatcatatatcagtggctccatatgaagtgatcctggtttgccctcaaaaagcttattagttgctatttcaatttttcatccaagttcttctcaatgaacacacagtttgtgggatttcctgggtctagaacaacttcttccagttcctcaatcggtttcaataaattcctttcatcttgaatccgaggatcaagatcctcatccttcttctcaccttcctcatcgaagactacgattagctggtgaccgacctttgtgttctacagttc

SEQ ID NO: 84947 - DNA, 1745 bp, Cannabis sativa
  modified_base (893)..(896): a, c, t, g, unknown or other
aaaccaaccgtacccaacagcaccaacagaacatgcttccactgaagccaagtccctctggacaagtccctccagaaaatccacatgccaacttaatggcgcaccatcctcctgatggcaatcgagcaagacactcctatcgcgggataaaatttagtgtgttccacctggacgaggctcgcaagacaattgcacccaatgcatcaccaagtgcactcttgcacaaaattctcaacattggccctctggccctaccgcacactcacggcttcatgcaaaaggtccaactgacccactacatacatgctcctctgagcttctttcacgcggtcaatgatctaacaatcacccaaaactacgaatttgccctctggctcctgcttgtgtcggctctcaaaactattcacaagtctatctcccaaaatcaaccttacatcctctgatgactcgctaacttttgacaaacttgataacacccaatcttactcgtaagacttgaagtcatcccaatccactatctctcatcagcatatgctctctgaaccattcggcttacagtgtcccatacaacactagtgtccccattaacacaaaacatgcccataacatgccacaaactagctcaatcttgatcccagcctatgcccctacatattgtctatctgcagcttgcagcaatcatgcaagtattcgcattgaacaacccatctgttgtagtgtttccctctggattcacataccaaaactgaacaagtaccctgattcttcaaacacatgaattagtgggctcccccacttcaacttgggaagaacttctcttagaggaatatccctcaaggtatagctcgcaagctaaccgcatacttgcatacggtccctccattccaaatgtnnnnttgatgaagatgttgaactaatgcctcggtcattctgactcttcgcccttcgacatttctatgttgctttagtaccttagtccttctgactttcaccctagataactggcactgcctgtgtcccgagtcttcttgactttacatcctgaacaataatctatctccgtgatactcatcttgatgcttgtaatgaattcctagtctgatgagtgaaccgtgaaggtctctcccccacttcatctgttggcgtccttgacaacatgctcacacgtgaatgcatgactgcccaactcttcatgcacaccatgccatctaaaagtgcatcccgcaggatgtgactctcgagtcaactatctcataaagcactccccatcgatttccatatgcatgcaatgtccgctcaaccatcaaactaattcacacttgcatcacgcccttctggctcccacgatgtactaagttccaatgatgcagccctctggcctcatgcaaactctagcacccctcttgactttcgcaggctcacatgacgactaagtgccactggcacagccctctagcctccactcaaactctagtgccatcttaacacttgcgctcaatcttcgtagccctactggcttcatagatgcattcattccacaactgcgcatctctatcaatgcctttgtgtgacttacgcccactagcgctttaacaagccaatacatcccactcaactatctcggtgcttccatatggatcaaataaaagtcacatgcgaacacctccaagtacaaccatcctttgacgattgggcctctgcccccttggtctccatgtggatccctcttgacacacctatgtagc

SEQ ID NO: 84948 - DNA, 546 bp, Cannabis sativa
aatatatttcaatattaatatatacacatacatcacataattattttcttagtaaaataattaaaattaaatacctggtgaaaatcataataaacaagagaacaaaaataattaatatatttcaatattaatatatatatatatatatatatacacatcacataattattttttttaataaaaaataaaattaaatatacctggtgaaaatcatattggatattattgtgatgagttccaggtaagcttaatcgaagagtaagatcaacatagccaaaacccatttctctccataaagctttttggatcatcttatattgctttgtgtaactccaactaccattattattattattattatccattattatataaatattagatctgttgaattttcacaatatatatacatatcaatgtcaataatctcaacattatattttattttattgaaaaaaattaaaaaaaaaatgaaaggagagaatgaaataatgtgtatatatcatatttatataaaatatatgagaatataaagatctatataag

SEQ ID NO: 84949 - DNA, 573 bp, Cannabis sativa
cgtagttaaactcaagttaactaataaagacagaatttcaggtttcatggttagctaaagttaacttaatccaacgtattcatgtatcctaaatagagtaattaatttgggttaattaaatatttaagttaaaagaagtcctggaaataagtgatatttaccagagaaatttaattctaaaataattaattaacttaggttaatttatttaagtttcaaaatctttaaaaagtaaataacacttacaaatatttttcttcaaaacaagttattaatgtaccaaggttcaggccattggaactatattctaaggactacatatgacatgttaaagagagaaatatttaagtttaagcttttattaaaaaatctaatggtttgggcctttgaaactagaacctcacaaggctggaaacattaaaacttagcaaactcgacagattaagatgcaaatatctaaagatttaatcaagtatttttacattcttaaaactcccgagacaaggctataaaatattgtctccacacacgtaaaaaaggggaactgtgatcccccaaataacacaaaaaata

SEQ ID NO: 84950 - DNA, 976 bp, Cannabis sativa
taatatttaaaaatatatataatttaaaatattttatatatccgccgcaaagcgcgggatgtttactaggctatatatataaaggagaagtatgaggcgatgacgtggtagtctaaaatcacttcaaatagtactatctcttctctctttaattctctcattttttttattttttattaagttaataaatattaattaattaattaattaaataaaatatggggaaattatcatgtatacgtaacttcttgtactttttcaattttacgtttttatatttatgttttcattttaataaaacattttaacacattcacggtttcaacatttttctttttagtgtttcttactaatccacacaacctttctctctcatgcactctgatatatttgcacacacgtctatactttatatcttttcttttaaaaaaaaaaagtcagtactttatttttatatatgtttttttaaatctcttaggagtcattgttactacacaatgaaataaaaaaattgatatttttgtgatcaaggttgcaaatttgagctattatgaaaattactattattaaaatgaaaaatatcatctcatttgtaagatagaacccattttgtctaaaatagaaaactatttttacttatcaaatagaaaccactaaacttattttaaaataatgatttcaacaaaaattacattgatattattgcgtatattgtttttaaataaattttgtgtatgtagatatttctttcaagaagttggtgaagttggtgtgttgtaaatgtgtaaaaaaatctttgatgtatgtattattagaaaaaaaaaaatcaatttaccgtaaaattgaataaaacatttgttataaatgtattaatgaaaaatttcctaatctatatatatataaaggtaatgtatgaggcggtaacatggcattctaaaatcactctaaaactatatttttctcttctctccttaat

SEQ ID NO: 84951 - DNA, 1356 bp, Cannabis sativa
aatcttctccttcagtaatgatcttgtagtcacatgccgtttgtttatttgggaagtttggaaaaataattatgttataaatattttgtcattttataaattttgaattataataactgttataatatatataaagtcttttaatctttaatataaagaaaatgaaaaaataggttattaaaatttttaatatttttttgttgtttaaataaattttttatgacgtggactaataaaattttgacacgtgacaattttaagaagtacaaataaagttgttaaattgtgtacctatgtattaatgggaatgttgagctttgagacttttactataaattttaagagattaaggacctatctgcattaaagtgaactttttaggggtttatgatatcaaaacacacgtgatatttttgaagcaactatcgaatctgttaaaatgagggccaacgaacttataagattttcgagcttgaggactattaccgctattttttaaaattgagaatttatctacatcaaaataaattttttgaagactttgctacaatttttcctaattgattttgaactatgtaaaattatattaatgatgttcaaaataataaatttaattttttaaaaataaattgttgacattaataaatttttaaaattattttaatattattagattaaatttctacatacatataggtagaataaaaatatgtctaatttgcaaaatgtatttattgaagagaagaagatgagtttacaaataaaaatatagtacaatagcacaaaagagaatccgtcaccaatttctatagttatattgcccttaccttttggttaaggtcacatatcccttagatcttagcaaaaatttattttttggaatccaatggctaagatgtgttgtggtatgcagtaaaagtatatgaggtattacataatttgccataataataaagacaaattgggtggtatacagtatacacgctgggccatgcatgcaatatcataaaaattaaccatttaaaaattaaggaaaaaaaaaagcttgagctttacattgcgccattggaatggaatttatatataggaatccaatttgtactctgtgaattgatacatatctcatcattaactgcgtagagatcatatccataccatgaacgacatcaaaatccgattcatctcaactactctcgttcagccagcgaatctccaccataaggatgatggtgatgatattaatcacagtgagttaaacggtgaacgactagacctaactccgtgcgatcttcgactcctcgatcttcatcacattcaaatgggtcttctttttcataacaagccaccgtccgattc

SEQ ID NO: 84952 - DNA, 618 bp, Cannabis sativa
aaataatatttaacagataatttaccatgaaaaaaaatgaaaagaagcattattggatgaggttatatgtggaaatagacatttttatagttcaccatgtactttgaattattttgatagttttggcttcggttaaaattttggatcggctgccttaaaatttttaatcatatgtttggtgtatggaaagtcatttgcaaaatattatcaaaactagaacatagtgcaaaataatttaaaaaaaaaaaaagaaggaagttattttgtgagttcactcaaatcaaactcaattttgatcaaacattgttgacatggaaattagaagaatgtaattggataatgacaatgaatacttgggtagatataaaagagtttattatttagtaatcaaagtctgttgattctggttagaattgtaggatgcataggatgtgttctatctcaatcaattttctacggtaggaatagttttttgatcttatatattttattatatttctatacattaccagtgtgaaactttgtaacatccccttaacactatctctaaatcacaaataactcttttaactatttacttttggaatcgtgttttttatttttcttttaacattttta

SEQ ID NO: 84953 - DNA, 807 bp, Cannabis sativa
tctaactaattaacttacttaattcatttcagcaaaaataatttatttaatttaacatttaataataaagaataatataccatatacatgcatatcgtaaaataaaaacaaactaaataaatttatgtggttataggcgtagcctagtagttccacacttcatctcaagaagaggaggtcccaagtttgaatccttcctcccccaatgtaaaaaaatattaaataaatgtataaaaggaaagtactaataaatataattaattatcgacaatataaataagacaaaaacaagaaataactaaaaaagttaaacttacaatgttatatataattaaacaaaaaggtaaaattcaaattaaagcaaacaaacacatgtacatattaataagtaaaatactaagggaggtgccaagcaccaaaagatgtagcataccgttattggtgcatttcaatatcatatctcatatattttgatttaataaataatatgggaagccgctatttatatatataaaaaaaacacctaataacaattaactatatagagatagtataaataagtcaaaaaaaaaaaaaaaactaaaaaacttacgaagttatgtataactttaacaaaacttaaaatttaaattagaatgaataaagatatgtaattaataaggaaattattaacgcatctattatccacatgatattgaaacgaaaaaaaaaaaaaaagatatcattcataaaattaaaaagaaaaaattactaacaaaaacacaaaaaaatattttacgagcactataacaaatcaaatcattattg

SEQ ID NO: 84954 - DNA, 972 bp, Cannabis sativa
tctctaggcaccaaaataccactattttgggtgttacgattttcatcctgatcctcgactaagaatttaacaccattaacaatacatccaagatatcaataacatgttgggttagagggatttgcgatggcgtacaactcatctgatacttctataggattatctgctcggagttgattgatctatcattgagaaaaaaatttaatcattgatactatattaatacaccgtattttaataacaaaattagtagaaagtaatacttactcgagacttgaactaactaggaaactcattctcttgaattgtgtcaagattttgatgacccctaagttgtagcttgtttctatgctcactacacgaaaaatggggaaaatgttagataatgtcgtcactaaagagaactaaatcgaatatggaaaaaagtatcttacgtgatatacgtctccacttcattacaattgctgataatgtaccactttgccttcaatttatcttgcattggtaaagcaacaatggtcctctgaccaattggtcgcccaacatgcttaaatacaaagaattccctttcaggcttattttggaggacatcactatttcgatcttgacgattaaatcgagtttcaacttcccggaagtatattgaacaaaaggttaagatttcgttaactgcataagcttcacaaatagattctttctgtcgagaacgatttttgacatattgtttgtacacagacatggctcgttcaattagatacatctaactgaagtgcactggtcccccaagtattgcttctttaggtaaatgcatcaccaagtgaaccattatgtcaaaaaatgctagtgggaaaatggtttccaatttgcaaagaatgtccagaatactttttttgcttgatctgcaagtctgtaacattcaatgttttacagcacaatttctggaaaaatacacacagctcaattattgtatcc

SEQ ID NO: 84955 - DNA, 603 bp, Cannabis sativa
gatcttctttttcaaaaaaaaaaattacttcattgtagactaatttactccaaattacaaatcaaatgtaacatgtacaagacagtgaatacatatattattctgtacggtctattcatacagctgaatcactcattccatcaagtggcccttaagagaaaaacaggtgcaatattggacaagagcagcatcaaaatcaaaattataaccattgaagagttcaaaatcagttattcaaaacccgccacagttcaaaatgcaagaaattggaattggcacataatacaaaacaaaacaagtctaaactaaatacaatttaccaacttacatatctcataatttttggcaaaaatgaaactctaatgataatgataatgtataaagaaacagacacacttatatatatatatacatgtgtccaaaattaatacactaatacaacagtcaataacaaataattatcccaccaaataaataaataaaatgatcattataactaattacataaaaatcaattataatttttaaaaatagtatagatctaactaaagatatatgggtgaacatatttttcgtacctttaaatggagtaagccctctatt

SEQ ID NO: 84956 - DNA, 500 bp, Cannabis sativa
gcaaaacgccaaagcctataaaaaaaatataaaacaaagtaaatcaaatggagccaataattgatgtttgaacataaatgacaaaaagttgagcaaaagagtgagtggagagattttcaatactaattaattaattaagctctagcatggctgattgattatgttggtctatgaagataaacaagattatatacaaaatcagagtcaaacttaagaaacattgtaaaactgaactaaaagagaatatgcataacatatttgaccaataaatgaatgatgaatgacttgtgttgtgagtaatgaacaaacagatttcttctcaagtaaaaatattttgatgataaaatatccctttttcattttgacaagtatgacttaaagattaaattattatatatttattaatgtgcagtgaaaatggagagttgaaaactacagcagcttcgaaagtggagcaaataatagcagaattacaaaccccagctgatggcaaaatagga

SEQ ID NO: 84957 - DNA, 924 bp, Cannabis sativa
caccctaacccccgacccacctctttctccagccacactacggtctctgagctaaccggagttccaccgcgcacggtggccgtcttccgtcgaaggcgaagcttacagaaaatattgacgaggtctaaaagatctttacgaatagaatatatttttgaaagtcgttttactcaatggatctcgaatacgactagatcggacctaagattttttactccgacgagcttttgacggcgattgaacggcgaagggaactacgggaacctcggagctcgtggtttgaaacttgacaaaggccatggtggccttgcctccagagaacgacgttgaggcccgtggtggcctctatttttgactgtgagatttcgtcggtggtgaaaaatatcgagcctcggatagagagagatttagggctttggagttgtggtcggggcttaaatgtttgtctttccacagttcttccatggctatgtgaggattgagcttgagggaaaaaaagtgaagaaaatgggtcaggtgtggctggaggtagaagaagaaggagaaaaaaatattaaaagaaattatattttgaaatatatttttaattcttttaattttaattattttttattaaaattattaattagaccaatatgactcaacatgtgttaattatgaataacttaacggatctgtcaaatttaaggctaacagaattacaaactatgtgaccttaagaactattgtcgctattttttgaggttggggagtaatctgcatcatagtgaactttttaagtacttttgccgtaaattttcctaaaaaaatgcaataataataagagtaatgatatgtaggtaaaaaaaaagagtaatgatatgtacacctgcacataaacttgacacatatttatgtagcaattaacgtcaattaatcattttt

SEQ ID NO: 84958 - DNA, 637 bp, Cannabis sativa
attaattgttgagaatgatgaagtcaaagattttaacaccaaattatctcttttttccttttttaatatttatttttatcattttttcaaactacaatattatttttaaatgtcatcattttaaaatgtgtaaaccatatattcaaaattaaaaataactttttagcttttttcctaataaatcttttagtttcttttttaaatgttgttaataaaaaaagagaatcatctcatataatatattttttaactttttctttttttttatttttacagtttaaattgttccggtagttgctatgtaaatttaatttgtaatttaagttgctctgttaattgctatgtgagttggtaaatagatttccgtaaaaatacaaaaaaaaaaaattactttaaaatataaaaataaaaaaatcctttaaaaatatacttaaaaattattaaagtgagagaatgtgtgaatggctcactatttgagctttttactaataataataataataagaattatttgcggcataacccccttaagtggtcaggtttttgcaagtaacccccaattctaaaattttagtggtaaaaccccttaaacccatattctgttagcacttaaaccttttcatccatttttaggtgt

SEQ ID NO: 84959 - DNA, 712 bp, Cannabis sativa
tatctgggcgtggcctcgtggactagtaacaatctaaaaggattgttgaaaccacgtacaaagaccttgtgtgtttttacttttctgaactgtttatttttctggattttagagttacagagttgttttctgtagctacagaaaaactgtttcagtactagttttattattttgcatttaattaaataataaaattgagaatattaaaatactgaatttcaatattaaaccaataaaaattattaaataaccacattttataaataaagattattcaattttttctttttataaagtggaaaattataatttcttttttaaaaaataaaataaaaggaaccccaaacaaaaaaaaaatagaattgtttcatgtaaagatattaaaaagtaaatcagaaaatagtgtttgagaaaaaaattgttttttttcttttgggaagcatcttgattttatttatttatttctttatttttgaatagataatatattaatttttattttttaaaaaaaattgtatatctatctcttaagcatctattaaactgttaaagaaattattacattttaattaattaagctgtaaataatatttgttaattatgtattaaagtgttatttagaatgtgacatttaaatgagttgcaatgttttaaaataggaacatagagactcagaggaagtgggaatgaagatttgtgtccatagcgtaat

SEQ ID NO: 84960 - DNA, 812 bp, Cannabis sativa
tgctcacaccagcagcagctcacaccagcagcagaaaacctatcctataggtgctattctcacacaaataatcaaaacccttatcactatcacacacaataacattagcataaaataacaatccaccatagaataaaacatgtaaatacaatcccataatacagttgtatgttttaaaagacaccatgtggacagatgtccactcttcttacctcaattgctaagtacttccttttctctgccttgaacctcttcccgagtttctttattgagaagaagacccttaattcaataacacaataacacttaaaatatattcaagcataacctaagattaacaatgaaatcttacgtcaacctacacaatacgtaggtcaacttcacttgcatgacacaccaaacacaatcatttatcactataattcacaccaacacatatgatgcatttaaacgaatatttttaacgtaaaacatgaactcatacaaacactttttacgtaaaatttcactaatataccatttattattaacaaaatatataaatatgtaattatttaccaaaatcagaagctagaatattttttaatcatttatacagattataaaaacatatttaatctatctagaacacgtacaatttattatccatatttgtgttctaatttatacttcaaactatatataaaataccaattaattgaataaataaaatacgaacatctcaacctagtcttaaatttatttcgtagactagaattatattgtaacatcatattgacagttcccaaacagtgaacacaatttttaatatt

SEQ ID NO: 84961 - DNA, 1327 bp, Cannabis sativa
  modified_base (1280)..(1280): a, c, t, g, unknown or other
aagaagataatggatatgaatgaataaagggtctggagttcctgaagcggaataggtctcgtatggaaattcttgccattcatttggaatatggttttgatccaatcgttttagggacttcctactggttatttccattaccgcatagtattctctcttgctttttttgactcagatttcagttaatgcttcgttcgaaaatggaatgaaattaagatccatcctccacggactcaactcgatcgatcttcaatggaggtgacaaaccacagaatcggcttagactacagcgcctaggcatttagccattacagtttacagggtacaacaaagaatggccaaaaacggtgcgttccatgttttggatcgagggaaaattagcttaatgtcttttaaacatttatttaattggatattacttcaaaaatacacaaaaataaccccccaaaaaaaaaattacaaaaatatatatttcacataattttaaatatttttacaattttttgattttattcacagaaaatatggtcttatagtgttgtactcttatcaatttattattgattttttattatttatatgttattttttgttgttgttttgatgttatttaaatattatttttatatagctttcttgttgtttcgtgttgtttttatagaaaatcgtaaaaatataacataaaaatgtaatttttttaccaaaatatagtgtcatatgtaattatcatttttttaaccgataaaggaaaggcctcttcttttttttttttaccaaaacaaaaaaaatatatatattgaaaaaaaagtttaggatcattttataatgcacccattaaaaatagtgtatcgatgcacttctatttatttcgtcatttaggagaattttttaagttaatttttttttcataatcgtccatattgtagtcaatagttatttaagatattttataaaattttgacaaattcaaataaatattgactcactgaaaaaagagttcaaacaaactattttacatgtatataaattaaaaaagtcacacgtgcaacagactgtttaaagaatatttttagcatgttaaatttttttcaaatttctcaaaattttgcaaggtgtcttaaataatttcaatgtatacgactataaaaaattgaattaaaaaattctctcgaatacagaaacaaatatggggtgcatcggtagaactcttttaaggagtgcatttgtaacgtctctgcttcaagcctccattgggtccttacaccccacagaatgaatgnctcttatacacgagtacgccacttgtgtttccagcgtgctttgtcct

SEQ ID NO: 84962 - DNA, 866 bp, Cannabis sativa
aaaaaaaacttaagtctattcacaatttcattaattattattttttagagttatttattaagaagtaaaaactttattatatatagtattttaaattgatttgttttaaaaaaattgttgttataaaaataattaaatatggtaatgtagaaaaataatggggtaccatatcttacatattgtcatcactgtatttgacatgttgtcttattatatctcatcctttgtcatcatcgtattttacccaaatttcaaactttgaaataacatatgtgtattatatcaattttcaaattttgatattttcttatataatatttttaatatattatgagtaattattttaataaatatttatattttttttacttaaaaaaataatatatattgtgaaattttaattttataagaatttcctaattatttttagttttaaaatatatatatcatttgaataaattaatgtaaattttataagtggttaaaatatattttctaaaacaatatatgtttgtaataaattcattaattatagtgagaaaataaatagatatatatttctaagcaaatttaattttatagtgtacgttatacatattttttaatcaaattatttaatttttaatttttcctataatcatttaatctaatgatgtaaatgttaataaacttagacatgtaactattgcgaaaagtctatgattgtaataatatgtaagagagtttgcaaattgaacaaaattaactacataaaaatatagcttttaggaaaaaaagaaaaaaagatataagtgttagacaatttatatgtataaactgaaacatatatcattaagtataaagtgcgaaattaataaatcatatat

SEQ ID NO: 84963 - DNA, 500 bp, Cannabis sativa
  modified_base (57)..(57): a, c, t, g, unknown or other
atagtactgcttatcggtttcttgtgcatgagtcacaaatctctgatatacacaaanacacgataatggaatctaggaatgcatctttctttgaagatgtatttccatgtagaactaaagaggaatcaagttcctttaaacaaacacgtaaggctattaatgaaaatagtcacgatcaaagccatgaatcagaggatgaatctagacgtagtaaaagaattagaacaagaaactcttttggtctagattttctgatctatttgctataaggtgaacctcaaagctatgaagaagctataaactcttctgaaggttatctatggaaagaagccatagataatgaaattgaatctatactgcaaaatcacacctgggaggtagtaaatcttcttctaggatgtaagacgttaggaactaagtggtttttcaagaagaaaatgagagcatatggatcaattgaaaagtataaggcatgccttgtaattaaaggttataaacaa

SEQ ID NO: 84964 - DNA, 879 bp, Cannabis sativa
tcgaagctgaagaccacaaaccagaaaaaaaatgtctgcggggcctcagtactgcgaatgtcgtccccctcgagttgcacaaatgataacatcctggacaagtaggaatcctggacgaaggttcattagatgcccatgccatgatgtaagattttttgccctaatttttattttcttatgtctcattctttccttctgttcacgagtgctcctggttgtggcaggaagtagaagggtgtggcttttggatgtggtacgacccacccatttgtcaacgatcgaaggatgtgattcctgggctgctaaggagaattcgaaatctggagagagaagtgtctatgctatcatctgaaggtgttgacaatgttgtgactaaccaagagcattctgaaactgttgagaagtcaatgacctgcaaagacagaaatgaagttgtggagagttttgatgacaacactcccaccattgatgaatccataaatggaagtcatacctgtaaatgtcaaaggagtggatgtattagttactaatatgtattgcaatattttgttgtttgtacttaaagcatgagcaagtaattgtaacaattgtaacttttgttgatcaatgaaagatgttctactttaaattagttcaaaggaaaatttgctttgagtcttgtattactacaaattgtccactaatagcatccacaaaaaacagaaattaaaagcctaaacactaaagagtttgtgtcaaatgtaagcattatgtgcactaattcacacacagcacataatgtgcaacaatagcagttcaaaaaactaaactctaaagccctaaacactaaagtgtttgtgtcaaaagtaagcatcatgtgcactaattcaaaatacaaca

SEQ ID NO: 84965 - DNA, 734 bp, Cannabis sativa
ttcaaaattgtatgctatactttagattctatcactcattgatttaaatatttagcaacttaaaaatattataaccgcgcgaagcgcggattagttgcctagttactctataatcaattgtgctgaaataataattcaaacaaaaacactattttcttttcattaaattattctattttaaaaaaaaatatgttggatatttgttgtaactatattaatatgtatcaaataaaaaaaattatgattttaattatctagctgcatggacgctaattctatgtttagggcactgccaaatttttttaatacttttttggaatttacacatttgatatctctttttaattgttagtatatattcagtactttgcctatttttttttttttttaaatcacatttgatataggggtactttgactaattaggatttttggaatttacacatttgatatctctttttaattgttagtatatattcagtactttgcctatgtttttttttttttttaaatcacactaaacatataacatttatctaagtctttttaggatttttatctctaaactatgaatgtgtattattgtacccctatattttttaatttttaaaaaataatccattaattgtttattggtctttctgtcaaattttgtcacacgtaacaaacaaaatgatgatataattaattaaccagttgccacatcagcatcatgtgtataatttaaaattaaa

SEQ ID NO: 84966 - DNA, 1435 bp, Cannabis sativa
tcactaacatgtccaagtttcaaatgccatagtctagtttgatcaattccctgtgttgtaatagcaggtgcagcatttcccatgactgttttcccaattaaagaatataatccattctttaactctcctttcatcaccaatgtggagttcttagaaatcttcaagattccaccttccaccttgatgatgcacccagtactgtccaacattccaatggacagtaagtttcttctcaagtcaggaacatatctgacattttgtagtgttctaggaatgccatcaaacatggtgatgaccacagatccgattccttgaacactgcaggctttattgtttcccaatagaacagtaccccctgggactttctttaagtcactgaacatctcaatcttgggacacatatggaatgaacaacctgagtccatgatccattcttcctcaaaagccttactcgagactaccaacacatctgctgatgtgtaatcttgtgaagcaatgtcagcttctcctttggtcttgccttgttccctggctaacttagcttttagtgccctgcactcatctctaaaatgcccttctttttgacagtaaaagcatttctttcctgacttgaattgagacttagattgaccactgaacttggacttgttatgatggttcttggaacctttcttgtctgatcttcctttggtgaatagaccttccccatttccctctcctgattcatcactcttcttttgaatctctttggagtttagggcagactttacatctgtcattgttagtgattctttgccatacaaaatagtatccacaaagtgttcaaaagatttaggtagagaggataggagaatgataccttggtcttcttcatcgatcttgacaccaatgttgtttaattccaagatgatcttgttgaattcatcaagatgtttccttagttctttactttcatccatcttcaatgtgtacagcttcttcttgagatacaatttgtttgataaagattttttcaggtaaattccagcaagtttctcccataaaccatcagcagtttcttcttcagatacctcccttaagacttcatcaccaaggctgagtagaatggcactatgagccttgatttgaatttcctttttcttcttctgatcttccatggcagcaagtgcatcagtatccaaagcttcatgaagaccttgatgaacaagcatggctttcatcttgagtctccacagtccaaaatcgttctctcctgtgaacttgtccatttcgagtttggccattgacattcttgatttctctgtgaattaatcgaacagttcttgatctccttaagccaccttggctctgataccatttgttgtgcaagaactgagattaaacatcacacaaaccagagagaagaatgcatagacaagaattcaatgagcaaact

SEQ ID NO: 84967 - DNA, 813 bp, Cannabis sativa
tttaaaaaaaaaaaaaaaaaaacgcctctaaatgtcaattccaaaccaggcgggtattttcacaccttttactttcctttttataaaatgggttgaaaaaactgcctctaaagctcataattgtagtagtgataaaatttatgtagtagcaaccctgttattcaatctataagaaaaagaaataatcaaacgaccaaccataacgacaacaatcgcaccataaactatgaggccaacaaaaatttgagaattcctaaatttgaacatggataaggatagtcatgctactaacacaaaatcaattatttaagccaattgagatttttctaatgtctcaaaaagaaataagacaaaaatctcctttgaaggaagaagataagaagaaaataaagaacacccagacaaaaggatatcaacaattttggcaaaacactactagaaaacaactatttttagtcacaaccgtttagtcacaacagtaattttttgtgattaaatgtgacttttagtcataacaaaatgttacttgtgactaaaacataacatttagttacaaattgtcactataatttaggtttagtcacaacaagtattgtgactaaaaatacatttagttacaacaaattgaaatttttgtgactaatacctttagccacagattttttagtcattacataagaatgatattttataatgaattttttttttacttttaattataaattttgttgcaactaaaaataaaatttattgtattgaaaacaaaaataatatgagcatcaaccagatcttaccaaagccatgtcataaggc

SEQ ID NO: 84968 - DNA, 573 bp, Cannabis sativa
caccaccaccaccaacccccttcgaccaccgtccacggtcccctgccattcaacctagcccttcgactagttcccaatcgacccagagcccccagagcccttcgtcttcttcgttttctttgtctttttttttcttcttcttcacacgaaaccccacccaccatcactgtcatgcacgtcttcttcgtcttcttcttcttctcactgccaaaactcaacaacccccaaccccaaaccaacaatatcatcacgcctaaatacccacaacccaaacttggcaatcactacccaaataccctcaaagaaaaaaaaacaaaaaaaaaaaaaatcaaactcaaaagcaaataaaattagtacagtaggaaaatagagaggccttcttcatgttcttctctagttatagtcccaaaagagaagagtagatagcctgaaattaccaaaattatctggatctcttggtggaattaccattattattgctataggaaagattgatttggggatttgggggactgtaaaagcatcttcgacccaccttttagtggcagcgttgattttcatatttgtggcctc

SEQ ID NO: 84969 - DNA, 875 bp, Cannabis sativa
taatataacaagggtacttgggcgcgtagcgcaaagaaaaccaaaagtctgaggacgagcaataggaagaaaactaaagcaaaaccagaaggaatgaggtattgtcgcgaagaagaataagatatactttaggtctcacattttagtttgttgtgaatcaaggtggaaacccattgggtgaccttaatagtcatatttatctttcagtttattgtaaacaagtaaaaggtccccacgaagacatttggacccctttttcttgtaaaagcgggattaaacattcaaatgaatgctttaaggtggatgttcagtctctcccttttctaagaggaagaaaagtattgagactgaaacttaagtgttcagtgtcgtgacaaatgctacatctttggtaggtcaagaagagagccttgaaagatactcacagcctcaccaaaaaaaaaaaaaaaggaaaagaaagagaaaatggtatgactatgagagggacacctctttaaaagggttacatattttctcgcattcgaaacgtactttaagtaccacgaatgcaatataagaggtcgagcgccacccaagggttacaagctccctcaatagaatcacaaaacttgaaaaaggttgagtgaggcccaagaggctaaatggctcccttaatttccaataacttgtagaaaggctgagcatgacccaagaggctaaacaattcccttaacatccaataactaaccgataaagggtcgactactcaaagagtttatacccctttcataatcaggttacgcccgaaaaaggttgagaaagcctaagtggcaaaaagctccctcaaacaaaatgatagttcatacaagaggttgagaaggctcaagaggctaaca

SEQ ID NO: 84970 - DNA, 757 bp, Cannabis sativa
tgagaatgaaacactatttataggctagaagctgtggggaagaagtttccctcctgattaaaatagatataattggcatgattgcatattaaatacagaatatactgattaagggttttggacaacttgccatatctctgtgatataatccctaaattatagggatttcttctgtgactcacgatgtgagtgttaaaactgctaagggttggcgttctgttcggattgctcacttcctgaccaagaagacttcgtctgtgcgactatatgggatgctttgttcggcatatctcgtgcgaacagatatgtaaagttttttccacgtgtcaccattgtgtgatgccatgtcaggatgcaaaatttggaataacaaaacttaaaagcaactacaaattaattttacatctactcaaaaatatatgtaacaacaaaaaattaaacatatacttctttaaaaaaattgttttaatattttatcttgctaatatattttaatttacctaaagtactatttttggtaaaaaaaattacacttttacgttcatatatatatatatatattttaatatttttacgctgttttataaaataacatgtaaataagataaaaataatatataaataacaaaaactaacaataaataaacaagaatataacacaaaataacatgaaaatattaaaagataatattttcaataaataaaatgttaaaattctaaacatctgtatttttgtaatttttattgtttttatgta

SEQ ID NO: 84971 - DNA, 780 bp, Cannabis sativa
tatcagtaaacataaaccagagaaaaacagagaaagaagaacaaaatatctttgttattgagattgagaagagaatacaatctaaggaaaaatacaagagagaagagctatatatacacagcaagaataagaagaaaacagttacagttgtaacaactataactaactgtaacaaacataacaacttggacaactaaaaccaactaactaaaactaactaattcttgatattaagtaagcgaccgccgatgaggcgcttggtgagacagctagcggttgagttactggggcgtcacacgtgtgtaagatggaaaagaggtatatcttgaaggttcaaatcccgacgtaggcgcagtcatttcaacagatttctcataagtcgatgagctcaaattaattctcatttaagtttagttgtttgtggtgcctaaccaaactgggttttttactctgatagcacaaaaggcaatgttattatgtctatgtggtctatcgcgaaccacaattcatacccttaataattttgttttttttttcaaattcaagtatcattgccaatatttctgattttactctccaccacttattattattataaatataaaatagaatatcgtcgcctaacacaacttaatgaagaaattaaaatttaatgttaaatcaagagtaaaagaaaattattttaatactaaatttttttctcattctaatcataatattaaaaattacacaaaaaaatatattctttactattatattaatttattaaattatctcata

SEQ ID NO: 84972 - DNA, 873 bp, Cannabis sativa
tttttaatacgctacagaaaacattgtcacagtatgtgtacatccaaactttcaattttttttttttgagagaaaaagaatctgcaaaaagaaaacactacaaagctcaagcagctacaaaaggaattagaataattcctcgtgggcttcttcacgcaacctgaacgcctccttagccaacgaatgggtcgttgtgttgaactggcgtggtaagtgcaacaaggaatcatcagggaagttggagaagagaagcctgatctgtgagaaacaagacctgagaaagtgcagaatggtctttccaaacaccgttgaccttggacactaaattctgacagtcggagaagatgaaatcaggcttcaactgggaagcaatacaccaagagataccctgcatcagagcctgaccctctgtaaaaataggagtggacgcaccaggcaagagacggttttacgaagcaataattcgatgaggactaatcttgaaagtgaaaccaatccccgttaagccttggttatggtctaaagcagcatccacaaatagggctgtggaatcctcatgaaaaccgtctactgagaacgattggggatggtgagtgagctgctgagagactggaactgaaagaccataaagattgttgtgttgagcttcatggtaatcctgtaaataattaaagacaaactcttccacatttttagtagcaattgatcccttaaacaataaagaatttcttgtgttccaaatgtgccaaattaaaccaacaaaaagaggaaaatcctgttttgaaatgattttcactgcttggagatagaattcctgaatgtcagtccttcggtaatcacggtaaaaatttttaaatcttgaaaagcttccaa

SEQ ID NO: 84973 - DNA, 719 bp, Cannabis sativa
tgatccattatataagttgtttttaccagtacaaaaagggctgacattgtgaaatggtccactatgacccatattaagtcatgcaatcctgtggttttaggcaacccaaccacaaagtccattgtaatatccctccacttccactcagggagcattcgtggttgcaataacctcgctagattctgatgttctgctttgatctgctgacaagttaaacacatagacatgtattcaacgacgtctctctattccacaccaccaataataaggtttcaagtcttggtacattttggtgattcccagatgtaacgaataaggcgtattatgagcctcatcaagtatttcttttttgaaatcttgtaaagcaacatcccattattcgagatcgagaagtctttactcgaacctgccaatacctcatcccgagtcttaactagctcagaatcttataattgcactttttagattctttctaacaagtctgattggagtgtcaagttatgtagttttccaatcacaaactcaattctagctttaacaatgtctgaagctaactgaggtgatatcattatagcactaaaaacctacatgggtctttttctgctcaaagcatatgccaccacattggctttctaatgatgatataaaatctcacaatcataatctttgactagttccaactaccgtctctatctcatattcaagtctttttgagtaaa

SEQ ID NO: 84974 - DNA, 852 bp, Cannabis sativa
ttatgccgcaaattactcattataaaatttagtccaaatataaaattaacacattttttgagacaaagttagcacaaatttacaccatctattagagatagtctcatttcatgagtggataaccaatagaagagttaatccatcagctatcaagccagtttttaacgcgagtgcctagagctcactcaatccagaatccctttttttttttggcaaaaatgtgtatactttttcaatattttttcaattaattagtgtttacttgtgggattagggaatgagaataatcaatgagtttgattgacttgtttgattctctaattgtttttaagcaacgagaataaaatgtgtgagtcccacactttcagattgaagaatggcagtgacaaactcatggaataattttcgttcttattttttcttaaattatgaattactaatttgaccctcatttaattattttttataggagtcctatatacagttaaaattttaatcaaaggtgtttttattattttaaataaactattataattccaattaatatagtgtaaacacattaatgagagtatttcttattctgatatcgattcttggaagtcaagtaaataactttagcttattctaattcatcaatttgttcattcattattattattattattattattgatatttttagtaatctttacaaaccatgtacatgtacaattaattaatttaaaaaataaacaaaagtaactatatgaactaaagcacatgtaatattgaaattttatatttaaaatttaaattgtgtattggcttatataaattttcttgattattgtagaaaattgctctatcttttat

SEQ ID NO: 84975 - DNA, 551 bp, Cannabis sativa
gggtttcatttgactggtggtgattagatctatttggccggcggtggtgcctggaagtggtagttagtgagtttagtgacttagtagattgaagaaagagaaacaagcccataaggagaagattttttatttatttattatttttaaacttcttaatattttttattatatataattttaatattattaaaaaattggtttaataaagtgacgtggctcaactttgatgatatggattgatttgaatgagttgggctaataagatgtggacaattggcaatctatgtgggagttaatggcaaggtacctactgctgcaacgaaagtgtaacagaaggtatttttgctgccaaaaaaataacttaggtattttcactgcaaattactctttactatatatattctctaaaaaaaataacttgtttttgtttttttttgtcattttttttttcattaatagtaacttagcaagacacacacatttctttttatttatttatttaacaataaaaaaaaagtggaaactaaaattttttaaagaccttcaaaata

SEQ ID NO: 84976 - DNA, 2408 bp, Cannabis sativa
tggataaaagttcaggggacatgatttagtacttatcaaagtttaaggacatgatttagtagatttcaaagtttggggagtatggtttagtacataaaaagtaaaaattgaatgaaattaggcaaaagtccttaaatctaacaatttcaatgaatttttaacggcaaaaaaatttaagagaatgatttgatagatgtcaaagttttggacaaaaaatcctaattagcctaaaatttattttctttttcatttttagttatatatttttattttttacattaaaaaattgaaaaatagttatagataaaaaacaaatttttcaaaaataaaaattctactgattaaaaaattaaaaaataaaaatattaccttattttgagtttgtaataaccctttctaattcctgttcattttctttgggtgatctatggttaataaatcgaagctaccaaaatgaatgactggaaacacacaatttccttccgtttatgtttatgtaacaatatatttcttctgttaatcagacaatttccacatattttggccaagaatacattcatattttaaataagaaaagaagtaaacaaatcgaagtatttgatgaatctcatcatagtataacaagacaagaaacacaataatatgtatttaaggtaaaagggttttgtgggttttgataaagatgagagctttagcaacttccaccatgtctggtctctcatccacattgtttttgacacacttttccacaagcttggcacattccattatttgaagtcttgtttcttcttcttcttcttctcccaatgtaatgtccttcaactcatttttccacgcatcaaaccagtagtcacacgaacaactgttatgcgtagtcgcagcagaatcagccatatgtctcaaactcttctcagtcaataattcagagaatagagccccaaaggcatagacatcactcctttctgtatacctctggagacatatgtcccatagtcccttcaataagatccacatctacatgagtttccccatcaggaattggaattgatgattggaaatcaaatagcttggcaccatagtcttggtctaagtacactgcttccttaaagatctccctatggatgaaggtctttgaatggccgtgatggagataagcaagtgcattggctattccaatcccagttcttaacctgctctcaaatggcagtcgtggtggtggtggttcgttactattattcccatctatgagaaaatgagagagattgccatgaacagggaactcataaaccaacatgggaaactttgagtcgaggcagtaacccaagagcttcaaaacgtttttgtggttgttcatctgtgatgccacagaaacttcagtagcaatcttttctaactttacatcaccaaaacgatgactaaactttttcacagaaatttatataatcttcaccactatcatcatcatcatgaattactcccttgtacaggccgtaatttccatgaaggtgtatgaatgtggtatcatggaagttatttgttgcgttgttgaattgttgagaagagtatgaacggagtggattagattttccattgaacaaacgaatggtttgctctaacacagcacctccattcctcaaaaagaaaccattcatttcttcatcttctgtagtagtacttttgtagcatgaaaacataatgaagtgaactaaaggaagattaatattgattgttgaacctatatttttataaataaagaaaaaaaagattagtctttataataaaataataatattcccacattatattcctctcagctcaactaatccacaacttcttatctgtctccacttcccactcactcacaatcatgacacccagtcaacacattaaaattaatgctattaattccatcacatctaatattttgacttctattcaaattccattgaattatatattattagataaattttactatccaattaatttctatcaatccattcaatatctaatagatgttggatttaaagataatttttttataaaaataatacgaaaataaaaaaaaaattacataaaaataatataaaaataacatttaaataataacaaaaaataacattcaaataacaaaacatcaacaataaattaacaaaagtacaatataagaaaatagtattttttgtaaataaaattaaaaaaatcttaaaaatatttaaaatttcgtgaaacttgtattttcgtaatttttttttcttgttatttttgtgtatttatgaaataattcctaatatttataaataaattgaatcagattcatttaatattttaaatctagtatctattagattcatttagatttattcattctaaaaaaaataaattttaatattaattttatttaattg

SEQ ID NO: 84977 - DNA, 2991 bp, Cannabis sativa
  modified_base (67)..(69): a, c, t, g, unknown or other
  modified_base (2940)..(2941): a, c, t, g, unknown or other
tatgtttttaattaaataaaggaacttttaattaatcacgattttcgataacctcgttgattagcannnagctgcacagtacgttaaaaatcatgctaacatgcctaagtaagttagggtgtttcacgttgaatgtgcaccctagaggattagttgagattggtgccgtagtggacttactggaacaaaattgcacttgtggctcattccaaatcatgaagttgccttgtgctcatgcatgtgttgtagctcaacaatgaagtattagcttgtacaggctatgcttgccatattacacaataaaatattggagcacctatgaagatacagttatgccagtttgtgacgaggatgattgagaattgcctgatgacataaagaacatgccagttagagtgccttttaagaagcaaccagtatggaaacccaagaagcaagaggttctaagaattaagtcagaccaaactgcttgtaatggtgaaaggattgtggtaaaacaaacttgtagcaagtgttattgcaaagggcacaacagaaagtattgcacctgtagaggttaaaaattattgtttaattttggtaatcgtaatgttatctattgtagtgttacatatttttgttaaactcttgttggactttgttgaaaattattatttgtggcatgagcaggttttcattaacttacagcaacattttcaacatttttttctgtaaaaaaatgactagtgtaatgctagtcggatgtgggcccgatgttggtctaatgcttgcttggggttatgctgaaaatcagtcattaagtttttaaaaaagaaaaatgtagttagcctcactatcaccatcgaaccatatatcaaacctatatcggatcacatatcggacctaataaaaacctttgaattatgtatttgtaatctagaaaatataaaccatcgaactcattagaccagcatcaggcataacagaaaagtttcataaatttattttttttcatagcttaaaattttgttatgtattgttgttaaatttttgttggactttgttaaacataaaactatcatttgagcgatgagcatgtcttctttcagtaactgtatctctaaaaaaatgactaatccaataccggtctgatagggcccgatacaactcctatgacttcatttcatatatttaggagaaaaaaatagttctagtctgacttattgactaatggattcgatgtttttcaatgtatatgaaaattggaccctatcaatcaatacatcagactagcattggcccttttggaaaatattaaaaatcatggaggtacatatgataatagaaccctattggtccatatatcagactagtattgaccctttttggaaaatataaaaaagcaaagataaatctacacaccactgctctctaaattacttcatattgttatcgtgtatattatgaaacgaaagttcgagcatgttaagctcgatgtgctctattgtatacatcccacaatcactattttatgagacaataaaaaaagatttcataaaatattgaaaatttaatcaagttacataataaaaattcacttgtattaaagttaccttgattttgtttatcgtataatgttgcgatcgatgacttctgaggtgaactgtccaacctgactctttgatgctgtcaactaagacatgatgaccattacatgattctcaaataggtcagactggatcagcaacgttgggaacaaattttcccacgcttccatgtatatcttcaattcatcattggaaatcaatccaagactcgagttaaatacgcttaacatccaacgattgaagcttgcctctaaagtcacccaatgcttttgggtgttgaagatcagggctatatatattctctctttattcttccaactctccaagtattggacatcatcccttcgaataagattcaatataccatcatcccactcaaagttagagtggttgttacaagcagtgtcccaccgagcaataactcctgatgagaaaatgttaagcatgaccacacacatatttgggtacacctctagaaaagtgttatcgtctcctcatcaactaaaatgccgcatctaaatgctaaaacatgaaaacaaaatatgttagagattaaataaaaaagatagaaaaggtctttgaaaacaaaaagcgttaaaagtcataagaacttacatcatctccaagccatgtccttgagtatgcagttggaggaaccaagttgcattgtgtctaccagagtagtactccctcagatacttgttcccaatttggtcgagaacccaactttggatagacgaaagaaactttcgatcaatgaccctaagtgggtctgcattcatatttgtcttcgatgccttagacttttttttcattttagtgtactcatcgaaccacctagatgactttctctttcttctatcctccgttggtttagagctatctctaattttgtatctcagaatctcgagtatctccaacattggtaaatttttatattgtcaggtgtactcaacacatcatcaggatcatctagtccataatcatttggaataatgatttcagtttcacgagactagggctcttgttgtggctctgcctcttctgtttgccttctttaatcgtccatgaaggccattagggtcttcaattaaccaatactctcaatcttccctttcaaaatagcatcctgacctcgcttcagaacaatttgttccctctccacagtatccaaacttgccaagattgtaaaggataccgtttcttgaggctgtgaagtgttgggagtagatgcagatggggcaacaagaggatcttttggtggtggagacggtgcaggtggtgtactatttctaaagatttgggcttcttcttcctacttttccaatgttgaggcaagcttctgggcctagcnncgtagagcatcctcagttcattgctgatcgtcactcaacactagttcctc

SEQ ID NO: 84978 - DNA, 773 bp, Cannabis sativa
atgtgatatttatcggatgaagtaatgcgtctatgacatggaaagtaatgagcatgactcggataaacttcatggttatgttccttgatgaaattgtggacatacaatttttcatccaaccttacttttacacgcaacatggctttgcaatttgtcattaaacaaggatgttcattactagcactagattttttttttcttcatatcttgtacaagcaaatttcacatcaataaattctcttgatatttttgatcgacgaccatgcattattgagataccaaatccaatcaacttaaagtatttcaaataaaaagcatgtgcatcacggtgtgagtcaaactccatagcaatagatggctctataagtttttcactttcatcattcaatttttcatcaaatatgcatttactagtatttttgtccccatcatccgcatataagttggtcgattcacaagttgataaaaagataagattagtgaaattagttgaggagattgtatgtagggtaggttaatacttagctgctataaaaggaaggctgatggaactcacaacacacaactcagaagcgcagaagaggactagctttcatttcatcattgcttcctattcttctctcttacacacaaccatctcatctcatcatttttcttttatacacaaccatcacattcttaatagtttttttaattaatcacaccaagttgcctatttaacaagcttctataaaataataggttgtttatttaacaagcttctacataaacta

SEQ ID NO: 84979 - DNA, 572 bp, Cannabis sativa
gctaaggctcagaattttcttaacaattacaagtctacacagctgctatatcttcatgctggtttgtcaccggctgctacaccctccacatgtaaagcttggacacctcctcctcctacctgtctgaagttgaatgtagatgctgcctttgatgaaggtcgtaacaaaattggttttggtgctataatcagggattcaaatggcaaagtcagggcttcaatgtctcacccaattaatggttgctgtcaaccacaagaaatggaagctaaggggcttttttatagtcttaaatgggctagacaattcaatttcaaggttgatatggtagaaacagattccttgatccttgccaatgctctccgcaaatcaacatcaaatcgatcttcttttcaagatttaatatttgatgttcaaactcaattatcctatcaccctaccgtttgtgttaatcatgtttatcgtgatggtaaccaagcctctcacggattggctaaacaagctctagtattggataatatttgtacatgccttgagggctttcccttagctattctctctgttgttgtaaaaga

SEQ ID NO: 84980 - DNA, 1512 bp, Cannabis sativa
  modified_base (545)..(545): a, c, t, g, unknown or other
  modified_base (759)..(761): a, c, t, g, unknown or other
atatatatatattttaattaatttttgtcttaaattattatttctaagcttattaaactcttttgtaatgaagaaatctaatttctatttataaataatactaaatatatagtaacttactaatttttaatataattactttaaaatatatgagaaggaaatattaaatttttattcttacctctttttaattagttcaaacataagataaatagattaataaattaatattctttttattttttaaattttaaaatgttataattttagtaatttatatcattttagtatgaatgttttatagaatcttgtactattattattttataaatttcaatattataataatgaagatatataaaataaaaatattagatgaaaatattaaattaaattaaaaaaaaaataacatacaaataacaaaaaaattaacaacaaatacataaaaaaagtgtattttctgtaaataaaatcataaaaatcgtaaaaatatttaacattccgtacaatcgttttttgtaatttttttttttgttatttttgtntatttgtaaaataatccctaaaataattgtgccaaaaactcatgagtttagaaaatggataattacataagacatcattttttgtaaaaaaaacattaaatttttacgtttaaagaattatttttatatttttacggtttttcatataaacaacaagaaaactatataaaagtaacaagaaaataacaataaaaaataatatacagataacaannnatcaacaataaattaataagagtacaatatagaaatgccgtattttctgtaaataaaatcataaaaatcataaaaatatttaaaattttgtacaaccgatttgtaatttttttttattatttctatgtattttttatataatccctttagaaaaataccaacccatttaaataggttcagaattgggctgtactattaatgggctttagacaccaagcccaggcccgtagtccactcattatccccacaaaacctaattaatactctccctctctctctctctgaaccctgaaactggaaactgaaaactgaaactgaaaccgaaacccattgaagcgtggttggctcacctcctcgcttttcctctctctctctcttggtcactggtttaccggagctacctcctcgcctttcctctctctctctcagctgtcctgttcctgttcgcattggtaagatctttcgactttgtatataattgtttggtttttctgacgggaatgtgtttgagggttttaagaagcagtagttaggtttcaaaaggtctttctttacttgtagttttcagaaatttcttttctctctttttatgattttattttatattctgtgatcagtgttaatcctgttattgttattattaaatcaacctatataattgagaagaacagcattaggtgataatagttagttgtttttgaaatataccgatttgattcttttatgttgtaatcttgtaatcatcttttat

SEQ ID NO: 84981 - DNA, 893 bp, Cannabis sativa
atttcaagaaagaaaacatccacatcgtgccaatttgggttcaactaaagacatagaagtcatttttagggcattcttatggaaagggcagcaattgatggaaggacagggtcgaattgcttgggaaaacatttgtcaaattaaaggagcacgagatattggctttaagagagtagctgaatggaacaagacagtgatgtttaaatatgtgtgggcaattgcaactaaaaaggacaatctatgggtcaaatggatccatagtgtgtatatcaaagaagctcaatggtggagttatttagctcctcaacaaggtagctggtattggaggaagatagttgcattgaaaggtaccattttaactttaactactccttcctctttcattcaaagcagatatagaattttaaggataaagttgttatgtcccaatgagaaccaagttaagtggagtaatgaagtttggggtagacttaatactcccaaacatagctttgtaacatggcttgcaatccaaaaatgattgaagacaaaagaaaggttgtttcggttcaatgtagcagcagatatgcaatgtttgttgtgtggtacaggtgttgaaacaagtgatcacttattctttgaatgcccctttgctttggactgccttcaacaaacaaaagtatggctgggatggaaggctacagcaacccggttggacagcttggtgaaaagcattggacgaaggaagacttttggcttccaaaagagggttatagcagctgctattactgccttggtgttcctcatttggaaagctatgaataggaaattttggcagcagatagatgagaaaccgaatgctattattcagcaatggaaaaacacatgtaaaaatataatacatagtgtatggc

SEQ ID NO: 84982 - DNA, 501 bp, Cannabis sativa
cttaaatcagcctcaacattcaaggacatccacttaacgtcggtcaaaatagtacaataggtcggtatcaaatttagacacacccttgcagcaatcatatgcacaaaataatacagaaaagatttatcatttattttctctttcaaaccttcacaatcagatcaacagctttgtaagccgagtccactggaccagttcctactgaacaagcaacatgctctttcccatctgaaccaataagtttgacggttgcagttgaaagaccaagagttccacatgtaacctgtgctaggttcacatcatttggtgagaattttccctttaaaacttataattttttttttttgaacgctttaaaacttataaaattagatgataagaaaaagcaaagttgtgtctagattcacctgcaaatcaacgaacttccagatgacttctggttgaaaaacttcatccgaaactagtgctctgaggtcagcatcagttatcctctgagatttt

SEQ ID NO: 84983 - DNA, 825 bp, Cannabis sativa
gcatccccacaatgatcagcaagagttccatgttcaaagaaacaacgcacattttccacaactttatctcccacgatcggccagcacttttggaagaaagcaggagtcatctcgtcaggtcccgggctcttgtcagggtgcatttggaaaactgcttttcgaacctcctcttctgaaactgtttgacaaagttccatattaacaacatctgacactgtagttgacacacaattgaccacttctgcacaaacactacccgaagatgtgaataaattgttgaaatagtcgactacaacagattgcaaacccgaatcccgtgaaacccaatttccattagcatcgcgaagctcattcagctgattattcctctttctattactagcagccttatgaaaataactgctattttgatcaccctcccttaaccaaaattgtttagccctttgcttccaataactttctctttggtcaagagcttcataaagcttctttttaatctcggcatacctctgaacttaaatggagtcccgtaagccatggagtttcttcaaatcagccttgtgacgctttatttgttgattgagagaacccgttaattccttaccccaagtagatagtctctcggcacaaagcttgagtttatgagagatgctttcattttgttcttgagaccagacatcacgcacaatttccaagcaaaaaggctcctttaaccatgaattttcgaactgaaatcgatggttaggagtaaaattattaaccgcaacgggttcaagaaacaaaggagaatgatccgaagtagcaaatcccaaattagagagcaca

SEQ ID NO: 84984 - DNA, 634 bp, Cannabis sativa
gtattgaatgtgactttctgcaactagctcttgtgcaagcattccttttgaattttgttactacttgtctgatatagatatagtatagccctatgtagttttttgtttttttttagcagtgtagcttggtatttctacattacataatttgataactgatatcgttaacaaccttgtttttattagaattttgtaaaatctcacttcttctttttcttcttcttgttctttcattattatgctttcaggaaagcacatgagaccagttcttgacttggtgaatcctcaacataagtgagttatttaaaatgataaatcatttaactatagtgttgttcatataccagagtatgaagggagtctagttgatggatctgtcatatgtagtcttgttactgcctgtagataatatgtaaagtaaaatcattaaaccttgttgatatgctggaaatttatttactgaaacaatgatttgatgtttcgattttcttatcagagttgaggtttttttaatatttgtatgatgcttcttttttgtatgttcttattaagacattctacattttgatttggtttttcctaattactgttttctcattttcatctcatgtattgtgctttgtagaggtccttg

SEQ ID NO: 84985 - DNA, 580 bp, Cannabis sativa
aaaaaaaaaaaaaaatagatagtaaaatccttttaaagtttgatgagatagtaaaatctgacagttgtttgcaaaaataaaattcttttatttttgtgagatttcatatttttagaaattcttctttctctattttttttttttttaaaaaaaaaattctttcttaaaatatccttttgatatttttatttacacatttacagttatttttttgtcagaacatatttacagttacaaaccaaatttaatatatattttatttaaattataattaattgatttcaaaaaaaaaaattataattaattatattaattatggaatgcgattacatatttataaacttatagtatgcttttacttttgaaatgataaaaaataggagaattacttatatactgttttttttaattttttttttttttaaatttacgatttgtgtttttaaagtggttgcagcgctagttgcaatagaagtttttatacgattttttgttacaatttaggttgcagtgctatttgcaatagggatttctacttagaattctgtaaaaatgcaaaaaatgcaaaaatgcaaaaatg

SEQ ID NO: 84986 - DNA, 629 bp, Cannabis sativa
gaaagcagaaataagaatgacctaaatagttttacactttatttttaattgctggttacttcttctgttaatgattacatggtttataagttatgttagatttttggaaccggatggatggtttacttcctattgatctagtatatttgtccacctttctacatttaaatctgtttccatatgcaattcatgcacacttttattgagtgatcttgatacacaccagaagtgtatcgatccaaaccagaaagatatatagagaaacagagagtatttactgaaaataagaaattgcccagacattcgagagacctggtttctctccaaaagtctaacctattttaattctctaactttccaaacaaagctaatcacaaaaacagaaacaaataattccaattaaatcattaggcaaaacaaatcataaacttccctaaataactcatctcaattactgtgagatcttctagcataggtatacgaattgatggcttatttttacgtgctgcccaaactttcaccttgtcctcaaggtggaattatgggaattgctgtagcaagttgttgtagttttcccaagtagcttcaaacattggcaggtccttccataagattaagacctccatttc

SEQ ID NO: 84987 - DNA, 536 bp, Cannabis sativa
ctctctctctctctctcgataatgcaggtacctaagaccacgacctagttgctgccgttgaggaccatcgagccaggcacttttgtcgagaaccaccgacccaggtaagtctcgatcgcctctttctctctctctctctcgatctagggtttttcataatttttacaatcttattgatatttatgtgtgtaaatatccatatttgagtattattgtgttctttattttcaaatttgagaaaaaataatggctataggaaaattaatttaaggttttcaaatttgagttttcagactgagattttgtgtatatatatgtgtgcgtgtatttatttgtttatttgttgaaattatatttgtttaaatttggtttaagtttggtttgagttttgttcgttttttttgtgtcatatggaagtgaaaaatagattgtggtggtagttctgtagtagtgggtggtggtgtttacagtggctatggatggtggtgatttcggtactggtggtggtagtgtttacggtggctatggatggtggt

SEQ ID NO: 84988 - DNA, 578 bp, Cannabis sativa
tacttaacaaacttttcattctcgccaatctaacgagtggatatggcttaaaagtctagtctaaatttataagtcaacagtaatgaacaataataaaaaaaattcaatacaccatgtttgagagaacaaacttagcttttattcaaaagaatctgtacaaaaaatgagaaagattaaagcttgatcagatacaaaatggagtttatctccttacagaacacctcacaatgggaatggcatgatcatacacatatgccttcctttacagccttccttccctctcaattgttctctttctctctcaactgtattttcatttaagctaatctagtccttatatagctatggctcgagtaagtgagcctttagttctaactgactaaactaatttttacatctaggcaactaacataacaaaattaattagtacacctaagatagatgggatctactaacttgtttaggtaatcactttcacaggatcaatatgagaatatatgggtctaagactatttaaattatgggaccctcacttttaaaaaaataaaaaaaaaatattgaaaaagagtgtcatgaga

SEQ ID NO: 84989 - DNA, 645 bp, Cannabis sativa
aaaaaaaaaaaaaaaaactactcggacagattaatatgtccacatgttttttgctgacataggaagttataagtaattgcatcttatagttactttttgtacatgttttcttgtgttagtccgacgagtactatatatataaaagtcgttaattaatcactattcatttttgtattctctgcatttgatcaatgccactcatatgtgagctgaattgtaattgcgaaaggctaatctctattgtctcagattgtaaaatcactttggagattcaatatagaaaccagccattgttgaaggttgttttatttgatcaatgcaaacttttttttgagcattgtagataactactgatcaagaaagatttttgttcttcttatgaaattaaaagatcaggcatgagaaagattcatcaactggagtaggttgatagaaatcaaattgggaagaaagtgaaaaatcttaggacaaatagtggtctagagtattgttccaatgagttcaccaaatttcgtcagcacgaaggcattgttaggcacaagaaagtaaggaaaacacttcaacaaaatggattagctaagagaatgaatataacactcattgaaagagtttgatgcatggtcaaagaattgggcttgagaagaa

SEQ ID NO: 84990 - DNA, 776 bp, Cannabis sativa
  modified_base (675)..(679): a, c, t, g, unknown or other
acaaaatatagacacaaattaaaacacaccagccgaaaatatacaataaataattaaatatttttgtcaattaaatatgccaaaaatagaattaacaaggcataatagatttggagatggcgagaagaaaaacctgctgatcatactgataccagtattgttgcccaaaaactcttcatgaataatgggaaaagtcaaatcgtcttagtctcattgctataacaagtttaaatcatgaacatctattgagcggtttgtgagacactacaaataccaaagaatttttcaatgttgtagaaaaactatatgacactggtgaaaacgctgaagctagacatcttatgggtgcaatgacaaccattcattatgataaatcaaatgagtgcaagattttattttaaaaattgttaatgctcaatccaagttgaaagatcataatattcctcttcccggctcttacattcttcatcgtgctcttcatgcatttcatgcctctcttagttatcaaaacaacctacaacacttataataaaacatagagttttagtgacctaattttctcattgtgtagctgagtaaagcaacttgttaaaggagaagaatgaatcttctcactatgtctctcaactcaaagccaacaaaggatagggaaaattgttatagtgagatttctcnnnnntagaaactcgagaccaaactcctatttaaaggacacgtatattcagatttccaatgaaagctgaaatgtccaggagagacttctcgaagtttagacc

SEQ ID NO: 84991 - DNA, 1047 bp, Cannabis sativa
gataaaaaaatcattaaatttttgctcatgttacattggaatggtctttcctaccatttcaaaatagaatagtcattccaccaaaatggtggaaacgacattacaatggaatgtcattctaatactaacaaaggaatagaatgaaaattgtttactttccattctattccgtttcattacctccaactaaacgccaaatttgttgtaaacgccaaatttgttgtaacaaattataatgttgtaacaaattataatttttgtgactaatacctttagttacgacccttttagtcataacataaaattatgatttataattagtcacaatatttttacttttcgtcacaaattttattgtgactaaaagtaagattttttgtagtaaataataatatgaagaataagaagaataattataatatcctggaaactataataatatttaattagacatattttattaaatatgtgatcattcagatattggagtaagactataatcttacttaagctaattgtgtgttaattattataaatctagtaaatgagtaaataaagcgtaatttattaattattgaaattatatcggattatgtgggtattgtaaatatcttttttgaaataaaatatttttgggttcggcgggcgtggaaacttgacggagtggtcagaaatgtcacggcaataagagttgtgttatgttggaattatactggactagtttagaatattatgtggtcgttttagtcagggtagttagagagtgaccaaaatgcccctacgtaatgtttttagcttagtagtcttgaagagtagaatggtcttttattaatgttagactattttgtcctaagtgaatctttctaggctgaattagaattattattaggtcagaatagcaaaaaaaataattagataattgaagttatattccaaaagagaaaaaaaatcaaatatgatcacatatcaagcttctccttttttcttccttcttcgacagtcgtataaaccaactaaaccagcaatttttctctactaatcaagcaa

SEQ ID NO: 84992 - DNA, 1179 bp, Cannabis sativa
atttgtagaaagagaatggtggaagtacaccaacacgtgctgctatgtttaacgtctgctatacaaaaaaagataagagtgtaactgatacaacgaaagaagtaatggtatgatcgaatattttttaatttatgcctagcttgttgttttattacttcttaatttatattaatgataggtacaattacaagagaaacaagagttgaatgaagatgtatcaaaggaaaagggtatgaatgacactttctctgaagtaatgggtaaagaaaaatacggatcagtccgtatgtacggttttggtgtttgcccatctgacgtatgggaaaacaaatccaccaagaaaggaaaccaaaagaagtatatacagactctagaagctgaattgaaagaattaagatctcaagttcaagccaacaagcaaaattacaatgcaaatgacacatctattatacctgacatggttagagctttaatctctctatttttttttaataatatctctttagtttttattattattccatatttttcagtacttaaaactgaacatattatgtgcaggctcttaattacaatgacaatgccacttcttcacaactggttacgttttaatttttcaattgattcaaaaaaattattaaccaataaattatgttactgatatgttgttatatatgtaggccaaaaagccttgtatgtcacataacaaggaatctcgacgtcagttgtggttttcatcttcagcatatgatattccaattgttgaggtaaatattattattattatatagtttagttattacttaaatattaatattttttattaatgaatttattaatttttgtgtaggttggtgaaatggttaatcttaagagtgttactgctgatcctgaaacaattgctattggtctagttgttagtaaagattcatcaaaagaagttggaggaaaagagctcggagatcattattctgaagttgttgttcaagtttgtatcaaccccgacgaggaattaattagaccatatggacaatgcaagacaattggtgaagttgttggagcatctattgcatggccaacaacatttctggtaacaattaaatacatatttaaagttttcattatatatgtatatggatgattatttatttgttatttattgtgctaaaaattatgcag

SEQ ID NO: 84993 - DNA, 612 bp, Cannabis sativa
aaaaaaaaaatcaagcttgagcaataattaatcatgagttaagcatacaaatcatgagaatctatcattttcctagaattataactatcacacaatcaagaatttcataatcaacaaaattattttttacaagaccatgcataagacatcaaagtaaaaacacacatcaaacacgagcaatcattgtcaacagaatttcattcaacccacactcactaaaactaaagcaaaaaatattaatataaactaaaaaacgataaaagtaagtaaataaacaactaaccactaagaaaaaaaatggatagacacgaaggctcaatcaaataaaatcaatacaaaataaaaagaaaagggagaaaaactcctataagttcgctttgttttaacgttgttagctcgactacatgttgtgctcatgtcttcatgttgggtcttctaacaaagactcattgtttatgtatttatcaatggaatctaacacattatacttaattactaaaccattaaatcccattgtaggtatccatgctttcatatccaacttcttagtatggagtaagaatggtctcccaaatagagttgatgtaggattgggatcaccctcatcttcca

SEQ ID NO: 84994 - DNA, 819 bp, Cannabis sativa
aatatatcgactattttcatcctcataatgtatgtgctccattgctctttgaattgctttttctcttattttattgaatggccatgtattaataataggctcggcaagatagtacacaccatcccataagagacgctgtacttttccgtgaggatagtagttatcctcctgtattcgaccataaatgcaaattaaatccatgtttatcttattcgtaaactgcaaaattttgattggatatttctagaaaaataacataacaccaatattggataattttcaaaaatactatttttttaatatttattcacaattttacagtttaaaacttttattaacaaaatatatttttaaagttttaaaattataaaaatatactttactcaataaaaaataaaagaacaactgaaaagtaaccagaaattaatctcacaataattataaattaactataaataaattataaaacaactaaaaatatctaaaaaaaacaacttgaggataaaacaataaaaaacaaaacggtttattatttttaataaaaaaatataattataaataaaaaattttaaaatataaaaataaaaaaaaaattccgagtatttttatatatatattttaaaatttttaatcaatattatgtaaataattacaaagataaatatatataaaaagaaaaaaaaatcaaagtgcactaaaatcaaaaaaaaaatattgttatattaccttagcacatacatgacgcattttgctccatttgattttttggtaaggaaggatgtgaatttcttcccttagttgcttaatgagaggtgtaat

SEQ ID NO: 84995 - DNA, 502 bp, Cannabis sativa
tgaggggctggcttgccatagagccccaaggggggactagccggctagtgttgtggttttgatggtgatgttgttttgtttttttaggccttgatgaagctaagctaagcacatgatggctctcggggatcctcggatgctctttgggagcaggtgaagaccttggaggcttcccttgttgtgaaggacaaagccatatctaagctggaagctctcttggcagagagacagagaatggtctgacttacagactatgcttggtgctagaaacacagagaacatcgcataagtttccttcatctgtgggcttcatactaaccttgatgagcacaaggagaaactgagggaggctgttgatggccagtaggacttaagagaggagtttcttgacctgtcctccaaactcacttacgagttcaagttgcgcaacccccaagctagtcttgttggaaatattttaccaggatctagatttacgaccaagtatgttttattaacatcc

SEQ ID NO: 84996 - DNA, 541 bp, Cannabis sativa
tgaactttcttgcttgtttcttttgtttcttctacaggtcgtctcaattttaagatcaactgccagtataacactctgcccgtagtgtcgcatacaccttcaattcctgaaatagattaagacaatgttgaaagaaacaggttagcaatcagcaagaacaattaaccaaagtagaatttaatctaatcttatgcaatgtcaatttttaaataatttcctggtaacggcgccaaaaatttgttatgaaaaatataaacattacgcaagtgcacgtaatcaagtagtaaactcacacaggtgaggttgaaccacagggaattgaactgaataccactagattaaatttatgattctatttagcaaaccaataatttttatgattgaaacacaaaacaaaaagtatcaagaaactaaaattgacggcaaaagatttaatcaagatgataaaatagagaagagaatcctgttgatttattacccaattgttaatgctaattactatcatttttcttgatgcgaacgatagattaaataaattaac

SEQ ID NO: 84997 - DNA, 1759 bp, Cannabis sativa
  modified_base (1314)..(1314): a, c, t, g, unknown or other
aatatctattgaaaatggacattgaaaatgattaataataactctagggaaagaggataaaaaaaataacgtatatcatcaattagatcattaaaacatgataaatcattatgagaagagtttagagctgaggaaactcttagcgcatctgtctccacaatatctattgaaaatggacattgtgaagcctaattgagattatgaaaaagcgcatttgcttccgtttcatcactacgaaagcatccttgtacacgtttggagagggcagcaaggacatctcctctatagttgcgaatcacagctccaatgccgagtgtttgattgttgaaatttgctgcagcatcaacattcattttaagcatatgcatagcaggattctattttttaatcttattcactctttctttagtgatagagaaaatgaacaatgtttaaaattattatatataatattaaaatattagaaattaaattttaaaaatatattatgtttacttaaataaatttagatttttagagaaaaaaccagacttaaacttgttcccctaaaatttatctcttacaaaaattgaatttttaatatattttttaataagaaatatcttttttttcaaatcgcttaattagttgtgaaattttaatttttttaattattcataatgattttttttaagatctaaattaattttgtaagatttagtaaaaaaaaatgaatttttcccatttttatttttaggggatacgatttgataatttttaaaatttaagaggcaaagttgctaatttacaaagatatttcagcattcaaacgaaataatgagatcagacctaatataagaactaaatttttataaatataaaaattcaagaaatttttttaataaactgtatattttaaaaacagaattaacattaacgaaagtccacagagtaaaattaaaaattatttttaatataatatatattgatatataaaaagattatgtcgattgggtgttttaataatatagtataaaaatatgttgtatccctctattaaaattttattagggatttctccctttggggatagtctttttcattgtatccatatgacacatcctcgatatgaacactagaaagtttttttactctaattttcgttataaaacagtatttatttattagtgtaatacactgtttttatctctatcttttattttgggtgcttttagtaacacttttacaattagttttttgtttttaatattagaaaagtaaaaatatttttcaaatcatgatctataaaattgtttttacttttcaattttttanttaagaatctaaattttaaaaataaaaaatcactttcaaaatttaacagttttttttaaattaatattttagactctaaaaccaacttaaaccttagaaactgaactcggacccgaccccaaacttagactcaccccgttcctaacctccctagacccaacttaaataaaatcaacaaataaaagtaaaaataatatttacataacacattttttttatttttaaaattaaaaaataaaagtggttgtagaacacatttttattttttaaaaacaaaattttaaaaataaaaattttacttttatttttgtgattaaaaattttaaaagcaaaagtattaccaaacgccacctttataaattatttaaaaaatttggaacacctactaaatgtatgctataaaaaaaaaaataataaagcctgaatgaaaaatcctcatcctatc

SEQ ID NO: 84998 - DNA, 1032 bp, Cannabis sativa
tagtattgggacgttggagaaagatttaattcggagaagagttaccaaaactaaattctgaattttctagaaacagttatttaatggttatttttatgttattttatgattgttttacgaacacctggaaccatttttaaaaacgtccataaatgtatatgaatcgattgagcatgtttccagctttcttgtccaacgttttcatcccattaaacactaattaaagtgtgggtaacagccatgtggtgaaaaagactttaatttttatatgtgatcctcaaaatactataaataaaggttttgggttcattttgtaacataacaagtttctatcaagagagcacatttctagaaacattttaggcttgataaatccagaaagctattttcattcttttcttttccctaagtgcttgtagtaggggaaataagtttttcgacaaaggtgtaagaccttgttcaagtttggtgattctcttattatacacttgtggtgtatgtggtgttgaaattgctctcacatctttttatatttatgctatttctatattgtgtttatgtgtagcttattgcattgagttgtaattcttctcttcatctctatattctctattttatgtgtatattttgtttagtgttgcaacattatttaatctatatttttgtcctttatattatttgtcaaagaattgtaatcttattgatttgatatttctattggagcataataatttctaacatatatatagtatgtactccgacatttgtgcggagaattaatatattattacaaatagtgtgtttctaagcttctttatagtattaggtggcatttagttggaggtaacgaaatagaatgaaatggaaaggaaacaattttatttcattcctttggttgcattttaaagtattagaatgacattccgattgaatgttgtttccactattttggtggaatgactattccattttaaaaaaggaaggaaagaccattctaatgtaacaaatgaaaaaatttaatgatttttttta

SEQ ID NO: 84999 - DNA, 572 bp, Cannabis sativa
atcaatgtggttggtctcccacagtacttagggctgaacgtaacacattagtcaccttccgagacacccgtcttaatttttatatttgggattcctttctcgtagagcgagttgctcataaatttgacagctggtaccctagattccacgtctagattaactgtcacgagtcatattatggtatagctgagcaatatggcactatggtagatagggcaagtcatatagacgcgagctgggatttggaaccaatcgagcccttcgatatattcaagattgtaggctgtagggattttagtggatattatggtccttctaccccctcttctagtgatagctcggcttctagtgacttcggtaaatctcttaggtggaaaattgtactccctcctcctttttcatctgcctttttaataattgtaacactttattttgttttttagacatgggagattttgaagatatcatggatcggaaagggaagaagagggggaccaacccaggggtctccacaaatgccgaggtggcacctcctaaaaggcaaaggaaaataattgcctacaaaaagaatt

SEQ ID NO: 85000 - DNA, 580 bp, Cannabis sativa
aaaaaaaaaagcaggatttttttttaaaagttggaagttccaggtgttatagcattgcttcaacattcttgagcaaagacgcacaaaaaaaatgctatgttaagacattgctataattctttggagcacgttattttagaaaaatttgggacaataaataataacaatattaatactaaaattttttgtgggatattatttggggaagtaagtgtgaggtctcattttggtcttagaaaaattaaggtacttttagggtgatttgagccaaaatgacttctcttaaccagcttcacctaagccttacattacaagctcaaaaaagtccttttgatcattggttttgtgtttgtctacattagtggagagagatttgtcattttagagattttgtgcttaattcatatttgcataaattgatataaatggcatgcaataatttaagaaaagacatttcttacacacacttggagtaattaaaattgaaataaaacttgctcttgaatttttcacaattattggacaatctttatatttttctctaagctatgtttactaatcaatctttaaggaaatttag

SEQ ID NO: 85001 - DNA, 942 bp, Cannabis sativa
gtaaaatatttccaacacttttatatttaaaaatcgacatgaaccttttgtatttgtgctttaatacaatttcgactatgctttcatttaaaatgtaatctattgtgtgtgcttattgtggagagcgagttacttggaagaacgatgagtgtaaagaggatggcgagggagcaagagtggtccactctttattacgatgcagatttgaatttatgtcacaatgtaatttgcattttcttgatacttttgtgttttatcaaatttctttagttaactttttttatggcgttgtttgttttactttgtcgcagatggtgatacccctattggataccgagagtgctgcgcactggtatgcggcgaatctgaccatggataatgaacagtggaaattagagactcgttgtcttcttcaatgtataagaggtcacgtcggaacactagcctagagatggtatacacgtgtgtacatagtttgttgttctattagtgtaattgcaagcatctcaactataattgttttattttttttttttttgcagctaaacactttggaccaattgttcgcctctgtgaagccagcaaacctcaaatttagcgagttcataattatttcttctggcaatgactacccacagcaaaaaaatgggcacgattgtgggatttttgtatttaagtacatggaatcaatggttgagggaaatgaaataatggaagaggtaatttaatgttgttttctttagtttagttttcatctatttaactaagtgcttataactaaattgagttatcaatctatgctgtgttgatttgtttctatgcatttcgttgtcatgtgtatttacttaattcgatccctaatgtacaatgcagtttgatcctattgaagccagactggattgtgttgggaaaattgtcacccacgagagtaacaaggctaaa

SEQ ID NO: 85002 - DNA, 1582 bp, Cannabis sativa
cattaaagaatgcttttctattttgaagcctggaggtctactcttgtttagggactatggtactatcgccaactgtttggataattagttcagaactaaatttatttcatcacaaatctttgcacccttttgaaacaaatttctgttcattgaaaatcaggcctctatgatatgaccatgcttcgatttgagaagaaacaacgagtggggttcagggagtacaagcgatcagatggaacacgctcttatttcttctgtttagatactgcgagggatttatttgtggctgctggcttcattgaggtaaagaaaaattctctaaaagtctacaagaaatgcctagtataacatttctcattatgcattttttactaagccaaatgtattttgtcaaattgttttcacttgaatattgtttatgttatgcattgaagagcatttcccattatgcatttcttctgttctggtgctaggtggagctcgactattgttgcattaactcagtaaatcgtcgaaagggaaagagcatgcaaagagtgtgggtgcatggaaagtttcagaaacctatttgaagttattgctaaagctcttttgttgaaatatcattcttaaaaggtggtgggaacttgttctctgttcactttatatattgtagaatggtacaaaaagtgtttttctccattgcttttttacttctcattgtgttttacttcttccttttctatctactttattcccttttctattatttttcatctttctttagacttacaccatggaaaaaataaacttcatgttcatccgttggtgaaatgaatccattagcctaagatttacttcctttaatttaacaaattaggtagcttgctggctttctcatttggtccatgtaaaattaaaggacacccttttcaaagatcaaatttcaatgtagtacagtgaatataatttagaagtcaccataaaattaatcttcttttttcctcttcaatattacaaatgactaataattcagaacccatggaccaactaataacactcaacatttattactttatttaccagaggttaccattttcagtttcatcatttcttgtttttaatgtgaacattttgaatatggcgtagaagataagtctttcattcacatccaactaattaaaaattgttacatattctaaattagtgaaatttttgtactgaaaaatataaaagaaacaataaactaatacgaatattatgatttgacagagaagagtgacacaataggtctgatttgattcctcttccttcttgcccttgtaaattaaatcaataatagtttttttttttccttaaaaatagaaatatttgttactgtttgttgccactactactgaaccaaccttaaaaatagaaattttccttaaaaataatgagctatttggatatattttaattatgatagtacaggttgaacactccacacttctataaaaaatatataaaactaaacaataatgaattaataataatgtattgtagctttgagattcttgggatatgaaaaagagttgtttgtagatataaagagtttttctag

SEQ ID NO: 85003 - DNA, 1000 bp, Cannabis sativa
ttttttttttttttttttggtgagtatttagtagataaatagaatgcatacactataattatatatgtttgtaagaagaaaaataattgtgaatagaggaacttataatttacgaacaaatttggtgaactgtcgacaagtttgaaggtggtgtgagcactttagtttttatagaaggttataaaataggtagcttggtttcatagaaggttatgaaatcagaagcatggttttcatagagggttataaaataggcagtctgacttttatagaagcttgttaaataagtaacctaatttctatagaaacttgttaaataagcagtctaatcttttaaagaagcatattaaataggtagcttggtgaatagtaacggtgtggttaattaaaaagactattaggaatgagatagctgtgtataaaagagaagtgatgagatgagatggttgtgtgtaagagagaagaataatgaaaagagagttactttcgagagagactcttttgtgcttttaaattgtgtattgtgaattccatcagtcttcttttcataggagccaagtattaacttacctttcctaaaacctactctaaatacaggctccttaaccagttgtactaatcttatctttttatcaactcttatcgacctagtatctcattcattcgtaattaaagtgtttcaccaagagttttaattaaaagtaataacttcctattatgccattttatctatcaacactctacaaccatcaagtaccaagaaacaacatctctactcggcatctcatcaagaacttatcgtgcctccaattaataattatcacatttcccatacataaaaactagaccattcccaacaaacaaatttctatcaagtccaattttcacaacagcaacatgaatttccaacccacaaataatgggatgctgaacatggctttaagacacaagtgtatgtgtaattatccagcttttaaaaacaagaagaccatcatcatac

SEQ ID NO: 85004 - DNA, 882 bp, Cannabis sativa
attaaactaaaaaactgtcttggatgccgaaacaggtagaggatttacaaaaacataaggtaaattgtacttacccatattttttaaccataacaaaattgataatcaggcctctcgcccttcactgaacgagccgaccatcgcaagctcatctcaattctaaaatcgttttagtttaacctttacctatcgccaaatctcctagggaaggagaaaatagtaaatgggtatggaggatgaagaaagaaaaaataaaacagaaaaaaagttaaagtaaaaaatttatttattttatatttagttttaatttaaactacttcataatatataaaatctaatattttgacacctattagatgtcgtggacattataaaatgatttagaccactcacaaacgaatatctaatgttacatttaacatctaatagtgaagtactaaccgctgtcactaaatattgacattatatatttttaccacaagaaaaaatttaaaagcattgaagtgctacaaagttgacagttttggtacttttaccgtaaattactctctctatgtataaattgtcgctaaaatttaatttaatgtatctcgtcaagtttactatacaccatcaatagcgtcatactatccattcacttattttctttagtgttattaaaacacgattgaatatgaaataatatgaatttgagcatgaatgatataatgttacaaattagcatgacatgatacgaaaaatatttgtttaaacacaacataaaacgacaaattcaaagacgcaacacgtattaagcatattaacctgaaagtatgatgtgttaaaaagcttaaatttgaataataataataataataataataataatgtattaatgagtta

SEQ ID NO: 85005 - DNA, 899 bp, Cannabis sativa
gatgcttcacttctacttgatggtaagcaaagtgagaagaatgctggaccaaatctaagcgtaagaggttatgatcttattgatactattaagaaaagtttggagagtaagtgtcgccaaatcgtgtcttgtgctgatattatcgccattgctacccgagacgctgtcagcttagccagtgtacgtaattaaattattactcaaatctcctaaccttaacttatccgaaatttttatctatagatatattttgtattttcagtacattaatagaaagtatattttttttacacgacggtatataatttagttatacgaaaagcacataaatttttcaaaaagttttaaataatgctaaaattagattcaaacatgttattgtaaatcgtgcttttatttaaatatttagagatatttgtggtgaaactttctcaacatttataattgttacacatatgactctaattaaaaaaagtggtggcaaaagtaccttatcttacgatttggttgcagtgatactttttttggccattaagtgtcaactcagaaacacgtggtgacttattattggactatgtattaaataaactaaaaaaaatatatcgtcacgtgtttttgagatgacacttgacgggcttaattgacatttaacaactaaaaaagagtacgattgtaacagaattataagataaaatacttttgcagctatttttttcgattaaggtcatatgtataataattgtaaatgttaagaaaatttcgccctaaatatctctaatatctatacgtttgaactaggtcttttataattatattatacacgatcatttaaaatagaattattatatgtacaaaataccaaaaaaaaaaaaaatacaatcactattataataaatacc

SEQ ID NO: 85006 - DNA, 1125 bp, Cannabis sativa
  modified_base (438)..(442): a, c, t, g, unknown or other
actcttagttgtcaatctaacaagttcttactttgatatgtgttcattattctctataacgtgtctttacatattttgatatgtgttatttattctctagtaagtgtctatattctatatctctcctatcctagatgttaagagttattgaagaatattgtcctatatgaattaaatgtaaaaatattgagtcatatataagaatatggactactctactcatcaccaattggttttgagatagaatctcataattctcaacatggtaacagaaccatatccttagcgggctttcgatccacacttatccaaatggttagccaaggtgattcaagattggtgagtaaaaatagccaccaccttgaggtaggaatattggagaacattgtcccacatgaattaaatgtaaaagtattgagccatatatataagaacatnnnnnactccactcatcaccaattagtttcgagatgaaagtccatcatgattctcaacaggagtatttgcagcgtgggcggtatgagttctgacctatttttcaaactaattgtatatccagttttaataatttctcaaactgcaactgcatcacaaatattttaaaactacaaaaatcacaccacaaaaatacagtgcgctgtagtgcgatttgagcaatttacactattatcattgtcaaatattataataaaaatctaaaaatcaatcttattagttttaacaatattaaaatacaatctatttttaacgtgattacatatatactaatcatcaatatatttaattatctccaaaaatttatataacatattacatatgtttgatcatatatttaaaaaaaaaaacaaaaatcatattgtaaaaattagtaactttgtaatgtatagagcggtgcaattttaatcgcaaactgcataccgcaccgtgcagtttagaaaaaatgcataccccaactgcaccacaaagaattttcaaccgtattttttgtgcaatgcgaacagtttgtgtgatgtgggcaatataatgaatacccctaccatatgtgtaacttactataaaaaaaatcttgcttttagtcacaacaaaatttgtgattaaaattataaattatcattctaatgttgt

SEQ ID NO: 85007 - DNA, 795 bp, Cannabis sativa
gtgggacaatattctccaatattggctatgagtggagtagctcatgttcttatatatagctcaatactttcacatttaatccatgtgggacaatattctccaataagcagcaaagtttctaatgttgatattgatatttttgtttagatttcttacttcttagtgttagttattgattattttatttccttttttttttttatcgccatgatctatttcttttcttggtttcgtaacaaaaaattcttgttgtgttactaaaattatcaatagctagcctactattatatatttgtttattgttttgttaccgctattttttgggtttattgttaggtcatgttccttgctagtttagtaactggttactaatctcttaagtttctaatgtgtatgagttattttttaaaattggctattagattagtaacatcttattgtgatattattgaaaagccatggttaatagtttttcatccaatattaacagttttggagtttttacaccatatactgaaatttcttacttttttttttctttttattgtgaagcagaatttttttcaaaagtactgtgtactttgttatatttttattgttgttccacggttgttttttagttgttctgctgttagttttaattgttctattttgttgttttacaaaaatataatatttttgtaaaaatttctatgtgatagtaaaattataatttttcgcctaaaattcagtatttttgtaaaaccttattttttttggctcgaaaaacccactatgggctcttatcaaaatgat

SEQ ID NO: 85008 - DNA, 723 bp, Cannabis sativa
atcatcactataatataaattaatatgtctttaattttataataattattttatcataaattatattcatttgcatattcactaaatcaattcttttaatattataataatgaagaatatataatataattcctatttccaattataattttttttttcaatatttaggtctgaaattatttgtgaaaataatatttttataagagtatttattataattacagttttatttttataaatttttgaaaaatttacaatttaaaaaatataatttgtcgatattttaatttatcatggatgtttaaaaaattttaaatatatttttaatgctatttaaaaatttataaaaataatactataagcataaagaacactattatgaaaaaaaaaaacttctaaaaaaaatctaacatatgtttttagacataaaaattaactaaaaatttataataagagtttaatagtagcactcttaatataaaaattcacaaacaacaagttgaattttttattagacactattaaaatttttaatcaattatgaagaaagatccatcatataaattaaatgagaatatgttaaattcaactatcatttttttagaattcaaagatttttatgataacaaaataggaacacctatttaagatatttttatacatggtacaagacaaaatatgcaaaatcaaaacaccgtatttattctctctcaaaaaaaaaaa

SEQ ID NO: 85009 - DNA, 957 bp, Cannabis sativa
aaattttgcacttcaaagagaaaaatagaggagaagcttaccttgagctgaaatcaatcaaactctatgaaatacctagctaaactctttgcttttagttagaaaatgatggagaaaattggttggggtgggggtttccttgtggcagactagagataaagagagggtgactttgagaattttctattttcttctaacttttctaaatcaataaaagaaatgtaattaaactaaaataagattaaaccttgggaattaacaagatcccactaaagacaaaaatccacaaattagggctaaaattttatttttttcccttccttcaccatgaagcaacacaaagagtctagaggtaaaatggtttgaaatctcaaccccaaataataccgatattgcaaatatctaattattttgtcacgctaattctaaaatactccatcgcatctaagagactctaatggccaaatcgttacattctactattactgagcataaaatatcaaaaatatgaaatttcatgtatagcatacataatacatctagaatttaaatatatctctataattgaaaaaattataatttaaagcctatttctgactgtaagccttaattatatactaagaggcatataataataaataaatccttaattatctactgttatagtcgaaattcggttgtacttcagaaagtgacacgtgtcagtcttatggaatatgaatcaacaaatatgatgataattatatcattagcgaaatgactcattaaatatagaataaatagagtatgttcgtaactcgctggttgtatattcttaagcgagacaaggatgtagaaactattaatttccgtattgacgagaaactgttttgcatcagaaggcgaattggttattagaacacttagcatataatatacattataataactaagtgtaataacttgaaggacatgatt

SEQ ID NO: 85010 - DNA, 1013 bp, Cannabis sativa
  modified_base (343)..(349): a, c, t, g, unknown or other
aaattgtaatgtttgtgactaatacttttagcgacggtccttttagtcacaatacaataatgataatttataattaaccacaacttttttatatttagtcaaaaattttgtgtaactaaaagtgagattttttgcagtgattacatgcaaatatatatatatacaataatattatttttaattattttttttttaatttaaatactattttttttttaaaaaaaataatattcaaaaaatttttttaattataatttagtttaacctataatactcatttgttttagaaattatatattatacatttttttattttcttttttgaaataataataataataannnnnnnaataataataataatatatttttgtatgaattgcaatataggtataatagtgtcccaaatctataatagaagtataaatatttttttctattttattatttaaaaagaataatagaaatatatttttcttaacatttcgattaggtaaaacgaaatgataatttttttttagataggtgcaatcagacacttttgttatataacacatttaatatataaatattttttttaattgtattgtaccaccattaataatttatgaatagtataaatatataaaattaaatttaccatgaaaaaaacattacagagatatattattgttcattaattactatattggttcgagagctttgagaaagcaactaactatatttgttcctactaaattaaagagtttttttggtacaacaaacaaaaacgaaaatacagcttttgggatattgtcaaaataaataaaaagaatccaggtgcaacaatttttcatttttaatgaaattaaaaaaaaataagaagttaatttattattatcaaattttaattatgttgaagaagttgacctctataagtggtatgccaaaactaatgcctgtttgtcaaaaaaaaaaaaagaaagaaagaataatgccagtttactactggtatgtcaaaattagtgcaagta

SEQ ID NO: 85011 - DNA, 1037 bp, Cannabis sativa
atcttatgtagtcggttagttttttaacttaatattttcttcacattctctttctgtcttcatattttatgcaaacctctttttctagcatttatgactcactagaaaggttttcaaaatcttaaccacataggcctggagctttgcaaggccaagaaacatcacgagctcctggctaattagaggaatgattccaaatcagagagttctcgccaaaacaagagcattgaagatctagaaaaatttgagagggcattgaagactgagttcaacgaattgaaacagaaacttcttaactctacccaaaaatcctagatagaccttgatgaggctaagagagtccttgacgaggctaaggaagaaactcatgcaagtgttactttggtggccaagcgttgcatttataaagctttgttaatgaatctaggcatggatctcagttttttgggcgaagctaccgaggagatgttgaagtattttaagatcactaaagaagagaaaagagttggctccgacaaggaaaatgaggccgaggttgctcaagaggaagaagaagacattccctctaaatctcctactatatagacttaatttttattaacatcaatttttgagcaatgaccttttggtcgagacaatctttggcctttcatggcatttattataaaagtgattaattttattttgctttgttggattgccaactttactttgattacactataattttcttccttcatgatatatgtatttccactattctggtgagaaaattttatctgagttataaatattttgaatatgttacatattttttctcatgaataaactttgtttacataacttcatcaaaacatcttttctaagtttaaatatcaaatgaggagcaaacttgaatgtctttgtacagttgattgtttttgaacatttttgatcacttgtgtgtgagtagtttatactctctaatttatcaagtaaagagcaaccttaaatacttttaaatagtacttgactgtattaaatattttttattactc

SEQ ID NO: 85012 - DNA, 668 bp, Cannabis sativa
ttgaaagacttgaccgtgtgcactttagcaactagaaagagtgggacttgttgtatctcggtttcaggggtgtttgcaggagtgagttcatgaagtgtttgaaccgtacattcggtttctgtgaggttgagagcaacagaaagagagtttgttagatcctccatagagtaaaaaactgaagagcaataagtatcacaactcaagtaagagccaggccgagttttagtgagggggagagactgagtgggaatttgagaatgctaagtattttgattgggtaataaaaagaaggtgactaggagggtgattgatagcgaggtggaacagggaagtggatattatgtgaaggagcaccacggcagcaagagataaccccagagtaacccaaagagcacttccaaaagtaacacaaccaatcgaaaccaaactgacccaaaaacaaaacttactagatattgacgtatgataggaaaataagagaacaggggaacaaaaggcacacggttgaaagctgaaactagaatgcacaggaacacatatgggtgaggacgctcgaacacatatggtgaaggtggacgtgataggaagggataaataggtacttatatggcaaaaactaaatgacagaatgatatgcagaaaggggaaagtatgtatagctaagtcac

SEQ ID NO: 85013 - DNA, 1129 bp, Cannabis sativa
tagtataattacatcttatataattattggtattttaaataaagtgcacacacgtggcgtccctgttggacagggcgttacaggcacaaaacatatcttccagtatctaaattgtccttttggactgtccatcagtttaaggatggaaagttgtactaaacttcagcttggtagccatggctagctgaagactttgccaaaattttgaggtaaatttcggatctctatccgatataatggactttcgagccccatgtaacctcactatttattttacgtataactttgggtactaatctactgtaaaggttgttttcaccggtagaaaatgtgcagacttagtcaatcgatccactacaacccaaatagaatcgtgcattcctgtggttctagggaacccaatcacaaaatccatggtgagatattcccacttccactgtggaagagtcacaggctgcaacaatcctataggtcgctattgttcagccttattctactgataggttaagcaccgggatacagattctaccacatctttcttcatcccctcccactagtagaagggttttaaatcttaatacattttggtagtgccaggatgcagtaaataaggagtgatatgagagcttcctcaagaatctccttagttccacactgcttggaacacaaactctagatatatacaacaacatctcattacttgatactgtaaaatctttagcttgaccaactgaaatctcttcttggatattcaccaattctagatcaattaactaagcatctttaattctatctaaaagatctcattgcaatgtcaaattattaagtttgcctacaaaaaaaaactcaatacttaatcagaccatatcatctactaggtggggtgaaatcttaatcataatagttatttgcccgggaccctttctactaagggcatttgccaccatattggccttcccaagatggtaaaagatttccaaatcgtaatccttaattaactttaaccaacgtctttacctcatattcaaatctttttgagtaaagaaatattggaggcttgtggtctgtataaatttcatacttttcttcgtagagataatgtcgccaaattttcaaagcaaaaactact

SEQ ID NO: 85014 - DNA, 804 bp, Cannabis sativa
gaaaagtaatctctacactaattaattataaaacttatttttttggacttatttccttcattcttttccaatttccaacctctatttcatttttccctattgcagtggtatgtgttctgattttagacttttggatcgaaaaagtaggaaccaggacgagcaatatcatagattgtacaaggtatcacattgctctctaaacttttatgttttgttaatattgactcctgtttagtgatgaatgtgataatcatttcaaattcgcaattcttacaaaacatacataacttttcttgttgaaaaaatgtgcctgcaatagttgagtttcttgtggtggtagcatatcatacaagtgatttgaattgagtaaagtgagccttcgaaattagtcttttattcttttgtcattagtttagcttgtgaagttatattgattttccattcttgttcattgtgtgatttgaggttagaggagcatagcttgtttattaataagtttccaaatacaccacccattaaaatatgacaacaaactcttcatgaatttatagagtgcttttggcttattgtttcctgactatgtttcacatgacagttttgtaagttatttttacaactaattgtatttttgtttttattaggtacaatgagcaattcaataaatcatctcaacaaattccaaactctcggtaagaatttatacactactacaatgttagcctttagaggctgttttttcaccccatttataaaaagggaagctaaaggttgtaaaaatacacgctttgttcgaaattgacattt

SEQ ID NO: 85015 - DNA, 2380 bp, Cannabis sativa
  modified_base (2270)..(2270): a, c, t, g, unknown or other
cacgacccaacacgaaaaaatataagtttggacacaacacaacacaatactataaaatggcatgacacgacacacgtggcataaatacctaatattttaaatttcatacacttatatatatcacatactttttgttacggattaaatacttaaagttacatttacgttaccttcatcactacaaatccgttaaatcctattaaaatatatcaaggtgaaacatgtcaaggttgtttactcatattttcaattaaaaataaccataaaataattataaaattaaaaataactaaataataataaaactaaaaaaaaacaaaaaacgaaacaaaaaaagagatataactataaatagtatttattatttaattattgttttaactttaaaattatttaataagtttttttattaaaaaaatacttaacaaaaaaaaaatacattttttttatatgttttatttgcagtttaacaaatttaaatattatttaataattttttactaaaaatatatgaatagactattaatatgttgacacgtgtcaacttagtctcactactacataaaagagtatttgcgacagttttaaaaacgtttttttaactgtcggtaaaaaaattgagtgtttaaaaccgttgggaaaaatagtgatattcccaacggttttacactgtcaaaaggtataggcgacggtttttaaacatgccttaaaagggaatggcctacggtttaaaatagtcggcaatactataggcgacgctttaaatcgtcgctctactctctctcactttatccttttcctccgctctctcatggtagcataaaggtaagcacaacattctcttatttgttgtttaaatttctattaatcatgatttggtttgttgatattgatctgtgtgtgtgttcgaaataaatccaaaacttgcaatgcgaagaaagtttcaaggatcgtcaagtgaaaagtattccgaaacttatcaaagaaaattttgacgaggatgaagacgagtacaacaacggtggaggaggatgaagcttgtaagggtttcggagcagatgcgatatatgcgagaagtggtttcgaggaggataacgacaatatattttttaggcaatccactatagcgacagttttaaaccgttgcccatagtatcgattatagctgacggtttcaacccgtcaggaattcttttataatgacattttttcactgtcgtctactctacccagtatttgcgacgcttgtataggcgatcgttttacaggccgtcaggaattctttacctgacggtgtaaaattatcgagaattctggctattttattagtgtctattttaatagaattttaactggtaatgataaaagtaacgtatgtaaacgtaaatttaagtatttaatccgctaaaagaaaaaacatgtgatatataaatgtataaaatctaaaaatatcaggtatttatgtcgcaaatacccctatatttgaataggatttaacagaaaagtagtgacggaagtaacgaaaatgtaacttaaagtatttaatatctatcgaaaaaaatatgtagtacgtatttaagtgtataaaactaaaagtatttatatttatgccgcaaatatctcttttataactaaaatatattttgatcatcttaaattgttttaactttaagtcttaattgtaatctttagaaaacacaaattttgaagattttttaaaaatataaagtcgagaatagtaattcatctaatgtaaataatctaaaatggtatgttgtcttaattcaataccttagaatttagttgattggtagttctttgatataaaaaaactaactaaataatgggattcaactgaccattttaacaatcaggtaaagttttactgtcaattccttaaactaacacctataccagtactactacaaaatagacttttcgtgtctgttcgagggacgttttatttaaaaataaaaacaacggacactaaaaaccacacaactctaacgtgttggttcataactgacacccataatgactttaagtattggttagtagactgacactaaaacaataattaagaccaaaaaaagttaagagatattacctacaaattgagtataaatgttggtttataaccaacacaaaaagatcctttggtgtcgattcttgttaacgcagatgtttgttcctatttcgtgattaatttgcacataaataatagtagtaaaggaagaaaagataacacaaagttttttacgtggttttgnagttaaaattctgcatagtccacgagtcaatcttattcagattattctaatataaattagggttcttttctttcaagatgtaacgccctaatgctaaggcacgctacagt

SEQ ID NO: 85016 - DNA, 2019 bp, Cannabis sativa
aatcgtgtcttgattttgtgcgcacaagatgaagaaggcatagaaggtttgagtgcggaagaaactgattcagatggatctgagggcgtggcggaggaggtgagcttgaatgcgttatcgaatgccagtaatccacgcattttccgcatcatcgccaagcacagagcagaagatttggaagtcttaatagacatgggcagcaacaataattttattcaggaggcattggcaactcgcttggctctacctcgttcggaaacgaagaaattcaaagtttatatgggaaacggtaattcactatggtgttcccaaatctatatgggtgttgagttatcactacagggacacaaattcaaggtggatctgtttgttctaccaatttggggattagatgttgtattgggaatgcagtggctgcaaacgctggggccgtgccttcatgaccataaggcattgaccatggaatttcagtgggaagggaagactgtgaaactggaaggaacttcaagttcagcgactcaacaattgtccttctcccaattgcacactatgatgagggacagggaagtacgtgatatttttatgctgaccacgatttcgcaccaggaggttactaaggatttatcccttcaacagattgacaataagttgcctcaagaagctcacggcattttgacagaatttcaagacattttttccgagcctaaatcgttaccaccatataggagttccggccatagaattttcttacagccgcactctcagcccgtaaatgtcagaccttaccgctacccatatttccaaaaagacatcattgaacgactagtgcgcgagatggaagactgtgggttcgtgagaccaagcactagtccgttctcatctccggtactctttgtcaaaaagaaagacgggtcttggcgcttttgtgtggattaccgagccctcaacaacataactatcaaggatcgttttcccattccaacaattgatgagctactagatgaattgggaggtgcaacaatattttcaaagctggatcttcgggctggataccatcaaatacggatggacccaaaagacgttcacaaaacggctttccgaactcatgagggtcactacgagtttttggtcatgccgtttgggctcactaacgcaccatcaacatttcaagcaaccatgaatcgggtatttcaacctttacaacgccattgtgttattgttttctttgatgacattcttgtttacagcaaatcaacgatggaacatattgctcatctatgttcggtgttccaacttttgagagatcatcggttttttgccaaactcagcaagtgtactttcttccaatccacaattgagtacttgggtcatttggtggcggcagatggtgttcgagcggatccatcaaaaatcacagcgatgcttgattggcctcaaccttccacactcaaacaacttcgcggctttcttggcttaacaggatattatcgaagatttgtagctcattatgcctcaattgcagcgcctcttactgagctgctcaagaaagaaaatttcatatggacagaggcagcttgtgcagccttccggcaactgaaacaagtgatgacagttacaccagttctggcccttccagatttctccaagttgtttgtaattgaagccgatgcgtccaatgtgggtaggcgcagttctcatgcaagaggggcatccagtggcgttttttagcaaaaagttgggtccaaagttcagtggcacatcaacctatttgcgggaattgcgagctatcgtggaggcagttactaagtggcgccaataccttttgggccgccaatttctcatccgaacagaccataaaagcttgaaagaactacttacccaagttacacagacaccagagcagcaacaattcctccgaaaattaattgggttccactttaccatcgaatataaactgggaaagactaatgcagcagcagacgccttgtctcgtcaacatgaagttccaaattcactgct

SEQ ID NO: 85017 - DNA, 1116 bp, Cannabis sativa
aaccgatccaatctaattatttatcagatattgaattttgtcatccaatccaatccaattgaattgagttatccgattcgatctaatggatgtgttggattggatcgactccaaccaatagatacattgagtggttttttattggattgaattggatctatccaatttattttaactaccatttaagttgatttcattaaaaaaaatggtatatatatataaaaaaaaatatataatttaaaacttaataatccaacatacataataaatattagtttagtccaacctaattctcatgatttcaaaataaaaccactaaaagtaaaatttattcaatatacattgacaattttattagcgtttaggtagatgagaatgaatattttaaatttaaggttcttttctttaatatcatgtgttaaatgaatattaaatcaattaataaaatatattaaatatgtaaaattataaatgtattttaaaaatatataaatataattggatgaccattggatgataattggatcggtttggtcggttatccattggatcggttgtctcatccaataactgatccgatccaatcggattttcaaaatttacatccggtatgatctaattatgattggatatctgattttattggatcgattcggtcgatcgtaattggattggatgactttttgcacatccctaactaagtgtacaaacaggccaaccaaacccgtatttacaaaattataatattcaagtattgattaatatgtaaaattaataagtgaagagccaaaagtagatataattgaaaaaaaaaaaaaaaagttaaatagtctttctcattcctttagaccttacttctacattgttgtgattcttctctcactcataaaatgagtcatcccttattgtgttatctttatatccaagtcgatatacttgatgtaataataattaaaataattatttaaaaaaactaatcaaaaattgatctttacctaaaaaaattattgaccattatgaaagtaaatttataattgtaaataaaaataaccattcaaaaaaaatactaaattagaccaaaagtaatcaaagtaaattcaaataatcaaaaacata

SEQ ID NO: 85018 - DNA, 926 bp, Cannabis sativa
agacacacacatacatcaaacttagcattagcattataaaaatttttaattaaatattttttttgaaattaatatctaattgaaaaaaatttgatgtaaaataatattaactttcaatttagtctacgttgttgttgaaaaaaaaaaaaccattaaaaaaaatagtgatgatattttttttcctacatttttgtcttgtttactttgacacctctcttcatttcatttctaaatatctcttttcttaattttatagacctttctatagatcaagatatacacacaaaaaaaatatcgtaataccaccaataaatatatatagatatttttttttatatagatctgaaagtatttagagaaagtaattagatagataatataccccactcatgatgatatattaaataagatatgaaagtattttgagtaaatgggttctcaattctcatatcgaaaggacttcaccttagggaaagaaaattccaacatgtgtagggatatatatgcttattacacacatgatcatattatatatatccacttcttttcttttcttcattcatgcatgtataaataattacataattgtatatgggaattcataattatatctagaaggaaatgttttataagtttagaaaaatttaattgttcgatggttctagattttttatatatttcttttggtatttaaaaaaattttatttaatttcttttaatatcgtatatattaaaactatttaaggttatttataaatttataaaagattctcaataatttacaatatcaaaaataaggcttaaacaattacaaattatcatgtgcatacaaaaaaaacagttacacttataataaaatatataaattttatttttgatattggaagctattcagaattttcttaaaatttataaataatcttaaa

SEQ ID NO: 85019 - DNA, 698 bp, Cannabis sativa
ataataaatataaaagaaaagaaaaagcttattagccgcacaaatataaagaatctaattttcaaagaccaagttttgttttttatttatttaattttttatcaaaaaaaaaaaaaacggcataactaaccatatccagtgaagtaaacgtttgcacaagtggatatatttctaataatttatttagttattttttaaaataaaaacaaaagtaaaaaattgattagaataaataaaagtagataaatatataagagaccgagatgaccagataacctgaactccacaattggatatgtgatgacatatggtttcagggattcctttcttaaagactcaatttcctctgcaaccattttccatatcaccccaaaaaatattcattataaaaatacatggatactaacaaatatatatatttttatattgtgagatgaatttagaccattgataacttagatagaaggaaacatttattatttaaaatcatcaaaaggatataatattataaaaaaaatcaccataaaaatttataacacaaattaaaaaaaaaaatacactacaacaattaaacacattagcggcggccttattagcggcgggcactctccgccgctaataacaggggtattaggccaaagatctgactatcaaagaggcgtgggtaaaaggctcaagggcaaaggaaagaaaccaat

SEQ ID NO: 85020 - DNA, 806 bp, Cannabis sativa
aattaaatggcttaattgttaaaataattataaatataaataaaaaattatttataaatattaatggctaaaagaagtcttgtaaaatatttaattcattattttaagaaaatagttaattataattaactaattataaaaaaataagtattttacggataagcacccaaattttagttagatgaatgaaaatataagaatgagaattaaaaataggaaaagaatagaatttaaaattcataaataaaattaattaaaaaaaatatatattaatttttttttctcataggcaaccaaacaaaaagagaataaaatttaatgtgcaaccaaataaaaataaaataaaaattatttcatttttatttctttgtatttcattacttctaaccaaactccctaaatgactaataataataataataataataataataatagaattttgttgcttactaattttggtgattggtttttcgaattaattcttgttcttcttctgcaagtattttgttctcaatggcatggaaagtacggagagcaaaaaaaggtaacgaaatgagtggcgcaatgataaaaatgatcagaattaaagccaaaatacattcgggaccttccgggattacttccacattgcgcttcaatatatttacaaaaaaggttatgtgataatgaatcccaaaacaacaaattaatacaaatggggaaatccaccacttcaactcatctgtatcatttgttgttgttgttgttcttcttcttcttctttctttgatcaaaatctcgaaactcactagaatagcgtaaca

SEQ ID NO: 85021 - DNA, 558 bp, Cannabis sativa
agaaaaaattaaggccctaatcgacatgccttcaccgacgaagccgaaagaggtccaggccttaacaggaagaatggcagcattaaacaaattcatttcaaagtcaacagataaacgtctaccattctttaatgttttaagaggcaataagaagtttgaattgactaaataatgcaaggaagcttttaaaggcataaagaaacatttatcaacacatctaattttggccaaaccaataactagagaaactttatacctttattagctgtctcagaaagtgcaatcagtacagccttggtgtgagaagaaggaaagcaccagtaacctctttactatgttagtaaaaggttactgggggaagagtcaagatatccccctcttgaaaaacttgccttatgcctgattcatgcatctctcaaactacgactttatttctaggcacatcccataaaagttttaacagatcaaccattaagacaagctttatcaaaacccgatgctttgggatgattggtaaaatgatcaatcgagttgggacaatttgatataacctaccac

SEQ ID NO: 85022 - DNA, 1051 bp, Cannabis sativa
  modified_base (587)..(593): a, c, t, g, unknown or other
gcagagggaaatagtctaaattgggatactttcttagggttggccaccttaggaatgagaatcacaatggtgacctgtccctttttcttataaaaagtaaataaagaataaaactcttataaaaaaaaaaatcaaagaatataagtaatttagttacccaaaaattgtaatatgagataactagttatttaacacacctattaagaaattaattgaaaaaatgagttgaatggtaaaaaaaagtattaagtaaaatattaaaacaaatgagttgatattttacatatatatgaaaattttggaaaaaaaatattagtagtactaataaaaaaacataagacaaaaattctggaaaaataaaaccaaattatatatatagttattaactacataaaaaaattaaaatttaaaaatctaatccccaattaaatcaaaataaaaatgagagttttatttacaccccataaacttataaatacatcacattattaaaaacatataaacttaaataattttcaaaaattcctcttaatattttcttaagttttttttttccttacactattttatgttaatttcaatacttnnnnnnnttttattttcataatttttttctaactcgtgtatatatttttttaataagaaaatttcatataattttttattttaatttatttgtcataatatataaaatgtaattttgtttttcattgatatgtatattttttaagaatacaaattgaaagaaaaaagttagaaaaaatataatacaattaaagatatatatttatataaaataaaaattattaaaatagtgtatctttaaaaaattttaaggtgtaaataaaatttctcaaataaaaattaatgaaattacaaagttaccctcaaaataaaagaaaacacaattattaataaaaatgtgacataattacattgttgtagcaaacttatgggaaaataatcctacaatattaacattggtcttattgttcaagatgttcgaaatttgcttttggctttatcttttgttaatttgtgttttgtaaaa

SEQ ID NO: 85023 - DNA, 937 bp, Cannabis sativa
  modified_base (888)..(898): a, c, t, g, unknown or other
cataagtcggatcaccccgcaaccaggtccgagtttggccagtcagccaaatgggtggatattgtaaaggtaaaaatttgctcaatatttgcgacatttttgagaagtccaatatgcaagtcagacgagcccatcaataatggatccaataatatttggcccagtaaggcagtcagacggactcactaggccttgaaatagacaaacgagtgagcctatgggccataagacggatcaccccgcaaccgggtccaagtccggccagtcaaacaggtggaaccaagtagatattaaaccagtcaaaaagacagttaccattcccgtaaaatgagagaaggaaccaaattgaacgagtctaatgggtgacgtggatggagggcaatggtaccgagggaacaccataaaagaaaccatacgacagaggcaaggcatcgaacattcgatactcacactcactgactcaagcagacagtcgctatttctaaacttttcttttaagcctcaccactgtagttgttcctttagtccgtttgtccacttgtccactcatctgtccggttatcatttgcattttatttattttttgttattgttattttttactacaatcgtactgatttgagcgtcggaattcttttggctgacatctcaccggtgctcccaattgaacttttgtctctctctttgttcttgacaggttgctgatgccaaaattctgtaattgtagatttcaccatctacatttatacttattaattaaaattatatttaattaatgtattataagaaaatgttattttcaatttatcccaaatacactatagtttggctcagtcctcagtattatatttaatattgactaattaagatttttgccccctgaacttnnnnnnnnnnnaaatcatgtcccctgaacttttaatgccattgaaaatgc

SEQ ID NO: 85024 - DNA, 896 bp, Cannabis sativa
ctggtttgagttaaaaccagaactgtgaagtattcttccttcttcgctactatgttgagaggattctccttgaaacaaaattttttgttgcggttgagtacttctactgagtgatggaattgtcgaagttagtgatgttcttaccaagtgagtgagaagaggccaagcattcccttttgcaaaattagttccatatcgatcgtagttagatgttggaagagcagcacctttaatcataggcctatattcaagtttaggctccagtctgttatcaagtatttcaagaaaaatgctacatttattgaaaggatggcccaatctaccacactctatgcaatattcaagtagcctttcgtatctgaattcaaccaaaaatttgtcacgtacttgaaacaatgtgatcattcttcctcgcattaaaggtttggtaacatctatcttcactcgaatacgcaagaatggaccccatcttcaaaaagtgggtcttcaaaaactttaataaattctcctatgatgttcccaagagcctcaaccaacttcatggttttactcataaaaggcagcctataaacttgaacccataaatgagaaaaaatcatattcgaagaagagacattttgacaaacatttggcgtgtaaagcacaatgtgatgattctgaaaattgaatggttcttggttcaagactctttacttgtctccttcaccccttaagtgagcatgaacatatctccatccacagaaattgtcataaaaaatctaccattttaatgttcagtcatttatcgctgcagtgttgaaagccatacttttttagtagttaaaatatgtgcatacacaacgcgatcaatcaccaattcagtgtcaattgaatctccaaaatcaaattcaaaaacg

SEQ ID NO: 85025 - DNA, 761 bp, Cannabis sativa
aaaaataaataaaaaatctgacatgaaagtgacataaaatcatcaatcaacttttgaaatctttttttttacatatatacacatatatattattcaccttaatttaatagacttgtttaaaattcaaaaaaaatatatatatacacagtaaaattgttataattgccgtgtgacagtaaaaaagaaataaaatgggaaaaatcagtatagggtgtaaatttccctttattcaatggataagagccatgatactagagtatatattaagaaaagaaaaaggggtgatgtaactaaggtatgtttttaaattttcatgtgtttattttgtttgttcttgtttgtattttttattgtcttttaatgtttttgtgttgttcattatatgctactcaatattttcaggatattattccatatgttgatcatggagttcaacaaaaagattctcatcaatccgaagctatttccgaacatgtgaaggaccaggtatataaatggtttcttttgtttgttctgtttttgattctttttgttttttattcttgttgtatttttcatattgtatttttcattttgttaacaggtggagcctggtaatgtggcgtttcttggcgctaaatctggaactggttcaaaagttctggttgatgcaccaaagaaacacgaggttaagaaatctcgcgccaagaagaagaaggtgagtttcttaagtggttatgttattgttggtgtattttaactggtttttttagtattgaatt

SEQ ID NO: 85026 - DNA, 1415 bp, Cannabis sativa
tgcgcagtaaaaatatgcacaaaatattaggtgaacagttttgccggcgcagttaggctcgccgaccaaactttttacaattaataaaacgatgagtttcattttttttttttatttagagaaaaacttttgctggtaagcttaagttcaccgacaaatttttattttcaaaattaaattttgctagcaagcctaagtgtgccgataaaagttgatgctgaataaaacccatcaccgaacccccgttccccattttcttcttcttgttattcgttctcttaaactaagcgccaatcaccaccctcaccaccatcatcgccctctttctctctcccatttccctcaatctctctctccttatctaatatttttgagagaaataaaaaaaattaaaaggtaacttcgaccaccgcctacaccttcggccaccgttgcccgagtctttaattctaccgccgcatttaaatattgatttgggtttaatttttattgtgtatattgatttacatttaattttgtgtatatatgtatgtgtatagttagaatatatatgtatatgtatgtgtgtatatacgagtgtgtgtggatatatgagtatgtgtgtattttttatacgtgtgtatgtaaatatttatatatttatatatgtgtatatatacgtgtatatatacatgtatatgtatatgtatatataggtgtatgtatatacatgtgtgtatgtatacatgtatatgtatatgtatatataggtgtatgtatatacatgtgtgtatgtatatatataagtgtattcatgtgtatgtgtacttaaatatataaatacaagtgtatgtatatatatgtgtgtatatatatgtgtatgtatatatatgtatatctatataggacacaaatagagaccaagctaggacttaattgctagggggttaaattcaatttttagtatcaaacaaaaattttaatacacaatttacaacacggtcggtcatttttatgtcaaaaatcatctataactaaaacaaaaattactctaaattattcaaatttagaattattttattaacacacttgtaattaaaatacacattaaattttaattttttataaaacaaatatatatatgtgtaaaataatttttatattacaaatttttgacactaaattagagacatgtctaatttttaaagtaaagatgaaaattagcaattagtaaatgattttgaaccaaatgtgtagaaaaacataaacaataattgatattactaatttattggtaaaaaagaaattacaatttaagaaaaaaattaattaataaacaattgtcttattttatttacactttctatacatataaatttaatttgaaaaattaatttcttttaaaaaaattgtttcacattttatttttattaaaa

SEQ ID NO: 85027 - DNA, 890 bp, Cannabis sativa
ttaactccagcttgtaaaaaatctacaatcccacgatctcacacaaaagggtgttaatcccgcacaacaaatacttttttatatataaaagactaatttgaatttttacctcgtgaattttggtatatactaaatcgtgaattttgaatttttcaagttgttaattttttgtaactattgagattgtcgaattcaaggatttctttctaattctgtttaattttacgaacatggcgattgtttaggtactaaatcgtgctctatggactttaatatgtaccaaattgtaaccccaagctttttcacctacgttagatatttgttagtaaaattgaaccaaaatttttaaatgtaacaatcttaataatttgagaagaacatttaaggccttaaaaaatttaaggctaatttgtaatttttcccccgaactatgacacttgctaaatcgtgccccctgaactatttttgacgttaaaaattcgcctcaaactattgacaatgcttaatttaaggtattctatagtgttccgttcattttagtaacggagtgatgatgtggctgccattaggcagttcacgtcattttacacatgtaatttttttttttttaaaatcaaattagggtaaaaaacaataccccaccattcttgctccatctcacagccgcaccaccccacgataccccaccagccacaccccacccacacgaacccacacctagccacgcgaacccagccacccccacccaccaccggactggaaccgacgcacggtcaccactccgaccagacgcagcagccccaccatcgaccacccaccagccacgaactcgcgtctccatttttttgggtcttctctttctacgcagtaagtgaaattcgaaaattaaa

SEQ ID NO: 85028 - DNA, 1230 bp, Cannabis sativa
acatatttttggcgcattaaactgtgccaaaaatattttttttagttttttttttaatttctttaccttttgccagcgatagaaaacgcaccagcacaaatttcataattattttttttaaaaaataaattgtcgaaattaaatgaaatgtaaatatgattttagtataaattaaaactaaaatttcataataagaattcaatgtaatatactaaaataatctcgagcagatattataattacactaagttcaagtaaacatcacagaaataactgaaaagtagttgacacagtttatagaaaatgctcatatttacactgaaaatatcaaaataatagtgagactaaaaatcaatggaatcatcatcatcgtcgttaatctagctgggatgggcaacttgtgatgaagatctagcgccaggaggacaaagcagtggaatcaaagacatctcaggcatgttgtagtcaagaattatgccagaaaattacttgaactgctcctaaaatgtcactaggtactttttctaagtttgcatcatttattttttataatcatttcatgattcctgctcttccacctttcgcttcaacaccttatattctttgacgttgacagtaggctgtccagaggtggaaactgcccaaggagttgctcttttggcccctgtcctaagtctaggaaaaattttaatgcctcttaggtagtatgactgctcaccaagtacatgtttcataacaggcaggtctgtgggaaatttggtggattctacatcatactaacgaggctaatcactcaacacaggttaagattcacgtctctcaaccatttgagtcaacaaaaaatattaatactgttaaaattgaatagaaatgaaatatcaaacgatatggtcaatgttaaaattactgacatgcacttgttacgtgtatattcattgcactaagtgttgttcttgtggtagaacttctcaaagtatccatcgcactaggaagttcctcaatcttaaaaatttgcctatttaatgaaaaaaaaaatattattatattattcatacatattattctatattatcaaacacaatttacacatttttctaccattatattctccataaataaattattttgaacactttatttcaaacgtacaaataactctatttctattgtatatttttttattggaagagacttgtaattgttcttattgaaaatatttttatatgatta

SEQ ID NO: 85029 - DNA, 659 bp, Cannabis sativa
aaaagaacaaactcaaacaacaatcaagcaaaaaaaccaacttcacatctttaatttttcctttgacagttttatgtgatttcacaaaaacaaataatataaacaatagcataaaaaacaaagcgcatatagcataaacaatatcacataaaatactatataatttcaataaattaaaacaaatatcataataacaaactaattacactaaaataatattattaatttctcatttctttaaaaattatataatatatatctttccaattaaaaaaaaacatacacagtacctattaacaaacaacaactatataatataaactctaagatcttaatttttcaaagaatacacaattacaaataacagttgttaatcatgtatatcatagaacaatcaagacaaaacaaacatatcaaaaatactatgtaagcattgaatatttaccagccaaaaatgaaaaaaaatagaatgaaaaataaggtcaaacacaaaaatagcgagagacccttttattttattttttttttcagaaaagtgagaaaacaagattagagaaagcttaccaataccatcgattagagacggggggaggaggaggcggcagtatttgtcgcccgtcgcttggcgcttgggttttaagaaagaggagggaggagag

SEQ ID NO: 85030 - DNA, 1040 bp, Cannabis sativa
tgaaattttcaatatactttttttcccctaattaattaattaatgttcaataataatatttctttctccacttaactcaatttcaaacttagtttaacaaaagattttatctatatgtaaatattaggtattaacaacaggcatgtaattttatcaatttcactctaaattatctaaatagttgttacttaatgcactctaaatttgcataaatttgttttgagtttatgatgttttcaaatatatatctttatatattaaaagtacctatctaacgacaattcttggtttaacagaatatacgctacaaataaaagaatattctgttaaatttaaccccaaaaaaccatttatcattttcttttaacgccgttaccatccccttcttcacacgattcttttcaaatggccctaaagctagcccgaatctcactctcaatcccaatctcaatcccaaacaacttttacccattccacatcttaccctttcaacactccctacatcagaaattccaatcgcagaaatttgaagatcttgatcggaggtgaaaattccctgacgattcatgagatcgatgtagtatgtattgtcgaagatgttaggtgttcggagatcttggaaggtgaaggcatcgaagtctttggttgggcatatggatttgagattcttagtgaaagtttggtccatgatttggtcttgggggtagagacggttgtcgaaggatccgcattgggaaattctgatggtgtggccgcctgagagggcgacgacatctgtggggtcgaggttttggttgtcggcgagctatttgagaatggctttggttttcagtcaaagaacgagctttccttgcaagaacgatttaggttttcagtcgctatttcccaatcgagatttctctggcccagactttttttctccaataatattgcgatttttcaaacaaaaacaaatgcgcaatgccactgagtgaaagagcacccctaaaattgagctttccctcatgattaaaagttgtgttgttaccagcaattccaca

SEQ ID NO: 85031 - DNA, 766 bp, Cannabis sativa
atgaaaaacaaaaaaaaaaaaagtgtaaacaataaaaaaactaatacaaaaatttaaaaatatataaaattacaaaaataacattcagaaactacaaataacaacataagggctttttaaacatacattatacacgcatgggctttaaaaacccataaaacatgaccaaagttaaaaaaaaaaaaaccataaaaagtgtccaaactaaactatgtcatatttatcataaaacattctgaaaaaccatactgcacgtaatttccactttgatataatctaattagattttaaaatctaatttaattactaattggattgtatcgattttttttattagatatctaattacacaactaatttttaatattaataaattaaaataaaaatataaatataaaaaaaatacgtaaaaattaaatatcacaatttatttatgtttaatactacataataatatcatcgttacaaaaacatttcttataattacataatcatttaataataaaatgaaaaaaaaattaataaataaaaaaagcaagattatttatataaatttcacaaaaaagacaaagcgagattcgaagatcgaggacgcaggcaaggtgagatccaacggggttctaggtagcaagttttaatgaccgaggttgagaagctgcagcctgtctattagctatggagacggctgtttcgtttcaacacctttttgtgatggttgagagtgacttcgagacagctatcaagactctaaagggaacctgttcca

SEQ ID NO: 85032 - DNA, 1389 bp, Cannabis sativa
  modified_base (702)..(712): a, c, t, g, unknown or other
gctcaaattaataagaacatcccaacaaacgccaacatgcatctcaagaacataaacacatataacctacttgaatcacttcaatttcagtaacaaattaaacattagaaatggtaaaagaactacctcaaatcccttgcacacacaagcaccaagaatgtaccaaaaattgaagcttccaaagcaattcttccaaaataagaaattgaaaacaatgaggctaagagagagagagagagagggtcgggtttgagggggaagaaaccagaaaataaattccatttccttaaaattcctttcttttattaaatataatctaaaggtcaaaatgattaatttgcccgtagggccataaagcacactcatacacattcaagggtaaaaaggtcaattccacataacaccaatacactcaaataaaattatattatcacacataaatataatgccaataattcaatccaaaattgcatttcgggcccgaatctaattcggcccagaatacccggttgtgactataccgcgccaacttgttagaacacacctgaaaaagacaacacaggcatactatataataatatagttctataagcacgtaaataatttaatttcacgatattacccttctcgtgtcaaaactactaaaacacccctagctcaccaacgcggtcttaacatgtcataaatcatataaattctcannnnnnnnnnnatataataatataattccacaatactacataattaactagttagggttttgctaatccattaataactttagggtattacaatacacatatcatatatatatatatgtaatacgctggccattcaactttcaattggctttgaaacccaatttttatttgtaacactttactcaaatctgaaaaaataacacaaaattaaattaaattaaatatttccaattaaaataaattcaccattaaaaataaggaatatttaatttatattaattttatgtgcacaaataaaggcttaaaatgtattaattagagcatttaacccccaactagcttattgctagtctctagcaattcaagcaaacgaaaagaatgtgaagatgatattttcacgtcaatatttttaaaaatgacacaaatattcaaataaacgttactaacaagccaataagaactatacaatattacttttaataaatctaaagttgtgagtgtgtgcaccaaacttaaaccttcttaccacaaaccatagcacataaatgcttttaaaaaatgtaccaagtagcagtctcaacaccactagcctcagagatgtttgaaaatatttattcacggctaagaattttactcatggagttggaaattaaaaagtgagcactcgaaatggatagatcaatttagg

SEQ ID NO: 85033 - DNA, 545 bp, Cannabis sativa
aaaggtcgaaattgaccttggtatttgattcgtttgtttgttggtgtagggggcaagatagtaaattcctatcttaaaaattcctacagtgttgttttaaggtagtatttaatttcttataaataacttagcaataacacttttaataaaagtgttgtcgtattagtttttataaatacatttatagcaacacatttcatacaaacgttattatatgtacctaattttttttcattttatttagtgtttttcatttttatatgaaaattatatatatttattattaattaaatatattcgagaatatgaataaattcattgttttttatagatgctaacacatatatgtacaatataattatattattcattgatagaataggtaaaataatattatgacaaataagtagctattacaaaattatgtaaattgaatcattctattttttaacaaatgctagctattaactatgggtatgtttggtaaccattttaaaaatggttttttgtttttaaaattgaaattttgaaaacaccaataaaaa

SEQ ID NO: 85034 - DNA, 578 bp, Cannabis sativa
  modified_base (540)..(543): a, c, t, g, unknown or other
ggcgacaacgaaaaatgcaatggatggctagtttaatcaaatgggtaagtttagaaccttatttcttagtgtgaaatattttagaggaaattaaataccgggattatgcggggttatggtttttgaccattttacccctaggttggaaataagctagaattaatccttaagggcattttagtctttttccaaggttaatgttttggtggctgccttgtatggtgacacctagcagatgttattcaacaaaggattaataggaatccttttcatttagtaaaaatataattaaaggaagaaaagccaaaattcaagaaaacactctctctctttcccttcctctatctcttcgaactagccaaaaccagggatttttgctgttgatcttaagtgatttcagcaaggggttcaaggaggatcaagctaaggtaaccctagaaccatagtcttatgttttgaagctttaaaatttagtttgagcatgtgatttttgttaactcaaactttcagatcttcttgttttgatgattaacaaatatnnnnttattatttgttactaatgatttgttgattttgta

SEQ ID NO: 85035 - DNA, 607 bp, Cannabis sativa
tcatcggattcctttttgaacaactattctggtcgttcactcaaatttatattggtaaggagtttttcttttgcttcttttgcatagtgttcatgtacttttctggtctctctaccaacatgcgatcctcctattacgaggggctcgagaaccacttgcattattcatatcagtgttatcatccgatcggggatgattttctccattcttcttatattggttaaatttccctcgtatgattaattcttcaatcttgtcttgaagaaaccagcactctagagttgtattgccaatatcattgtggtactttaaaaattttttgggatccctcgtgtcatgattcccccagattggaggtggcttcctgaagacgtcattttgctcctctattgcatagatatggttgggaggagcagacaactcagtgtaattgacacagcgtggaccccctttcctctttggggatgcttcctttttagtgggagatttggcgagctttggactgtgttgccttgacagactgcatcttttagggcttaacccctagaattctttctttttgggcttcgggaacacgacatggcatgggtataggagactcgtgttt

SEQ ID NO: 85036 - DNA, 891 bp, Cannabis sativa
agctttgtttccactcaggtggcccgcacacctgatactggattgaggtaagaaaagtgttatgcaccgctaaacgattaaatgaaagatgattatgatagttatagtctcgattatgatcgagatcttgatatgtgtttgtcgtgccttgattatgatcgagggaacggaaatggtcattaccattatgagtaattactcgttgaaactgcaaataggttcactttatcgggcaacgaagtgacatacatagctcgtggataacgagtggtaagggtactttatgaagtactgggattatgtgattatggtgatgtgtaattataagtatgttaaaatgtaatgtattctgaacgcatatattttgtcgcggtatgattacctgaatgtacatctctttgaattttttcgcttttcttgctgagtctctgtgactcacgagtgcttcatggtgcaggtaaaggaatgggcaaagctgaacaaccatgactttgaggtctctgcagcagtatacatatcacccgcggtgccatgactccaatggacatgatccacccttttatttgtactttgaaagtgtaacctaatattgtaatattacttttggaacattatgtacaggggatccccatacctaaccgtggttttcttttattaagttatattttattttaattaaaagtttaaattaaaccgcacttttttttagttaatcattaggttaaaacaaatttgtaaaagcacatacgtggtgtccctgtggaacaggacgttacaacatggtatcagaccgaccaaggtttaaagatcttgaagactggcttgatatgtacattggctacgaagactcgttcgactcatggttcagtaagttttaattgctagattatt

SEQ ID NO: 85037 - DNA, 627 bp, Cannabis sativa
  modified_base (246)..(248): a, c, t, g, unknown or other
aataatataattatttaattaatggtaaaaaatttgtaagttgagaaattcggaggtttagaaactgttttactaaaacagccatatctgaagttttataactccgattgaagtgattttagtggcatttgaaagataatttaaagatctataaattttgtagacatagctatatcataattcataatttttctaggtgaaaactaggccctaaagttaatagattgagagcttacaatttagatnnnaaagttagatatttgtttatttaataagttatcatattattattgtcattatattattattattcataaaactaaacctaatagattcaggatagtataggtttcattcaactctaaaattatatcgttctattcttctcaccatctaagcaataagactcaccctaaattttgaagtcatctttccattacatccttagccaaatctataccactcttcactctcatctttgatcaccatcatctcatgtctattgatccaagcaacttgatgtaattgaggtaagaaactctacaataggagaatattcgtaggtctccttttcttatttttttcaaatgaaacctgtctcagtaaaactgtcatatctctttaaat

SEQ ID NO: 85038 - DNA, 541 bp, Cannabis sativa
atatatacatacatagatgtttaattattttagtggggtgtgggtcattttggaattaagcttataaatgtttttattagcttataatatatgtatatgtacatatatgtagctagggacagctttattcactcatatttaaatcttttattacttaataagccgcaattttgataagagtatagtatgtagcccttttaaatctcaaacaaataagatgattaggcaagatgttgaatgtggtatgtgttgtaatggttagtgatttattatattattatttgttattaaattaaaatgtatgactcgatattaaattacattaataacaatataattctttttgtagtgcttgatatattaacatatctaataaatgctgaattacaatgctccccaaaagataaagataatatgttcaagtgtgaattatattgtcctgtctattgacatggtgtgagagttttgttctgttctcttgtttttttgctgttgaaagagtgagttcaagagtgtgtttttttctaattatctcatggcg

SEQ ID NO: 85039 - DNA, 501 bp, Cannabis sativa
ttaatgtttttcttttttgcaaaaagaaacaattataatgatattttttttttgttgaaaccaattttataatgatatttcaaccataaaccttgtgactttttctcttggatgatttaagtttcaagtttatcttaatctttctatattatgttagttattggtgatttgtttggattatcattatttattacaattttacatcatggcttaattcatatatatctttgggggttaggaaaaacgtcagtgtttgctacgcattgtaactaatttttacaccaaccaacaagtgtaactgctttagcggtgtagttctttcaattttttttttttttataaataatttatcaaatagtttgattttcttttaatattttttttttttgttgcattattatgttgttttgcatcatacttttttttttaagaaaataaaattgtttcagcgtgattagaacacttttatggataaagttatcctttacaaaaatgttatct

SEQ ID NO: 85040 - DNA, 847 bp, Cannabis sativa
  modified_base (157)..(170): a, c, t, g, unknown or other
aaaaaaatcataccttctcttaaattattccaaattgactacaatgttcaaaaggaaagacatcactatctatctatttgataactcaaatcaaatctttagataaataatattgttatacgattttattgcttttacatatctattctatataaannnnnnnnnnnnnnctgaattcttggtttatgagaaaaaatcccatttgatatttgatgctaattatttgagagtaggttaaagcagaatcatcaagatttgaataataaggcaaaaagtctcatcgtgactaggttaaaagtctcatttagccctaaactcttttaaaccaaatacaaaaaaaccctgctctcaccttctctttcttcaacaatattataacaagcctccaattcaagaacaaggcttgaattgcataaagctttaaaaatctttgtatattcctgaatcgtaaccatcggtgattgactctctttgccaatcatctagtaagcattatatttatattttttttttatgtatatgtatagttatatgcatgttttatttttcattttgttcaaacccaattgggtcgtttggccattaaagcttctactcccaaagcataaaaatttggcttatctttcattgaggtatattgtaacactacgtgttagaacttctatttctggcaatgtagggattccttggaatgcggtgagatcttgctagagtttccgatattaccaagcttttcgatcaattctctgatgacgaagctgtcgtttgagatgttcggtaactataatactatcttggagggtgttgcggcgactgctaatgtaacgacctaaataattaggcacgc

SEQ ID NO: 85041 - DNA, 631 bp, Cannabis sativa
acttaaagacaattaagaccttttttcttcctaccaatcgctataaatacccgtcaacaaaattaagaaagggatcaaaaaaagaacacagaacattctctgtaagagacgcccacctatcaataacagagactcattaatgcccgaaccacgtaaaaacatatgcattagttcttcctaagctatcattactatattaaatatttagttaccaaaaaccttagtcaacacctacaacatcctaaaatatcaattaaaattatatataactaactattcaaaaatctatgtcattttaacaaaatataaatttaataaaataaatttctaataaaataaaataccatataaataatatttatctaatcttataatttaaattaataaaatatatctaaaacaataaatattttagaaattgatatttatagttaacaattaaaaattatctagattatccttaaattttattgttattttaatgtcaaaataagatcatttcatattttattaattaaatatgtaagtatttgattttataattaaaattaataaataacacaaaaaataatcaaaattcaaaataaccaaaatagtaagttttttgagaaattaatttttcaaatttaaa

SEQ ID NO: 85042 - DNA, 1093 bp, Cannabis sativa
gagtagatgaacatgcaacttgcatatagaagtcgcatacattgttgcatttagtaaaatggatttaaactgttcttcatttattctatgtacgtttatttcaatttaatgttaatatttaatgtaaagcggttctataaccaattaagttttgtgtaaactaatgggacacttgctttgtatatgaaggagtgatccaacatgaataggacaagacagagaaatctttgcaacagtgaactaagcaggccatgatctgactgaactactattcttctttgtttattatttcattacattctatttgtctgggcagtttcgtttgagtactcaccattctcggttgaaatctcgctgttttttagttaaatatcaaattcttattttatttggtgttgtccaaattcctccaacaacatttggcgccgtctatgggaactaactattgattttggaggaaaatcagtatggctgcaaaccagacaaacagaaacactggattattcaatgtcggaacaatgcttgttccactcccaagtgatggagctaatctaactgacacaattaatggggctgtgggacgaaccaatgtcactcctctcaatttgttcccagaaactgttggccatgtgggagaaacatcaacacaacagccattgtaggccgcttcacactgcccgtagcttctgaaggaattatccagctgacaacgacccagtatacggccaagcaggaacaaatgcaggcattgtagcctgaagttaatgggagattcaggacccgacgtccaccccgagtcccgtacacgcattcaggaaaccctcgggtaactactacgaagaaacgacaaaatgaacgtctaaacaataatcgtgttcacagggaacgaaagaacgaacaggaaggtctcgatttgaaccagcccacacataattccatgtggaatagggagctagttgcgtctaacactggttgtgatagagaagagataccgcgagaagaagaccctaaacgaagaaaccctcgaagtcgggcccagccgcaagttgaggtaaataaagtcgaatcccattcttcctctactaatagtcgc

SEQ ID NO: 85043 - DNA, 549 bp, Cannabis sativa
acacttctgaacaaaatggcagggctgagaggaagcatcgccatatagttgagatgggtctcactctcttggctcaagcatctatgccattgaaatattggacggatgcttttcacacagcagtgcatctcataaatcgtttgccgactgctgttctaagtggcaaatcgccatatgagatcctcttctcaagaacacccgattataagtccctaaaagtgtttggagtggcttgctttccgtgtctaaggtcttaccaaacacacaaattccagttccactccatcaaatgtatcaatcttagatacagtcaagctcacaaaggcttccgttatcttagtccgcatggtcgaatctatatatcccgtcatgtcattttcaatgaaaatgaatttccatgtcaacacggtttctttgacaactacaagccagagcaaacagtcacgtttgatgttccacattcctggtttactctacctgtcataactcagtcgtgcaccatagacaaaactcaatgcacctcctctctgcccgaagcttcaaccgaga

SEQ ID NO: 85044 - DNA, 794 bp, Cannabis sativa
aaggaggatgtagaaattgcagattaggtggatacacctgcagcacatagtgagcatagttcagacgaagaacaatgataagaaaaaataccttcagggctgtaggatactcaacttgtcaaagacagagttaggagagatgtgagaccacctgagaggctagggtatgctgactgcattgcttttgcacttgcagcagctgaagaaattgaaaatggtgaacctactacttatgtagaagttgttgctgggaagaatagaaagaaatggcttggagccattaatgatgaaatgggttcacttgagaaaaataaaacatagattagagtacctagacctagaggccaaaggattataggctgcaaatggattttcaaacacaaagaagggttgcctggtgaagaagtgaggtacaaagcaagattggttgctaaggggttcaatcaaagagagggtattaactacaatgatatcttctctcctgtggtgagacagacttctattagaatcatgatggcaaaggtagtaatgtttgatctttaaatggatcagatggatgtaaagactgcatttttgacactgaaattgtaaggtttgttgattcagattattctgggagtatagacactagaaggtctattacagggtatgcctacagcctttggtggatgcataagttggaaatcgaatttgcaaaaggtagtagctctatctaccacagaggcagcacatacggttgcaactgaagccattaaggaggtaatttggtcaaaaggtttctcagaggaacttgg

SEQ ID NO: 85045 - DNA, 950 bp, Cannabis sativa
ggttgctataacccttttatgatattgagggatgagagattcaaatttagaacctcctctttattaagataaatgtgaaactactaagttaatgattataattataaacctatttatgttcactctaaataaattatttgttctttaaaagaaataataaaaaaaacaagtaaaataataagcaaataaataattatcgtgaaatgacagcgtctttgaaatttttttactgtagaatttctatttaagaatactctattcaagaataacttctattttattataaaataagtttcaatttgagtcagttataaataaaaataacctctaaattgtagttagatatatattttttaagtcctaattaagaaataatacttataattatatctaaataaaaaatatatagtttgtaattatatttattttaaaaaaaaattattatgatataatattaaaattgtttattgttattagttttacattttatagtattttgatttttttttttaaattacactgtatacctactttttatgttttattttaatttttatctttattttgttactctttaatttatatctagttgtatataaaaattctaattttaataagttatataaaattatatttaatactttgattataaaaataatatttattaattaaaattattttacaaactatgaccgtgtttggtaatatttttttaattagttttttgtttttgaaattaaaaaagtgaaaatattttttaaaatcatgttctataaaattatttttactttttaattttttaattaagaatcaaaattttaaaaacaaaaaagaattactttttaaatttttttaaataatttttttcttaatcaatattttgaactctgactccaacctaaatcttggaacccaaacagaccctggccccgagctcagacccgaacccg

SEQ ID NO: 85046 - DNA, 688 bp, Cannabis sativa
ctattgcatcttctttggggacttgccttttagtatagcctttgagctgacttaataagtctcaaatctaactcaagtagactatcatcttttcatattaggctgtgtattcacttaggacatgatttatgactaggtgaaagtcgttgtgtatattcaagtaattagcctgtacctcttgtgctagcttgaggccagcaatcagagcttcatattcagcctcattgttggaagcattgaagctgaccttcattgcctcgtgcaactattgctccaggtgtcttgagggtcatgcctgcaccaagcaagtggaatgcactttctaggttgaattgtcttgctcttgctctcgcttcttctctggctcttgcctttctcctaaatcttgagagatttcaagagataagctcattcattcagccatgaagtcatcgagagcttggaattttatagccatgcttgatcgatgagtgatctcatattggtcgagcatgatggcccacctaagtggtcggccagatgcttcaagtttttatagccatgcttgatcgatgagcgacctcaaattggtccagcttgatggcccacctaagtaatgggccttggctagctagcctttggccaagtaatgggtcttggccggccagcctttggctggttatactttcttggccggccagatcgacga

SEQ ID NO: 85047 - DNA, 854 bp, Cannabis sativa
aatatataaatatgtcacacactatactgtcttaattttttttactttgtttaattatagtgtggcatgtcattgactctaaacaaagaaaaaagaaaacaaatgaactaactctcaaatttataaattatttatttctttcaacaatattacaataatcaaatccgcaaattatgtcaaaaccaacaaacatctcatatatttcataataaaaatattaatatatttaaatatatatataaatgaggtctctattaatgttaatgccacattcaagatccattgaacatattcactttctattaattattaaaaaaaaagagatcgagagagattaaaattaaaggaggtaactttaatttgttatcataaattgattctttgtgttggccttaatataattaattaaagtattatattttgtagttttttgagtaaagtctaatgtgcatggtatattttccttttagaaaaatatataataaatcaatatcaatctattaattaagataaatattgtatctattatatataataataaagtcataaatggtgatggtctcttctttcaacaatggctgctttttatgtctttttgtttcttaaaaggaacatatatacctaactaatatccatggaatcatatatgacatcgttttaaatatatatatatatatatatagttacactatatattttttattaattaattatatatagttctttttaaaaaacactaaccgaaaaagaagaaaaaaaaaacattcttgtttcttgattgtactaattgatgtgttgtgcacattattgttgttgtatttatgtgtttgtcaaatcatgattttgtaaaaagt

SEQ ID NO: 85048 - DNA, 1957 bp, Cannabis sativa
tttgaaagtggtaataattgatggggataaatcctgtttattcaattttttattactgtgttggactgtttgaagaagtgtaattttctatccaacaggactgtgactttggtgctacacctcaaatgatgagtccaataattattgaagtgaaatctgtatctaaaataatacataagaaaccaaagctaataagatcagcatctcaaaacgatgccaacacaattattactattggtgaagtaagatatcatcttattcttctctgtatttgattgtgttttcagtatctttcaattcatttgattggataagaaatttatttgacacaggaagaagatttgagaagaagagtcaagatgttggaagagaaaatcatggaattacagaaggagaatgtagaattaatgggagaaaatgaggagttgagaaaagataacaaacttttgaggttgtcatctgacaatcttgtgtttcgacttgagaaacttttattggatgaggatcactgctgagtaagatcacttatcttatgcttaaataggatttttgccatttttctagagttaatgttcgaatattcaagttcaattggtttcaactagtttaagctagttaaataagttcttgtactgtaattatacgcgtggtttgtagttgcatcaataaattatctcaaaaaagtaagcgaaatgtaaagaaaaaaataatttaagagacaaaattctacatgtgttataatttgggggtaaaaattttatgctttgcagtaacaactaattttttttggatgtttgcaggtgttggaaattgtgaattcctctctatatatatcaagtttattccaacaacttgatggtgatcaaacgatcttcctaacataaatttggtatggggttttcagtattttttgtgtatactttcctcagaatgaaaattaaagtgtatagagtgcttaaggttatattacgatttatcttgtggtttctttcttgactttgtaaatatgtagataggttttgtaatctataatatgaaattcgaacttaatacgaatccgaattattccgattctaataagtaaagtagtacgaattagattgaataatcttaagattatgggttcaaatctcgtctttacaattttttttttgacaaaataataaagtctaattttgttaattaattaattaatgtttttgagaggaaataatcaatttactatcgtaattaggtgtgtttattatactacatttaatgtttttagatatatctaaacaattaatttcagtcattcaattaatttaatattcattggatgatgttgaattggatcggtcggttctatttattcattagatgtatttcatgtatatttattgaattagtttgtatttatgtaatatttagacttaatatttttagatcggattgaatccatccatccaatattttagatttagtattttattagattgaattgaatacatctaatccaacaaaaaagggtaaacatttaatttttaattttaatatatacatatttattttaagtataacaacataaaatctaataactcatttaaactaaatgaaaatactaattagttcaattagatattggatgtattgaatttttagacactccattcaacatttgatccgatctaattggatatttaaaaataatatctaatctgatacgatcacaattggatatttaatgtatggtgatcagttgtgattgtatcgatcgattgtaattggattagatcgatttatgcacaccctattcgtaaactatatttaatagtttatcctattaaattaaatatcctaaatgtataactgactaattctaattgttttattccgaaacaaagatatccacggaacagttcgttctatttacaaattcacaaccaagaatctctttcgaatagacctgattggagaa

SEQ ID NO: 85049 - DNA, 2176 bp, Cannabis sativa
caacctcgtaaacgtattgaggtcggatttggtaacttgcgagactaggccctcgcatgagaagggttcgttcagttgggtattgtccaccaaatctgtctcgcttccctcgacatcttcctctccttctgacttgcggtcacgaacctcccaatcttcccccatttcctcgactttgatgttaggggcgtgcctggagtgaacgaggtgttcccgggcagacaccgtggattcgctatcgtgaatctcgatcgtccctggttcaacaaaatcctgaaccattctttctatgtcttcagaagatagcgtgcctaaggtcacagttttggtgacaagagtttcttcttcagagagcgaagctggtataaagctatcttctttatcctgctcgttagcaaaagcaccaccgcctgagtggagcatttggctatccgacaggttgctaatctgaaagatagaagatcttttcagtgcggtgagagtatgaaaacaagtaaagtgacctcacccgcataaaaaaacactactaaaagcgtaaaggtgacctcaagaaatggctgggtgtatcttagtagcctaatgatcatgtcgttacataaaaattaaggtacaagggcacacccaccatttcgagaacttaggcaatcttctcagagtgtaaatcgcatatgtgtgacgaatagtgtgcctcaaaaaatggctaggggtttcccagtgacctaatgggcatgcgttcttgagcaggaccatggagttactgggaaagacccaccatttcgaaaacctgaccaatcacaacatgcaactacatcgcgcatatctaactagtggcgtatctctagaaactgttgaggagtctccagtgtcccaaggaacatgcatttctcgcataaccattgggtcaatggaaaatcctcactatttcgataaaactaacttgttaaaacatgcgattaagcaggaaaagagaaacctggccatatatcgcaaatggctgggtgtatcgtagtaacttaaggaacatgcgatcgcacacatgaacattaagttacagtgacccacccaccattggaatgacctaaccaatattcccaacaaaagcatacaaaaaaataaggcaaaccctatgttctaaacattggttgggatgactaagtccccagacgccctaagaatatacacgtaagtattcaagatgttcatctcaagacttgcaagtattcaaaacatcaagcaaaaaaagatgcgaatactcgaaatgttcctcctaaaaactcacgattatacaaatttcaagcctattttctcctaggaattacccagttttaagcagagaaataaggctctatgtgtattccctacaatgacatacattttctactccctaaaattcaaaaagcagattgtttctcaaaatgagaacaaatgttcgcaaatagtttcgaaaacctgaccttgagattcgtcgattttccctttgattggtttcgattgtttctgaaacttagaagatttaagattctggagagaaagggatggaaatctgaaaggaagtttttgaatctttagaattttagagaaagagaggaagaagaaaatggaaatgagagggaaaattaaaatgggctcgtattaggaggcttaaatacccttatccctcattaattgggattatgacacgtggcaaagggaatgccttaatgagattaaaagtaataattacagccgtcattttttgaaacaattgatgggacaaccaaatgtcatcacctcgtgatgtctcttcgcctgcctctcgattatagtttccctcatgacctcatctgtcagtcgtgaaaccagggcatgtgttatagtgagattttctcacctagaaactcgagatcgaacacctattaaaaacaatatgtgtgttctctctccttgaggaaagctgagacgtcaatgagagacccctcgaatatgaacctcgcctgaaccatattcagcgagatgatgcgaacatgaccgggtctaatcgcattcgtatagctcgcactatggaggaccaaggaacgattttaagctcgcatgtaccaggctatattcgagtatccccctgatcctcctgcaaaaacatagagattgattctctattctgcgagttggtcctgttgacccaacaaccttgataaac

SEQ ID NO: 85050 - DNA, 703 bp, Cannabis sativa
  modified_base (49)..(60): a, c, t, g, unknown or other
  modified_base (638)..(655): a, c, t, g, unknown or other
ttcttgtgtcttattattgctttcttatatattctcattacgacatatnnnnnnnnnnnnatcaaaaagactcattgtcgttggctaaaagcgaagtcaacaattagaattcacaacaaagttgagttcataattacttgaagaatatcatgttaattctcagttttggaaaaatataaaattcacatgaaatcattttgcaacttcacatatctctaacatgttaaatttgactttgaaccatacttactaaatctttgtactcattgaagtttaaacattgttttgacaacatattaaatttgacattgaacccatacttcacaaatatttgtacacaatgttgaaaacatatcaattctcatttctttaaccaaatgtaacttccgtaaattcgagaatgaaccttagcaaatatttgtactcaataaagtttaaactttgagttttgacaacatattaaatacaaaacatatcaaatacaaaacatactctttttgctacttcacatatcaaatacaaaatgtgaataacatatcactttgctacttgacattgaacccatcacataaacaaatatttctacacaatgtagaaaacatatcattttgctacttcatgttggaattattttaccnnnnnnnnnnnnnnnnnncaagtatgttattaacatcctaaacatgaacttctaaaatgatatgaa

SEQ ID NO: 85051 - DNA, 1374 bp, Cannabis sativa
tatatatatatgggtatactcttaatgggtattactaatgaatgggtattctattattagccattagatcaaatttaatggttggtatttataactattaattaaatttttaaaattaatatttcttattttgacatattacctaatgacatggaagtcatttttcatccattctttctattttctcctcattccatgtatatatatggggagttatatttacacaccataaaataataataactacaccccaataatatatttacatatttaaccttagtaaaataatcaaaataattatttttactccactactaaaaaaacggacttgattattacaattttttttaagaaaaaaaaattattagttaagaacttttaactataaaatcgttcattaatagataatttttaaatttcattgtaattatcaaatataaaaataatacatttgaaaaattgttctatcgattcttattatttatgtttatgtttacattatgcttaaatttgcagaaatttaatgattcataatatataatatgttggatattgtcactagatctttatccatttgtcattttttttttgataactcaatatatgtaatgcatcatttttcataaaacaactaaatgcagagaagtaaattgtgggaagtcttcttattcttagatttttaaaaaaaaaaaactttaaagaaaattttgaggtatgctaaataatacctttttgtaaataaagtggggtatggttataaaagttaatatttgatgggataaatttaataatggggtgtagttataattttagagggtgtaaatataatctccctatataatattaatacattcatgtgttacaatttaattatggtaatttaaatattttcattaaaaaaaaatcaataatcaaccgccaattacatcgtcaaacctcactacaacaaatattttcattctataatattaattttttttaaaaaaaaggcataatattttataaaatacgtaataatttattaatataaaaaaacatcaattataatcattggtttagcctaataataattaatataattaatctaaataggaaagttatcatagcataattcgtaagtatactattacttcaaagtattgtaatgacatatttttcttacaactttttagttttagttttaaaaatttgaatttctataataatattatacttaattttgttttataatagagtgaaaataatgtttttcttattattatttttatcattgagtaattcttgtattaaatgaaaattttaacagtttataatttttgtgatgattaatcttacatcattatttgtgttataaatattaataattatgtggat

SEQ ID NO: 85052 - DNA, 653 bp, Cannabis sativa
ttcagattgcaagtacctagttatgtatgtcaacaaaatataaaccaacactaacacatattatattatttataataaagaaatttgtatccaaaaagttgaaaattgttgcaccaatccaaatgcctaatatttctaaaacaaatgaacactaactacaatttgccatatgactgactcttcagttagtctacagcagcctttggaagctgatgatcaccaacagagagtcaagtggctcgaacgaacagcctcggagtctttgtacaaaaactcaacagagacctaatctttctaacaaaattgaacctcaattacaatttgccatatgactcttcagttagtctgcagcctttgcaagctgatgatcaacaacagagagtcaagtggctcaaacaaacagcttcggacaaaaacttaaaattcttgcacgaacagataccttatctttctgactctctgatgatcaacaacagagagtccagtggctcgtaaacagcttctcactcttcgaacaaaatatgcactaaaacattatacacaatgacataacacaacattaaatcaatgttatagaataaaacaatggtcaggtcatcatgtgtaagattgttttaccatatcttctgtgcaagtatcattacactctgact

SEQ ID NO: 85053 - DNA, 527 bp, Cannabis sativa
aatagtatatggggtaatttctctgtgaaacattctaataacttcaaattaattttagacttctataaaaggaaaatttttataaatactcaaatatatatatatatattacaagattgtacgaaattttaaatatttttacagtttataagactttttatacaaaaaatacagactattgatattttcttgttatatatatatatattgtaattttattgttttgttgttatttttaaatgatgtagtaaaattgtaacgatgtgccttggtatttatttggacaactattttctatcaagaaagtactttgttagaaaatttaaaagtttaataattcacaaaactattttataaagaatttaggtgcgtttaagtaactatataattgtaataattgcatatgaatttttattttcatgtttggtaattatatccaaaattactattataattatctaaaaatagtatatgtaattacactattgcactcattcttagaggactatgagaattcactactacaa

SEQ ID NO: 85054 - DNA, 987 bp, Cannabis sativa
  modified_base (851)..(858): a, c, t, g, unknown or other
atgctaatcatgctgctcatggattatcgaaacatgctttagtgcaggataatgattgtatttggcttgaggaattaccctcggctattttttgtgttgttgtaaacgattgatttgtaataacagaacttttctaaaaaaaaaaagaagatgtaattattcttatatagaggtatactttattaatatgtgacttaaaaaatatataactaattacaatttagatgttattttttatttataagtggcccaaattgggacttgatttttttctaacaaattagagattattcttgaatagagtatttttagatagaggttctactgtataaataaaaaatgggagaagttgaagaataccttcttttaaagattaatcaaatttacatccaaataaaatttaattcaaatattcctctttttatgagtattataccaaaattaccttcatactctcacataattaagacacaatttcaaacataatagattgcgttatttaatttggagacggaagtatgtgggaaagttggaacaaaattttggttagagaaaaatagagactatcgtgaaataataaggattaaatttatagaattattaaaaaaaaaaaaaggtaaacataataaattttaaaagaataggtaaaaattaaatgcatcaatttaaaaaagatatatagtgtaatttcttcaataaaaatatgaactattgttttacattattttcacactattatactatattattttcatgttgttttatatttgtattatattatttacacttgctttcataagaacttgtaaaaaaaaaattctataacgtactattttttataaaaaaaaaannnnnnnnttacatttttacgtttaaatatttttcctttacatttttacagttttctatagaaataatacgaaaaaaaacaagaaaactacataaaagtaacatgaaaataacatacaaataacaaaaaataacaac

SEQ ID NO: 85055 - DNA, 1306 bp, Cannabis sativa
agatgactcgtccaggcaagataaatatctagcacaataggtctttgaatagcatcaagcagcacttccggaagagtaattaatgagcctctagatgttgatcatagtatctcgctcatttattattaaatcccacaatatcaacactttatttataggattatgtccgagaatcagatattctatgcaagaaaatgaagtaattatcaatcaagcatttatgtatctttattttattgtccacaaatgtaagctacattacattttgacaactatcaacatgacgtggcatccacgtcaacaaaagatcaatgcttcatgggccaggcttcactagatgaacctaaagtcaataagttatttgtatttatccatcagtgggtaagggttacatataggaatactaagtctataaatataagaaaatgcattcatgcaaagggttagaatctcgatacttgagaactaaggcaagttatatggttcgtaaacttagcaaaatagttatgcaatattcaaaggcttttccagccataataatattgactcgtggattagaggtcgttaatccttgaaccacataaaatctcttgtcttgctttttgttttttttttaatctatttctttagcttaaatataattataattagtttccgaaaatttcagtaaacattttggtgctttcattaagagccgaagacagagttgataccaaagttgtgagctgaaacaatggtagccacgagaaccactgtcggtaaatctggtgcttgtgatggggacactcccatgaatggtgtgaaccctcctactacacatgcgaaagcaactgttgtaggagatacatcagaagtaactagccatcctaccaagaaaagtcaacataatgagaaatattttgatgaaaacccatcaatgaagaaggcgaaccagaagattaagatgatgatcctgaggatcacaatcctgaaacctgaatttgaccctatgagtcgtattccttatatagggatgaaagatgtgcctccaattgagaaaaaatctgaattaggtcaaaactgcgtttttctgtacctggtcgcgaccaacttaacggctggtcgcgactacaggcaaatttcgaaatactaaggttctgccaaaactccaagtcgcgactgtggtcgcgaccatagaaaagggttgcgactagcacgatccatggtcgcgactactgacacccgaagagcagatttgtccaatttttcactagtttgtcccatcttttcatcaattgactgaatttgaactttgataccccggaaa

SEQ ID NO: 85056 - DNA, 791 bp, Cannabis sativa
taactctaattagttcatacaattgttgctattacaagagaccactttctcttttatatacttatacttacatatatatgtgtatatattatacaaaatgatcgaatcacttttttcataaaataatagtaaactagaaaatcagcaattggcaatttgacacaaaaacacaaaagaaaatccctttttctttcacttctttttctttcctcttcttattctatcacttggtttttgttgcctcaacaaacaaaactcaatgttacctcaattctcttctaaaaattcatatggggtttcgatttcatccaagttattttaagctctgtttttgagtttttctttaaacgaggttgtgggatatcttcacatatttgtttgtttttttttttttcataaaaatattggttttgtaataaattttgatgtactaaacagaggaatcacatctctgtatcaatccatggaagaacattacttaacataaatacacacacataacatactgaaattattacaaccaaacttcacaatgaaacaaaatatttacacacttgaccatataaaattaagacacaacaacatgaaaatgccataagtacaaacttgaaacacatacccactaataaaaaaaacgcctttatgagattttcttcttcttcttcagctacatataacagagaatttcttaactaggtatttaaacatcatcattttgaccaaccttttctttgggagaaagaacccatgattattactgttagtagcttttggtttgaacttttttccat

SEQ ID NO: 85057 - DNA, 770 bp, Cannabis sativa
tcccattatctactaatattcttgccacgattttattggcgatgggagtctctatgaccagaggatcatggttagggaagcgcaccagtttcacgtcgtcttctgtaaaggcaatgggctggtccatgagtcggggcctttgtgttgggagttgagtgacttcccacacttcgtcgtgttttatggccccagcataacactttagctcgtgtctggtggttctaccgatatggggcccaccggagatcatggccactctcccatttggtcttggtggcaatccaggtttttgctgagggagtgctcctccgggcagtgcaccgggtgcttattctctgggcataccccctggtgctccctgaggtaaagggcctcccactggagtcgggttaagatgcagcagtcaattcttaatccattcatacatatgacctagtcagattaggttctcaattttgtcttttaggttcttgcattcattggtaatgtgtatttttgccttgtggcaaagtattcccactcctgcgtgtctgtaagctccatgtattgagtgtattgaggggtgtatcccctccattgtcgtttgtcctcagtttgggtgctgccctttgaggacctcttgctccgagagctctgaggaggtcctgtcaggctggtggcaggcgcagattgagatgggacttggacattcatccccgagggattgcccatggggtcccaaagtgtgatgatgcgagatccagggcgaggctttgattatattctggggt

SEQ ID NO: 85058 - DNA, 1949 bp, Cannabis sativa
aatgttttgtttggaaccagttatttttaaaaaattataggtgttattgttttggttttaggtttttttgttttttgttttttatttgtcatttatgtttttgataattattttgcattttcaaagaaaaattctttttaaaatttaagtgtaattttttttaactggttttttttttcttttaattttttaattgtatgttttgctatattttttaatatttttcaagttttttaaccggttttttttttttctgttatgttttattatttgtgactttctttattttttaactattttatgcaaaagtaatattatattattatatttttgtatttagaaccggttatttttaaattgtatttagagaatcaatattataagtgagttttttaactagtttttaagttttaactgatttgttttatgttatatatattgttgtatttgttttaattttgttttcttgtagccttgttaaatgtaatgttttgttggaatctaattttatttttgtatttggaactggtttcatttaatttttatgttttattgtgtaagttagttttttaactggttattttttaaaaaattataggtgttttaagtttttaactgttttttttttgtttattttctagttttaagtgttattgttttgtttgttttggtaaaaattatttttaaaattattttttttaattggtttttattttttgattgtatgttttgttatatgtttttaactatttttcacgtttttgattgtttttttaaccggttttttttcctgttatgttttgttatatgtgactctcattatttttttctctgtttttaactggttattttggttccggtatatatttgttttgcatgtgtgtttttgattttgtatattgttttaaccggttattttttttttttatatatgtgttcattaaaatgtcgcgtaatgtttatataccattaatgcttatatacctgtaatgtgtattattgacaattgttattccaattttgattctgtgtataatttggtttgttattttagttttttgttttcaattttaattagcattgatttttcaagttataaagataaggaagaggatcagaagcaattgaagagcttacctgaagacgatcagagctgtagaagacgatcggaggtcgatgatcgttgctgaagctctctcttcagtcgatgaaaatttttggttttgagatcgactttctgcgcatgtttcttgcgtttgagatgattagtataacctgaagaactttccggagctggaaaagacgatcggaggcggcaatcgttactggttttggagaagacgatcgaagtcgactgatcttcgcgtttgagttcggtttgcagatcgaattgcagtgatcaatcgcagctggtgattgtgcgattccgaacgtgatgatcggagagaaaaccgcagagattagggagagagaaatcgaagtgaatggattctgttatattttcagtttggtaagtatgggtttttccattttaagcatatttatatgttttgtgcattcctatatttttccagttaattattttttttttcatatatttttcatttatttttttctgccatgaaaaggtaaatgacaacaaaaaaaaattccatatttatgaaaaatcctattaatttggggataaaacgagaaatgcctcttttttttgtcagttaactaaaaatgcctgcatattaaaatctattcaaatttacctacttttataaggttactatctaatttacccttatacatgttaccttaattaatagctggtgggtattcatatgattggggaggccttaattgtatgaaataagaggggcataattggaataatagttagaaaagagggcataaattaatgagttttaagaaagagataaaaatgagatggactcccttaa

SEQ ID NO: 85059 - DNA, 777 bp, Cannabis sativa
tttaaaaacagaaaattatttttagaaaacaagtaggcttgtttgaccatgttttttgaaaacagttttcagaaaacaaagttacaaaaaataaaataacattttgttgttttcaaaaattttatttctttgccagatgaaaacaacaaaattcacttttggtcaatattgtttttagaaaatactaaccaaacgcgacttgtgttttaaaaacgtaaaaaattattttttattctcatttctaaaaataattttttttttaaaacaaaaaacatgaaacaatactaaacatatactcttaattatttttacactatgcatctgcatgtatacatacacagtaaaattgattattggggtataaaagtcaacaataaataaataaatacgagtgttataagtagagaaaaggaaactaaaatttgattatttttattaaataagacaacaacaataattttcaataatcttaaataaagagtcggtacgtatcttaattgtattaatcattaatttttttttttttttgaaagaatatcaatcattgagttaaaactattattgtcatacaaatttgagccttaatttttttaaaatatatatatatatataatacaatttatttaaaacaaatcactagttaaaaagaagaagaagaatatatcatacaattgcaaggagagcagttggctcggcctattcttttgagttagggccctacttaattttatggagagaagaactgtgttaggctttgacttatattttatataaatt

SEQ ID NO: 85060 - DNA, 998 bp, Cannabis sativa
aatatctatataactgtatttatatacatttcgtgatgataacatgcatgtatgtataggcagacccacttaaaattaagtgaaaaaatcaggaaaagaaatatacttgtatattaattcatcacaacatatatttttaaaatatactttatttacttatatatctacatctataactatataaaaagagagaatactcttttcggctttctataataaattacaaaaatatcattggtgttcttattaattaccataaaatctttttatataatgacatgaataatgatagtttttctaatatgagttattgtgatccatggcatagattagagagctacatttttactattaccattttcaattttttttgttgaacaatatcattttggaatattattttaactatgataataaaaacatgatattaaattattcaaatctttaagttttttataagttatgcaatttaatttttatttaaaaattaatttgtagcaaaattaattagtagtctacaacattacatttaaactattatgtaatttacatatagtttcaaagttgtaattaagtcagtaaatattctttttatctaacaaattaaattttacaccaatttagtagtttttaggcaccctccattaatagaacaaattaattaaattaatttatctttgttttaatttattaaatatttttcaaaatgatgtaatgtacttttttaaaaatgaaaaataatttaaaaaatctagaaatatttctaacgtacacgtacattgttacattaacaaagtatttaaaaatttaaaagtataataatataaaattagtttgagaataattactaaaattaaattacataatttcgtaaagcttttactaaaaaaaattaatatgtgtgtggtacttaattaatagataattcaattatttttacaataattattgtgaggtataattttacaaaatatatatatagaaaaataatttagttt

SEQ ID NO: 85061 - DNA, 715 bp, Cannabis sativa
ggaagctattttatggaattcttttccaactctaatggagcttttttgaagatctcaaccttgaagaataacaaagtcagaatggtgattattccagaggaaacagcagctaaagggtggtctgagctatataagtgcctctctggtgtacttaaaaggaaaccagatatcgtccatggtggagtaacacagcaaaaggaaaggaagttaggagaatgcaggatgaacactcaatcttgggtcaatatcgttaagagatcggggaagcatgatacgaaatcaatgggggggaacgcggtaaagaagatggagaaaatggcattgaagggtcagcataacaagaatgatgggattcgagacaggggaaaagtggaatggagagaattgtatccagaaattaacctcggtttcaaaccaaaaaatctatatcctgaaaagaggttttatcaacctaaattctatgaatacatgcgctcaaaagctcaaccaaaagattggagtttggcagttttccttgctagggacaatactcatgcggactggagtactattttctataatctgtcaagggagctagggagaaagttgatagtcagccaattatttgatgatagatgtattacttggtgtaaggatgagaaggaaaaagaagagttagtaaaggtgcagaggatgtatgttccgggggctcaatcttttgttacattctctcctt

SEQ ID NO: 85062 - DNA, 525 bp, Cannabis sativa
tgccacacacacatcatatgagtaatgctttggttgttgaactgttttccagatgttacattcctttatgttaatttcattgtcactcagtttgtatctcatcatcattaaacatatacactgcagtttcctatctcatcatcaagaataaaggtgagcttatccatatgggtttgatcaaattcgcatgtaacagggtctatataagatgcatagatcctcacatgtcgagtcacactactcaaccattgcccaccatattctctgttcatggtcttgcttttgacattttactattttactcaaccattactatttttcatactctttattttatcttttctagaaaaagaatgtctttattgtacttgttataaaccggttttatttattaaattttggtagctatggaagagctcataaaccagttttagactttaattattaaattgtatttatttgtgtttgttatcatcctttctattttatttcgttttcactttgtatttatgttttttaacagat

SEQ ID NO: 85063 - DNA, 556 bp, Cannabis sativa
atgcctatgatctcagcaatttcgggttggacatacccaacatttcccttcttgaaagcttctaccatgatttcatgatgatctcgagctacacagccctctccaaaccgtccctcttgttcaaataaagccccatcattaactttaatcttgtttaacacgggtgcaatccaatgctcacagttccgcccagacccttcagatttcctgagcaaatttgtattgatcaagcatgtttctagctgatgttacaatatttgaaacaggccaactcttttttttgccaaacaaagtcattccgcgcacgccaaatagcccaactcaccatcgctacttcctccatttcaacttcgtgccccctggtgaaaattcccaacaaccagctactgaatgttgcagtcccagcctcgatgtccactatgctgcgatgccaagcaacctttgcaaacgagcattacaccgacgcatgttgaatagtttcagtactagagttgcacaaagggcagtcgatattgacaggaacatgacattattggagtttaaaatttaatttaat

SEQ ID NO: 85064 - DNA, 553 bp, Cannabis sativa
  modified_base (34)..(34): a, c, t, g, unknown or other
gtacaccagtttggcttatttctgggttttgaanatcgggtctgatgtgggcccgatgcccgtccgatggccagtccgatggggccaggccgatgatccgatggtccgatggccagcccgatggttgagaaaaatgggaggggtattttggagtttaggaaaaagttatcctattttacaaattatgcctactattagtttaggggaccaatttatgaatttattaagcatgaaaattcaaatttccctctaattactaaaaccgtagttaactattcgaaaaaaaaaaaaaaaaaagtcttagtagctatgtttgtttgttgataaatgccaccttgaagttatatacaggcgaacctgagaatatatatgcataatgctatttaaattgagaaatttaattttttatgcttacatattcttgaaattttttccttaaactcatgatatttgatatttgtggtatatgacacattttataatattcctaaaatactcccatttacattaccccctctcttttcttctctctttcactacactgtagaccatc

SEQ ID NO: 85065 - DNA, 995 bp, Cannabis sativa
attgcaattaatcaagacgaagcactcaataattaaatcttttaaccaagcaatagaaccatgaaacatgcaatctatttaacctaataaaaatattaatatctataaatataactttatgcaggtaacaaatccatgaaacatataattcatttagcctaagttctatttttcatcataaataataatacttttgacattactattaattgcaaattatcactctagctactaagaatcctaaactatcaagtttgaattaattctaagataataattaaacactgcaaaaccttaattagttgtgcacctaacaagaattcacaatattcatagcattcaattatagaaaaatagaaacaatttaatttgagagaaatcaagaataacattcattatcactaatcaagaattcatattttaggattttgaaataactaaaaagaaactactccatactaatcatcataatcaaaatcataattaaaaagtaaagaggttagggagaagaagagaactagaatgattaataattggtgatgtaacttcttcttcttcttcactttctttttgagtttttctataaaacacgtaattaaaaacttaaaaaataaactctaaaagtgctatttatataaccctaaaaataaactaaatttaaactcaaaaatggatttttttttgtaaatcgtacggacatcgtatatggacacaagcgcataggtggaatttaagtggcacctgggcgctacttcttgggttttttttactgtctcgtgctcaaatcagtattttgaccataactccttcaatacaactcggaattgaacgattcaagatgttgtagaaatcttagaacaagatatacaaactttatggctagtttcgagtttagttctgcatttaaagtcgttaaaattcacatttacattttccttagtcaaaccgagctatctgaatttcacaattttttaccaaaatgtgtcaaaacccct

SEQ ID NO: 85066 - DNA, 712 bp, Cannabis sativa
  modified_base (583)..(587): a, c, t, g, unknown or other
atctcatcaaccagattgcggcgagtaaagcagcagcaggttacaacaaaaaaaagaatgctggtgcgattcattttccctacagcagaccgggcacagaggagaagagattggcataaatcggcttagattgtccctggttagcagctgattattcactatttgccatcctatgaacctatgctttggaacaatcattctattccaaatgttccttgcataatcaatcttttgagcttgaataaaagagagataaaagagtttagcactaaacttacctcttttaatcgcagcaatgaccattgtttcattaacagttgaacgaagacgaagaaattttttgaagtaccagctcgcatcttgcttgaaatcaactgtccaaaagctcaaccctctcagatagatcgcatcaatccacctaacccaaaggttatcttgtttactagatatagcccagatatactttgccataagcgctatattccaagccttaccttctctgaagccaaggcctcctgcgttctaattaataaagatttactaattaataaagatcaaaattcacattttatgttgcatggtnnnnntgatttatttcatgattttatgtagaaattctaattccagaacatatgtatttgtttgtgattatagtgttgtcaacatagtggaatatactcatgtttatatgttcgaaagtttaattccctga

SEQ ID NO: 85067 - DNA, 913 bp, Cannabis sativa
tctctctctctctctctcactaatatataatagtcatctttaagacatgacaaatctctgaaatgcactcttcgagatagtgtcaatcttccaattgaaccaaagttctattttctcaatctatatccaacaatagctacacaattacatatttataaactttcacagcctttataaattactaataagcccctatagtatttttatagtctaacactttccacccttcaaaatcaccttgtcctcaaggtggtaaaaataaaaaaaaataaaaaaaataaaaaagttaaaaacaaagcacaaacaacattcaaaatataaaacaaattcaaaagcccatttgttcgttggcccaatccaaatagactgaacttcagggtaaaggattgtatcttcttcaacctttgcagccgctaactttttttctaaggagcttttcttcttgtgagttcttgttagtgagctctatcgaattgtttctctcattatcataaattttgaggtcccttctcctcaatatattgaatgtatgaaccatagtattaatatatatatatttgctgaaaccagttgtagacgttaaaatctacaatgatcggaatgagcgtttatgggcaacgacaacctgcggaacaaagacaaaagatgatcgtgaaaccttgggacaccggggtggtattggtcgaaggcactctgacggtcaagtcagtaaacttaaagtgtgaagtagaaaaaaaaaaataagaaatgtaaatagatacttcctgtgtctatggttatgcaatgatcgaccgtcaaactttgctcaccgaaatgtagagtacgtcaaatcgtagagaaatgataagtttagtcgtaaaactatagagagagagagagagagtgaatgttcgtatatctttcgatcccccac

SEQ ID NO: 85068 - DNA, 689 bp, Cannabis sativa
aaaaaaaatgcaattgatatccctaatagaacccgatcaacgcgaaatattttagaacaatcatctgagattcccattactaccctgtctttaccagtttcaagagttaataattccactacaacacaaccaagagagagtactcaaaatgaacaagaggatttagaatctactggtatgctttttttttttttataattattattattaattaatttgtaaattaataaattttgtattaatatatctttatcaaatatttctatgagacattttttatttattttaatagccccaaccaagaaaagaactcgtggtcaaaatagtagtataggcacgagtaaaatagttgcgaatacaaaacaaaagtttccagtaacagctagaaagggagaacttcacccggtaggagtcaatgcttcacgattagcatcagaaattagttttatagtaagaaatcatgcgcctcttaaatataaagggtggaagcatgtcccaccagaggataaggcacttattcatactcgtattaaggttacttaacttattcaaaaataacttcttttctacataattcattttattatcttcttttacataacatttatctttcaataaatattgtaattattttaatttatttatgtaggataaattcaaaattaatccgaaggaagaaagacacatgc

SEQ ID NO: 85069 - DNA, 694 bp, Cannabis sativa
gatctttaaaaaagaaataaaaaaataaaacaatatataagtaaagaaccatattaatatttaataaaatgtaacaaaaataataaatggtaacatatgaaacttgaaagagaaaaaataaattaatatatcttagcaaaaatatgaccttcttttggactaaaatatcgattctaatttgtccgattaatttttgaaatatttaaactttaaatgttgttgatcgatcattctataaccacatccatttgttatagtgcaagttatctcttcatatcactattgatgctctcatcactatgtaaagatctagactttataaatgattttgcatttgaatatgatgagccttgttggatctacaattttaaaatcaatttcataaatataaggtaattgcttaagctttttcctaaaatccattttatatataagatgattacttaaaaataatataatatacataaatatatgtatgagaatgtatacaaaaatgtacattcaacaataataattgaaaatgaagaatacataccttattaatcacaatcataccaatagctttctttctaatcccacatgataattttctaaagaaccttcaagttctaaaatttatatatgtatatagtatggtacacatatgatagtctcttttatgtcttttttatatgtctaacattaagtaatagta

SEQ ID NO: 85070 - DNA, 509 bp, Cannabis sativa
ttttaactccaacaacttattacggttttcctcccatatatcatctagtacaagaaaatacctctttccaccaagtacttctcctaacttctttaataacggctccattccaaggtctccaacattgctatcacctcttgcagactcaatgatctttctaacaattaatttcaagtcaaaatgatcagacacacacacccaaatcttttgttcaaaatggtttttgactttctcatcattaaaaacacttttagccagagtagtttttcctaagccaccaattcctacgatggccataattgaaaccttctcttcacaactctccaacaaaagcttattgataataacagatctatcttcatccctcccaattacatccgcgtggcgtacactcgagtgagtttctctcactctctttacaatcgaagtctctacacgtccttgctccaagaagaagcttttatcattggaaatggaagccagttttttcttgatgccttgtattctac

SEQ ID NO: 85071 - DNA, 750 bp, Cannabis sativa
gaagaaggaagtgtgaaaaacttattacagaccattattaatggagatgattactttttctttttaaataatgtccttgataaacttatatacttttcacaaaatctattaacatatgaaacataaatatagaataattcacttttttttttaaatggaattcttcacttctaagacaacgaaaacgaattctattgaaggtagatgggttggtgagggagagaagatgtgacatatatatgtttgggggttacgaaaaggtttcacattcacaagttaaagatgggtataaactaagtcaatgaattgttgaaattattatttttgttattatattattaaagagtaatgaaatcataaaaatggtaagaaaaaaattaatttttttgatggaaaatttttttatatttatgttttgaatttttttatgtacaaaaatatatttttaataaaaataataaaattatttttctggttgttttatagtttaggaatattagcggcaaaactacaactatttgaactttttattttttaacacttaatcacaaaaattgaaattttgacggtaaaacctacccagattctattttgctcattacacttccattaaaaaaatttatttaaataacacagagaactgctcacgtgtacacaaatgtacacgtggcaaattttaagtagtccacataatattaattgttaaattattatgaaaaataatataaaaaataaataaatattttcttt

SEQ ID NO: 85072 - DNA, 779 bp, Cannabis sativa
cctactcacacacttcacttttctatttttacatatttcatacaaagttccaacaaaaatcaatttcaatttaaattcctaattttcactttctccaccgttcgccgcccttccttctcacctccgaataccatctccgttgactcgcgcacctctttcccagctgcccagtccactcttaactccggatctccctctcctcttgtgttcgttgccacttaaggtattactctactgagctttggatttcatgtgtgatacctttttagtttttgggaaggaaataattaatagatttttgtaattccgttgtagactagttaagcccaaaaaatgttagtaaccattctcaaatgtttgtattaggaatttccagttagtgtggaagcagagacaacaatattgttttgattacatgatttttccactgtgtctgctgtgttatagagtatgaaggtagacctaagccattaggttagttgacacacaatatctctggtttattgttcggttgtcctctcatgccattcttttccattgaaaccaataataagtgcataatctttattatttctattactgcaaactagcaagtgataaatgccactgtgtttagcaatttagagctgtttaatctctaatattgtcgttcatggttgctttttagggtatttttaatgaatcaaagagatatatggtgtaccctttaattagttctgccaagatatttgagtttatttctgtctttagtattcaactcatcaattctttaacttcag

SEQ ID NO: 85073 - DNA, 1465 bp, Cannabis sativa
atgttatttttgaatatcaaattgtgatcggatcaaattggtgtcatttttgaatatctaattgtggacgaatcagattggtattttttgaatatttaattagaacagatcgaatgttaaatgaggtatccaaaaattaaatacattcaacattcaatctaactaatgagtattttcatttagtttggatgagtaatttgattttatattgttatacatttaaaatatgtatgtatatataaaaattaacataaaaattttacgcttttttttattggattcaaaacatactggatctaaaatattggattgatccaattcgatataaaaagtactatatttaaaatattagataaactcgaattaaaccaaagctatacataaaatacatttaattgatagaattgatccaatctaacatttaatgaatgttgaatcgattggatgactcaaaattaagtagatcggatcggatgttaaattttaacatacaatatataattaaatcgaatttaaataaatctaaaaatactgaatatgatccaataaacatctctacgtcttctaatttacacttttaaataatttataatgtaaagattcaaataaaaggtatcaaatatatgagataagatgtgttccataatcggtcctctcaatcgtagtttattggatatgctttctcttttttattccttaaaaaaaaaaaaaatacaaaaagcaatgtgcactatatatcttcatgtacaatctatgaatactaatgtggcaaaaattattaattttttaggcaaaagacccaactattaaacattaagagcaataaatactctacaaagtggcgaaaattattgtgtagttaaaactaagcaatcaatatttatagagtaaaaattagatagtaagtgtgattacgagggaaaataatatgatataatagttaatatttaaattaaaaaaatttaaaaatttttacatgaaaaatacaaaatttaacttttattacattttaactttcataatacagtatgataacttttatacttttttttattattattttatttactaaaatatcacttgcacacataattctcttaatgttagtatcattattcatccgtcacactcaaccaacttatctttccaatttctgcatattattttaatttattcttctcctttcattttttttatttttttattttcagctacatgtttaaactttcttaaatgatttaaagaagaagtatctccaaaaaaattgaaaccccgcgatcttcaactgctattgaagaatcaacctatatttttttctacaattctctatataaacggttataactcgttcttcatcttctccatctccctctgtgaaaaaagttccaattatagaccctaaagcatcagaaaatgggattggaatctaattttgaaaaaaggaaagggaaaagcaagttagatg

SEQ ID NO: 85074 - DNA, 675 bp, Cannabis sativa
taactctctgtttgttttcttgtgcatgtgagatcatcgactccctctccttcaagctttcagcctctggatcttgaagaggacactcaaccatacctggttgtgtatctgatgcaggtatatatagatctagggttctgcttcttgcttctgtacttgttagttagattagttacagaaattagttaggtgtggattaaccaaatccattctaactaatttctgttagggattctagaggccgaaggtcaaattagggatttacttgtaattacatttctgtccttgtattaagtctttgtatcagtgtaagtgaaggtttactccaacactttattttcggtattataaactatttaagatctttaaaaatttataaatttttgtataactacaatttgtacgagcatataaagtgaaaaaataattctcttaaagaatgccaaaaaatatatataatattacgaaacacacctttaaaagaaatcctacatatttttttgttagtttattgtactaaatcagataagcagcgaaatggtttcgtattactggttatcactgtaccatatcccaaaaaatttctaaatgtttgtacattaaatcaaaacataaaaatataaatttagaatatacctcttgaaggaatagtgtgagatattaaaataaaatgta

SEQ ID NO: 85075 - DNA, 547 bp, Cannabis sativa
aaattagtgtaccttattgttacagttgtgttagagcagtacttcttgtattctattccttaatggttatataattaaataaggttcttgctccctagaaattaattgttcaatctaaacttctgagaagtgtgtttgatactttttttactcaattgatctctctgctttaaagccctttatacatgcaaacaaagataatctatacctgcacattgctgaaagtatatgattttcaatgttccatgcatttaagcattttttgttctcttccttacttagatcaatggtcaatgaacttaaatatactaaagggtgtgtaaccatttctatttgaaattttgcaaaaacactaagtatcattttggtagcttatgttttaataatggtgtcattagtactctatattataaatcatatatattatcttgtgagcataggttaattttgtacacatattgtacaagtactatcaatcacatgggcacttctttaggaagatatattgggatactattttgctccttgtgttttgcaaaagttacta

SEQ ID NO: 85076 - DNA, 1475 bp, Cannabis sativa
gttcatatttagggtgttaatcatcatacttgtgagtagatctaagatcctgggaaaataatttccaacaattatatgatgctagggctattcgaagagttagggatggtagagaaaatgtcatttacgaagatatctggatacctttgactataggcttctctattttgtctccaaatttactcggggctggtagtacgatggattgtttgcagtctgatcttggtggttgggatgttgatctggtttagggtcttttttgcacgatgaagcttctgctattcttttgatccattggtcaattcttaaactgatttggggacacaatcccaatggattcaattatgtaaaaagtggttattggtttgctaagagattattggagcgcaatataccttctacttctcatgggtcttcgggatggtggaagaaattttggagtcttcatatccccccaaagtcaaaatttttacttggcaagttttacacaattagatcccatccaagtttaatttgaataatacgcatggtatgcttactgatagtatttgccccttgtgcgatgcccaggaggagaccactcatcatgctttgtggggatgctcttctctatcccattgtcgaaacctttgtgagtttagcctttgagatcctttggtcatttgtactaatttcatttctttcatctataatatgttggatccttagcctatcacgtaagtggagttagcccttgttatcatgtggagagtttggtacatgagaaataaaattgtgcacaataactttttgatgtcccttgtgttagtggtaaattgggcccgtgatttcttatgtgattattagaggcctcctttgggtttcaaagagaatagtcaactaagggtggttagacaagccaagcctactccacctccccctatcgagcttgtttgggttcctccttatggtggttgtttcaaggtcaatattgatgcgacattagacttggaatgtggtttctatggcttgggcatggttatacgtgatgctcatggggttgtctttacctcgacaatttggcacatgattggtttttttcaacctaaaattactaaagctctcgctcttcgccatgctggcacccaatgtcgtttcttgggtttagataatgttcaatttgaatctaactgtctaaatgtggttaataagatcaacaacaaaatagcattagattggttactgtgattaatttttcgtgacattcattataatacgactctcttccataatgtaagtattttttattgttttaaaatagttaatggtattgcttataaccttgctaagtatgctttgtttatgactactagtaaagtttggtcatctaaattgtattcattcctaccttatggttaatgcataaatctttaatgagaattttgaggcttttcttcttagaaaaagaataaatatactccaaattaataatattt

SEQ ID NO: 85077 - DNA, 596 bp, Cannabis sativa
gtgacctcttgagaagttttcccaagaagcgtgtaagtgaggacaaagcacgctggatacactcgtattggtctatagggccagtcattagtttaggaagcaattagagtgacgtactcgtgtataatagccataaatctatgggaaaagcctaataaaagcttgaagcgagggtgttacaataacaatattaaaatcacttaaactacaaaaactcaatccaccattatccttgtgaaacaccaatttctcccaagacatctaaagaatacccttacttggataggttgatcaccaccaatacactacaagaaaatgaccatattttaagggttaagaacccacgagatagacctatctcagtagttatcaaccgtaggatctgaccgtcgacacagtagtgatgaccaatcttggtggttgggaactgccgagataggtgtaccacatgctcacacatatgtacaatcttagcggttaagaacccacgatataggttaataacggtagttttttaacagatgtcgtaattgattttaggaggaaaaaataatttttttttaaaattttcacctgcattagtattcacgatatat

SEQ ID NO: 85078 - DNA, 1452 bp, Cannabis sativa
ccttggtattataagaacataaccaatattgaagagtacaatgagaaggacctgattgaattgattgagtttaacactattagtattagtatcggagatcttcctcctttactatacggtaagtgtactaacaatatgtgttttatgttatcaaaggtctctattaattttattgcttcaggtttgaagtgttgaaagtaaaatacacattttgacacaagcattacactattttcattacatgttaagaatttttgctaagaaaatctccatttttcttttagctgtattccatctccatctatctttctacacaagatgacaaaaatgtgtctttcagttatctaattcataacagtcagtggcttatttcagtagaagagtatgttaggatctcctaatttagttgatgattcattgaaatagtttgtgttttttctaatttgtattatattcagcaaaatttcaccaaacataacccacttataaataataacatttcttaactgttatttgaattttgacattgatctgcacaaatgaagcgtacaagagtgacttcttactgagtatttttattagttgtcactctacaatgtaaagaggccaacttgtgttggttttatgaaactccatacacctttatagttcttttttctttttttgataatagacacctttataattcttaagattgaacaaaaagttaacttttatagtgtggttgggagttgggattgtttattttagtgtgctttgcataaaattggggtatgttaatgctattatatagactaagtaaggctcttaatattttggactgctcgtaaattcattaaccaagttaatatgtatgatcagaatatacttttctacaaattaaccatatcatgctcacttatttagatatatattatatctttagtacacttaatccactcattagtaatcattgttggtacactcctttagtaaatgtcatatatgtattagctataaggaggtgtaatagcacgtggtggacctcaactatggacaagaaaaactcagagtttgatatcgtttgtgaatgtaattgggctcagtgttcatggttatgcgactattaatggatgtaaaaaaggcttgtgggacgtgtcttgtgctcaccatcctaagttaaaggtataaccaatctaatctaatcaaatttcatttcaaatattaataaattttaatttcttaattcttttttaagttccctatttatttttatttgacagggctaatacgagagaagtcctacgacactatcgttcttaaattgatgattagtattctacaaattcatatacttgtgtggttttgagatgatattagatttgagtctttcctataaattctcctcttcaaagtcctaatattgaagactctaaaaatgtcactatgttatcaaaggtggtaatatatctc

SEQ ID NO: 85079 - DNA, 675 bp, Cannabis sativa
ggtcctaacagtttttaactaactctcatctttatagaatattttagtggattcttgttctgctacaacaaaattcttcttccacttttttgggtgcaagttgttcatagtgattgaagttagggatgaagctacattgagaccttagtctaaaaggagttcagattcaatgttgatgggatttggcaagagtgaacaagggatcttggctacatacatctaaggggacttagatgaagatcttgattgtgtgatcaatatcttagggtaaatttgttgtatatgaataattttctgtttgctttaagttctgatgagttcagaactggtttttgtaacttgactttgattcttagtgaatgttattacccttgttttggagaacctaaacactaatcaactggaatgtgcagacgaagcttgtaaatttaagtgttcttgatttactttatgcatttaatttgttttgactattttacactactacaaaaaagagctttaaaggcagattttatgggcatttggtgtcaattttggtaaaaattgagaccgtagttgtttcaggcgacactgtaggtgggtcttagtaactaatggcataaggggaatgcgtcgattattataaaataattgatgacataggaaaggccaggtagaaatcaaagtggatatggc

SEQ ID NO: 85080 - DNA, 505 bp, Cannabis sativa
tagaaaaagaagaaagcaaagaaaaaaagagtttcggcaaaacacaaaatctgtttttgattccactgtttgctctatgcggtctaactggtttgatttaatgtacaactaactcagggcaactagcatgttaaggtaagacgagtttgttgaaaagcaaataaatcttgaccatgtctaattcatcttcactactaatattgattttcagcaatatcaaagacttctcaacacggatttgtggagttcgtgtctggtctatggagcaatgtctgaaataatactagaacttatccagcatgactgtatataacaatagttaaggggcataatgagtgcatgcctgaactgtccgagctgcagcagcatctggctttaatgaaccatcatcagagaaaacattcctgcaatgcacaccaatggcagttcagccaaaaaaagaaaagaaaagggaagaaagaaatgcaattctcattaatctgcgacctgtcaatttcaagacttt

SEQ ID NO: 85081 - DNA, 2587 bp, Cannabis sativa
acgggatcattcttgttcacattctcaagataaaaaaataaatttgtttgttagttttttcatttaaaaaaaaaaaacaatcaacactatttcactgaaattattaaaatgctaaaaaaaatattattatattaaaaaattctcaaactaattaaataagttttcaataaactatatgaggaacatgtatagctcgcctcaaggacacttgaaaaaatagaaataataaaacttattgagtctaaataaatacaagaataattctcaataaaaatgatttaattatgaaggtgttatctgattgcctccttaattttagtgcaaatttatttcaagtattgataagaattttattgagtttggtacaattgtgcatgatattaaaaatgtctctgtctttcttaaatatttttttctttgattgtaatggaatttataatgttatgactcattctttaactctattactttattttcaaatattgtttctcgagtttggttgttttgtttacctcccggtctccaaaactaatcgttttgtgttgtctgtgactctttcggctttgtgtcactgtcttttttaattaaatatattattcattattttcaaaaagaaaacgaagctatagaagaaaacacactaataattaaattggtcgactacgcactatcaggtttattattatttgaatcttttctactgtgcgggaggttattaaacgaaaaattaaatgaatcagtttcctagaccaatccgagcttttagttcttctaattttgaattttagtcaaagaagaaaaaatgatttggtaaatagagaaaaattataattaatataagcacatgttttgaaaaatgataataatgaaaagaaaacaaatattttagataatacatatatatatatatataaacaaattattggtagagatcaaagaaatacaattaccattggcaattgtcaaatatgtacgtaagcataaaatcattttataaccttatttattatagatatagatatatgctcaaagagagagaaagaaaattaactgaattgtcaatttcgatcaatattatgatcatttttacaaccacatgcgtcatctgttgctatcatgattgacttaattggttttccaagagactaataataataataatgtttttttatcaaataataataatattgcatggtttataacaactgattgtagtcgtagggtcctaattatataaataatacacatatatgagatggaagttgcataaaaaaaaaacaattttaaaaaaatggacaggcaatgggatatgcttaattggtcccgtaagggatattaatttcaattttcaactatcaatgatcaattgataataaatactaaataaaatacaattgagtgaagtagttgccagcaaatacatcataaaataagacatttcagagactaaaaggaaggtatcgtggaagtgatggcgttgacgatggtatttatttaagtaatatatattatatatatactcaacaaagactagctagtcatttgatttaagtaagaagaatattagccattttgactctaatttctagagtttcagtcagaccctgacaaaacacgtggtgtggtggaatctttaattattttcttcttcatctgaattttctatatattccattgtttgattatccccatacgcatagcataggaaatggtttattataaattaattaattatatctttgaatatataatttgatttggattcggattcttcctagcttataattattagtagttaataactaagaatcaaactatatagaaaatggtgtgtgttcctccaaatatcttgctaattgctgtacatgtgacatatattatatacatactaattaatgagtaggttgtattgggaatatgcttttattcatttatatataatgagccttaattaattgaatacagatgatctgtacgttcttcttttacatacaactatatgtatattataattaaacagtacataatcctaaatcttagttgaccatcaattatatgaaggaggtaaagtacttctattatatgttgattttggccgcagtctgtgttgtgtatatatacatgtatgctctttattattattattattattattattattttcaaacaataactaatatcattaaataaaataaaaaaatatcaaacagcttacaacactatacaattaaagtgctaatttggtacgccgtataagagtcattttgtattaaataataaataatattatgttttgataaaacaatgtattgtattaattattacgactaaatttttaatactatgtagtatcatttaatacataatttaatacataataaatgataataaatgctctgtattagcttgtattataatatttacaaaagatttcggtttaacaccaatctccgaccccaaaccggactcaggacccgaacccgaacccgagacccgagacccaaacccaaacccagactccgaaccccggaccccggaccccagaccccggacccgtagttgatattgggatcgagtgtattaaaaa

SEQ ID NO: 85082 - DNA, 672 bp, Cannabis sativa
taagtggatgactacataacaaaacaaatctatggaaaacactgtaaatgtactaatgttcattcattttataataattcaaagaaaaagtgaaaccctaatttctgaagaaaagaaaaaggagtcagagaaagtgagcaaaggggatcaaaattaattgggaccgataaaaagatatcttagttaattaataccatatcctaaaaatgacccaaaaatagattaccatgagaaagggtttagagaagagaaagcaaaaatggctgctggtggtgcgtttcaggtacgcgtgtaataaacaccactctaatataccacatgcatataacaaatacctgtgcattgagttgattgtacttcttttcaaaatcattcttcaattccagagctgctggtaatggttttgggtccgaacagtctcgaagttgaacccaagaaaaaggaaatcacaagaaagaacgaggaagctaaaaatccgtacaaatcaaactcgagataatatattgaaatgcaatcaaaacacattatttattcatttatgaaaaggcaaacagaaataaataccaaatgagctcagattcaaaccaggaagaaaagaacaatggcctccaatttcttccagtgaagtgcagaccaaccccaaatttgatcctcggggaagaaaatcacacg

SEQ ID NO: 85083 - DNA, 742 bp, Cannabis sativa
tttttttttttttttgaatatgaagtaatagtcaataagtaacaaaataattgttgtaaaataatacaatcataaagaattgagtaattatttcaattatttgagaggataccgcaataatattagctttagatgaataaaaactgctaataatatattatgaggaaagatttactttatgagtgaaagaagatcgataacaaggtgagaaaaaaaataagtagaagagtaaatgtaagtaggagaattattcaaatattcaattctctatttacttacttatggagaataattatttgtttcaaatctacttcttaaattaataaaggaaaaaactgaaaatatcaccataaactttaataattaaaaaaattcttaatttataaatataattatttaacaataaagtaatattattgtataataataactaaagtttgaatgataaatcaaaaatatcacatataattgatcaaattcaaaaataattgttattattattatttattttttttgaacaacaaaataaccattgttcaaaaatatcataattattttagggattcttttttttctttatattcttacgtatttgaatttttttaaagtgaaaacaaaattattttcatgttgctgcaacacacatggtgctctaaacagtgacggacccagaatttttgttttgtgggagcttatttatcattaaaaaatatttatacttatattataatcactcttacta

SEQ ID NO: 85084 - DNA, 613 bp, Cannabis sativa
acagggactaaaaaagctaattattctaaattataatagaatgctgtaatcatatgtaatataattataaatcaccaattacagttagaatgtcttcatactctatcaaattctccacttgtcaaaataataataataataataataataataattataatgaggattacctaaattttcagtcaaaataaatttcttgtgaacagaacctaggttgtcttaggggtggcccaccatcaggatctgagaaataaataaataaataaaaaacacgagttgtttgagtacggagtaacggaggttttacctcgacgtacacgatattgcgtggacaatcggatcagtgacatcatcaccaccgccgaaacgttttgaatctccgccttacgtcgtcgttttagagggtgtaccaacccgttcccaacacccgcgtcgcaccgtaacattttcctttttctttctcgaccggcgagtgagggtagaaagaatgttttagaacaaaggtggtgagtctggtgacgacgattcattccgagtcgactcgtctctgaaacgccctcttcttcgctcgagctcgagcgagtcggctcggggggagggaatagttcagtgg

SEQ ID NO: 85085 - DNA, 952 bp, Cannabis sativa
ttgagcaccttatcaatataagtttcttgagagagtgctaatattctccactatctatctctatggattttgatcctgagaacatagcttgcttctcctaaatctttcatttggaatttttcggctaaccacttcttcacatttgataacctttctacatagtttccaataagtataaggtcatcaacataaaaaactaagaataccactacattacctttaatgtatttgtatacacaagcattgtcctcattttgtttgaatccatactctttaatagtcttattaaaggtaatattctaagatctagaggcttgcttcaatccataaattgatttaagcaacttgcacaccttttgatcatccccttgtaacacatacccttctagttgttccatataaatgacttcattaagatcaccatttagaaaatcagtcttcgcgtccattttccatatctcatagtcataagtggcagttatggaaagaagaatgtgaatgaatttaagcattgccacatgagagaaggtttcatcatagtcgatgccttctcgctgtgtgtagcctttggctacaaccctagctttaaaggtctctatcttcccttcagtatttctcttctttttgaaaatgtacttacaccctacgggtgtaatatcttcaggtgaagtttcatactccaagacattgttggtgtgcatggaatccatttctaaatccatgtcattgttccacttgtctaattctgggtcttccattgcttctaaattttccttgtctatgtcaaagcaagaatatgtgctccatgttcatagcaaacatgttgtctcacaatcctcccactacaatgatgtactaaggtttcctttttaggaactctggtaaccgttgttggtcgttcaactaatggtgctgaaattgttggtttagaaatttgattatttctgatttg

SEQ ID NO: 85086 - DNA, 1118 bp, Cannabis sativa
gcccaaacattttttcaaaaaaaattttgcgggttcatcggttcgggttcgggcgggttgctcgggttcgggttgaacccgctagaaatgttcagccctaattgaaatggtgcattatcatggttccaaacacagtaacaaatggtattcccctctctctcttgttggggaaattgcttgatcccaatacaagcttacatttcttattcctatgttgtttgctgttataacatctcccaagtaaattataaaatctgcatttacataattaaacataaataaataaatttactttactatatatatcacattcaatctcaaaacaaaactggttcgatcaaggaatcaataacgaaaacagaaatgaaaataaagagcacaaacacatacgcggttcaagtgaccaaaccagcctcaagggtccttgtaatctctttattcaaaacttgtttcaaatctgtacaacaatgaagtcttgctccatgaatcaactctcaatagtggacaaaatcttctcttaactctaagcctagtccaactgtcataacaggaaaaacttaaaagctgttatttctgttatgtgtcccaaagtagccctttgagtccaaacagcattttaccaattccaacaataagaaactaatcatttacaaggaagagtaactagcatttaaatgagaaaaatacatctttagtcaaagtgaggcgactctttgtttaattttcagttacaattttatttaaagaattgctaaaaaggcattactggtgcttagcaccttccttggtgaaattaagtatcgggttccatataacttaagaaaataactatctttagtcaatgtacggcaagtctttgtttaagtttcagttacaatttttattgagatctcatttgactattgcttttgactttagcttctttggaagctctagtggaaaagttactaaaattggtttatgttaaaagaacttttagagcaaaaaacttaaactaactaattatcaaaatagcagcataagtgtttttggagtttcgataaactaggaaacaacttttaaaagcccaaccaactaaatccttatagaattgctatagagtataagagcatctttaa

SEQ ID NO: 85087 - DNA, 927 bp, Cannabis sativa
gtttcttttcaactactaatgttcctcttttgatatggtgcatcacagatgtcgaagaaaacatccttcactgtagcaaaataaaatatacaaagaaactacactatcaccaagaccacaagtaagtatgatctttttttttctttcctgataattcaatcacataaatctttcatttgttgttgttccttcatataactaaacataactaaacaagtacatttttttttggaagaacttttttgaaatcgcaataatgtctttgtcattgaatgaattaaaaatttgaagtttacattgtatgaaaaacaaaattctgtatcttttggaaaaagatgacttgatttatatttatatatttatatttatttttgattgatttagattgatgccccctaattaagggaaataagtggtgaagtactaaatgaatgcatgtaagccaatatatacaaagcttgtatatagaacatacaagtgtatatgtatcttttggagtcttcggtcaaaaggggaaaagaaaaataaaaattatttgatcgtatcaagattgcattttcttataacttccatatatattttatgatactaagaatgtggatctttattatgaattgagttatattgatggtttatatgactatttagtattattgcttttaatatattttattaacattaatttctatttcttaaaattttacataatatattattttttttttcattttttcaatatatattacacaattatatattcttttatcttcaaattattattattctttttaaaagtatcattttatattgacttttgttttaaaattacatatgacatttgaaaaaaaaaccataactaaaacctaaaataaaactaaatatacgtagcttgctactgttacaatacaagaaacaatttaattggaa

SEQ ID NO: 85088 - DNA, 904 bp, Cannabis sativa
attaaattaaagtctaattcaaatttaaattaaaatttatatataaaaaaataattctttaattttgttgataattttaaattaaatttaaatatttaaaactatttttttcaaaaaaaaaaagataattaattaattgatttaaccggtattagttttaagtgtaaactttaacggaaaagtaaaataaaactgttaaattaacaaatagttttcgttagataaccatatttaatataagagaaatatatataaaatatattttttatattataagagtagctattaaatgattgttgatttgacaatatttttctatcaaatttaacaaaatatacaattaaatatgtaaagtttttttttttggcgagttagataccaaaatattttttactttatagtgagatttgtttgcattcttaaccgattttctcacctttattattcgattttattgctcttgtctatgttaggaaagattgtattttcagttggacttttgttgtatggaaacttcttgtaagagaaaaaattctcttatagaaagttagttttttaaaggaaactttgtctattatcttttttcttaataaattcgattgtgtcttgatataatcagatcatacacactgtttatggcgggtatcaagacccaatataagatcagactcatttttggcaagttttcttttctgatctgatttgttgcgtcagaattcgcatctgatgctgtaaatcaagtttttcttaagaaagttttgtacagctgtagattcgtcattgtggatgtgcccatgttctataaatagaacctagagagcagccattcgaatcaactcttctagttttcattttttgcatttttcttatttgtgagaagagagttctttttgtgagaacctag

SEQ ID NO: 85089 - DNA, 601 bp, Cannabis sativa
agagcttaggatcgtctttttggacaaagtttaatgacttgggagactagatactcaacttgattattggacttgattttattgtaatgaatagcatttgacatattctaattttattaatttataaaatatttgatcgaaaaatagaaaacttaatctgcatgtaatctagatttttctagaggcactgagtgtcaaatatatttttgtacaattatctgtacacgttatgattttagggttttatcaaattacactagtcattatgctttcgaattttttaaaataaaaagaatatgtacttttgctatttttggtgtctatatatagctttactgatgagagtcatatttatcatgttttgtgcatattatattttcatgacctagtcttaatgtcatcataggtatctagtgtgcactcacctgtaagtgtaagacctaaaatatgtacaaaaaatgaattgaatttgagccccaatatttagtggttcacgactacccggtttaagatgtcgttttctatgattgttagtgagagtttggagtctagtggacgatgtaatatacatttgaagcttaattttatgattattttttgt

SEQ ID NO: 85090 - DNA, 1276 bp, Cannabis sativa
  modified_base (344)..(356): a, c, t, g, unknown or other
tctcccacaaagaatttctgagccttcacttgtttgttgaaatatcgagctacttgtttttggtgggccatcagctttaagtttgctgtggttcacttctcttcgatttcatcaagggatttggcaaggagtacgtgattcgcttcttggttgtacgccaatcttctgtgggatggtggcttgagttctatgggcagtattgcttcatatccatatgccatggcaaatggagtttgtccagtttccgttttctcagttgttcgatacgaccatagaacttgaggaagttcctccggctagtttcctttagcatcctcgagttttttctttagtgtatccttcannnnnnnnnnnnntgcttcaacttgaccattttcttggggatgcgccattgtagagaaacttttgatgatatcatggttcgcgtagaaatcagtgaaggactggctgtcaaactgtttgccattgtccgaaactattttgtatggcaatccaaacgggcagattatgttcttcacaatgaagccttgaacttttttggatgtaatggttgccagtggttcggcttccgtccacttagtgaagtaattaaccgcaaccactgcatactgcactccaactttacctttgggtaattatccaataaggtcaattccccaaatggcaaaaggccacggactttgcattgagttaactcgttgggcggagctcgaggaatctttgaaaatctctagcatttgtcacattttttaacataggcctttgaatccttgatcatttttggccaataataaccttgccttagaattttcttggacaaactctgcccggcggcgtgatttccacaaaatctatcgtgcactttagacaaaagtcgtgtagcttcttcttgggtaacacatttgagcaatggcatggagaaccctcgtctgcacataattccctctactatgatataccgtacagccttcgagcttcatttcaattatcggggagttccccagtattgaggtaggctgttattggcgtcatccagtttggggaagtatcaatcatttcgatctcttccgcaccattgatgctaggctcttcgtggaactggataggaaccaagtttgctttatcacttacattactactcgccaaccgagctaacgcgtctgcagtcgtgttttctttcattggaatttgtctgagaccgtagcttttaaattgtgcgagcaggtcatgtattttgcttatatatgctatcatctttttgttggaatttatttta

SEQ ID NO: 85091 - DNA, 743 bp, Cannabis sativa
aacaatatatgtctagcaacattctaaagattaaaaagttgagaatatagataatataaattattgtacatatatatgcctcagataaataagcacatccttccaactaacaaagctaacatccaatcacacaccttacctcaatctttcttttctttgcagctccaagtcacaacagacttatgctctgcccagttataaaattagattggcatttttctacacaaaaatacatgagttatatgtcaattcaagcaagaaattagaatgaaggttaatactgctaagattggtattcaattttcgtctgatgacaaataattgtatgaagattaacacagataaggttataccttttaggataactttcacaccatcatctacaacatggatcaactataaaatcatattgttctctgattgtcgtgacaacctccttgaaagaatcctacatgcccccaagaatttataagtctttgatgctaaaaacatgaggttgaagatgtaaaatacaattctatatttgtcatgagataaaaggaatctaatacatagtaaagttcataggttgagagcaaattacccccgcaattagaaattttgaaacagataatctaggttcagtaagacttcaaagcaaggtatgtaaatgttcagtagttccaatgttaatgaaattacaacaaaaactgttagcataaaatatatgcaaatgccatggtgggacatcgtactttcaacaa

SEQ ID NO: 85092 - DNA, 661 bp, Cannabis sativa
gtcattataaaaaaacttgatcttattgttagaccttcaagcagatgatttttcgtgaaagaatttcatgttcctgtcaactaaattcagccagtcgatccgagagcgttgttgccaataaatctcttcttgttccaataactcatccaatattgctttggactatataagctctatcatggtgtcatttgttcaggcaggtgtgttattgagattattgactttggtctgagcttcattgattcttttttccatatgtccatattttgcaaagtgccaggactgtagatcggttgaacaagcattaaagtttgtaataaccatttgaattggatcaacagagttcagattgtaccatcatttggtgattatttctttgctatcagggtttgaaagccatagcttttcaaagcaaaattggcttctctttttgtcatgttgttgcagtatcaagattacacgaagatctgagcaaaagaaatccagctgatgaacctgaggcttgccaaaaatatcagtcccaatggtgattaacaaaacaccagtcaagatgctttctaatagtttgaacaatagtacgatctttggcccaagtaaaagtgtcatcgtcagctagagtttcttgtagaaaatagcaatccaaggcagtcctaaaagcatc

SEQ ID NO: 85093 - DNA, 597 bp, Cannabis sativa
atttacatacacatatattttatacaaaaatgttaggggatcaattgcttcacttttcccaatgcatatcctatatgcatatgttgtctaatattaggatactttcaagctcaaaacaagtctaaggatttttaaattaatgatagtgatgatattgttgatagtgacgatattgatgatagtagatataggctattcaaaatttcatttttttttctttagaatgagattttcatttaataaaattaaagctcccatagcgtgacgagcgatgtgacaacgtatagtaatatggagaagacaaaattatttcaagcaccaatagaaccaaccaaaagcaccccttgttttaatataataatagaataatctggttgaagcataataatcatacatttttgatgcattgtatatcccataataggtctcattcttctatcatttcctgatagttgatgactattcatagttattaccttgacaccaaagaagagttcgacacaatcgatcgaatcatatcagatcatatagatatcccttgaacacaacataggtacagataaaatgcattaaatagtctgttttagggattggcga

SEQ ID NO: 85094 - DNA, 1417 bp, Cannabis sativa
tgatataccacatatggagcaataagaacaattgtctcttcaacaaattttcgagtacagcttcaaaaattacacaagatatcaaagatacaatgttttatagattacatgtagctaaaaaaagaaatatgaaagaccatgagaagagatacatagagagaatttttatgtaattcttttgtgcaacctttttttttggcttgtatagatttgtaattgcttgtgattaatgaagtttgttccttcttcatcaaaaaaaaaaaaaaacataagaagcctaaaaaaataaagtgatataatgaaatacgaaataactagttaattcaaaaaaattaaagcataccacaagagaattcttaacatataaataaatttaaattactgtaaccaattatattaaacaaccaattaaaagtgacatagaaataccagttacatataagcaagcaaattacgtaaatctgacacagtaaaactagtttcgtaaaataacaaaaaaaaaaagaatgaaacttaaaccttaattacctaaaacaataattaaacacgaaaactagttatctagtataaccaactaaaaaattgaacatacataagaagacaaattaaaaaaaataatatacttacaaaaaatacatgccaaagatgaattcttaaaatttagatcgaatttattttttttccttgtgcataaccttcctaagaattttaattttaattagaggaagtttattctcaaagccagcacttgaatctttagtaacatctttctttgcatctttattggaggaatcaaattccatctgaacaaaaaataaaaataaattgaaatcagttttatctgatttatcttcaacaacaatgaatattatgaaaaataaataaaatcaatttcgtcacgcaataacaataaaaattatgaaaacaaaacataaatgagaaacattgaagataactaaaactagtttcttcagttaaccaaatggaaaacgcaaacgcatacacacaataaatacaaaaatacaaaaaaaaaaatatctctacaaatataattaaaacattatacaattgaaaactgttacgaattttgtaaacagtacgcaagtgcacgtaatcaagtagtaaactcacgcaggtgaggtcgaaccacagggaattggactgagtaacactagagtaaatttatgtttctatttggcaaacaataatttttatgattacaaacaaatcaataatttcaagaaactaaaatagacagataaagattaaccaagatgagaaaatagggaagagaatcctattgattaatttacccaattgttaacgcctaattgttatcctttttcttgatgtgaatgacagattatacaatttaacctaactctttttagatcttttaggttctaaatcacatgtt

SEQ ID NO: 85095 - DNA, 620 bp, Cannabis sativa
aaaatcttattttggattcgtctcaattttagagaagcatgaaagaggtgagagttgtcatctccaaacttagcccaatttagtttagctttttgagtcatgaagctagcataagctttgctgattgttacatactctttcctggcatactgttcctgcaacatcagattctcattccccgggttctgattcaattcaccttgaatctctgctaagtgaattcgtgctgctgtttctgccttatgaatatcagagaaatccttcttgttcagttgttttaatactgcttttagtctcctcagcttatggacaattcgaaacattcttgtaccactactctcctcttcccaagccttagcaaccagattgtcatactcaggagccatcttccacatgttatagtacctaaatggttttttcccaaagttcttatcctcataaatagagactaagataggactatggtcaaaaatcatttcaggtaaaaaaacggcttcagaacaaggaaatacattcaaccactgcatattcaccatggctctatcaatctttgaaaagatccgttcctctggtttctgcttgttgttccatgtgaaaaaagaccctgaagattttaaatc

SEQ ID NO: 85096 - DNA, 527 bp, Cannabis sativa
tccagtaacaacaaattccactttggttacatccattcctttggatttctcaattgctaccatttcgactgctactactacttcaccaactttcacccacactgagaatagaatgtcatctattttcactaaaaggcagcatgtttccactagtggtaatgtgcgtactgtgctgaagagatgtcgaacaagaatgactcctttagaagattccaccaacctttcaacacatcaatatcctgaagcttcttatgaaaatactgatgtttcactgcaggccgatggtgatggtgctctcttggtgaaggctgatgttcagcctcgccaatcgtcatgaatatcatctcttggaatgctcggggcttgagcgatccgagagcattccgtcaattgcgtctgctcatatctaaaaaaaaacctgatgtaatttttattatggagactaagcttagtgtaggttctatttctaaattttgcaatgcctttaaatttcctaatggtacagaggtccctagaataggtcttag

SEQ ID NO: 85097 - DNA, 758 bp, Cannabis sativa
gaactcatcaacaactttattaataattatatatattatttaagatcaattttaaggagacatataaaagttgtgttatattttgattaagagtgtttataaaataactaattcaatctaattcacacgatctaattcagttcgcaaagtgtagatatccgcacttatgcggattgaattggattggaaaatcaaaaatttgtacttgtgtcaattgaatgttaattgacatgtaaaagtaacaatttcaatccaatctacatatatttatatatattttttaaaaattatatatacaattaatatgttaatataaaaaataataatttaaaattttaatacatatgatataaatgacaatttaatgtttaatataattatggtttatcctttaatatctagattttagaaaaagtagtatcatatataattaaaatttaaaaactatactacaataatgaattaaaaaatggacgaaacagtaatgtataagattattctcaaccttgtttctttcttactttataagagatcaattacatttagactataaaaaattatattacaataaaatttgtgactaaaattaaaaactctaattaattataaattaaactagtaaacacacaccaccaacaacaataataatctcttttactattattgatatttattttatttctacacaaattaaaatgtaggggtcttccttaaaggtattacgtaattgataattaataatgacacattataattta

SEQ ID NO: 85098 - DNA, 967 bp, Cannabis sativa
agttggctgatcttacagcaccatggccggccagcctggcctccattaggggcctggccagcctaggagtgcactacaggctttcctagacacttctacatgtggacaaaagtctatgggctgcgaattggaccctaaaagcccaacaaaatggctaaataatatctagaatcaagggcactttggtcttctataaatatataacaaactatatgaatgctaagagatttgaactgtaaacctagggttttaggcttcatacataaaggccttaaccataacctagaaacttaagttgcctttaacctagaaaccttcttctaaactctaagtgtctgataaactatctcttccttacttcctctctctcagacgcctatcctagcacatctcaatacttgagtcttgccagtactaattcataccttgtaatcctaaggattctatagcagatcccacctataatgatttggataatgtttcaataggtataatacaactaaaaggggagtaggtcattacttgctatcacaaggagacagaacctctataacaaatgttgttgtttattgcttttcattcttatttgtgcaaacacatggcaagcatcagatctgtacgaacctgctgctggttgattactttttgaggtcaacagtttggcgctttcattgagatcaaacgccatggtgaacacaagaagaactcctgtcgcaccatctgcatcttcgggtcttccttgagaccgacagattgcagatccaggcactcaggctccagtcacaactggaatccccattaatattgcagatgtggtgaatctcgtcaccacaacaggtgctacaagtctggccactacagctggccaaactgacacgagtacctcgatggatccaagtggcaggcccacacctccaagaggagacccaccattggcgcctctcactgaaggaaggacccaggggcg

SEQ ID NO: 85099 - DNA, 971 bp, Cannabis sativa
gagtagttgtatattatggtagatttgtgtatactactttaggttagttcaagttgctataagaggttgcgtgtgtgttgaaggtcctggattcgaatctcaaattaattatggaatgtaatatataaacgcttaaattaaaaaaaaaaaatggtagatttgtggtatggtagctagggttaagttcacttggtggtgaagaataccatatggagagagttcacactttggctatataagagaaaaaagatgagaaaatggaacagagaaagcatccaatggaaaaaaagaaaaaaaagctaataaacagaaatgtcattgactggtgcggcccacttcgatgggactaaaccctagctagtcatggacgagggagagggacccataccaacgtccctttctgtcggacatgcatgcatgcatgcctaataaccaccttaattaaatgttataatatgtatacatctcaataagatatatcgatatatatatatatagttttttattttatttttttgcaaaaataagttttggttcatcatctatttatatagttatatttaatttaataaataattgatttttttaattgaataaatcacgaattttattaatagtgattagctaaaataattgtaatctatttggtatatatctccccggacacgattagaattagaattaaaaaaaataaaataaataatcagtcgtctaattcttagattatttgactaaataattaaaataaaattatatgaaaataattgtaacatcacaattaattagaagaacacctatattctattttatccaccgctcagaagataaaagtagaaactattgcagtaggttcaacctcatagtttaagcactcaactattgtgtgaggtacatatataattgggcattttacaattttgtatacattattttaattaattacaaaatatgtgcaaaaaaacttattatca

SEQ ID NO: 85100 - DNA, 964 bp, Cannabis sativa
ttcagggggaatttttaacggctaaaaaagttcagggggcatgatttggtatatgtcaaagttcaggtggaaaaattgctaattagccaaaaaaaaaaaatgtagtcgtatgtacttatatatatcgtttatatataaatatatatacatatgactgactgcattcttaatgggtattgctatgaatgtgtaatattagaaaattttgaatttttatgcttaatttttctatttaattataaatatctctcatttttaaaagtatatatattggggttgttcaatccattgaaaaaaaataataaaaaaaaacttttccagcaaaaaaatgataaaaataattgagtttgacttaaatattttttatataaatatatttttgatatagtgtaaaaaaatgtattttttgatgttttctttaattaaatagctaaattaagcataaaaaaaaatcaaatttctcttttattattcgccatcggatcaaaatctaatgatttaatatttttattcttaatatttatagttcaatttatttagtacccattaatgataataaccattgagaagttttttatatatggacgtcatagagtgtttttagagttttttcaataggaaatgtaagagttgtgtcacatatataaaacatttaacataaaaatttattttatggtataattagggaactaatatgtcactagtataagaaaggggatttcccaaccgtttaaaataattgggtattgtatatattttatgatcaatgcttattcgatcatcgcaaaacagcgcaaaatacactacaagaatcatgggtatcatcaacggcactatcactgatatgtgataaagttctcactaggattcgtttagaacgtcgtattatattatatgttatatatatatatatatattaaattggattatatatcatatttttatataatattatgttaaattt

SEQ ID NO: 85101 - DNA, 804 bp, Cannabis sativa
  modified_base (747)..(766): a, c, t, g, unknown or other
tttttgtctcgtagtatgttgatggaattttgttttccttcaaaaaaaaaagattcaacaattttaacaattcatcaaatatgttgttaggaatctttcctcggactttcaaatgtaataactttgcttaaaagttaaaggaagaaatccaatggtgtccaggatacaatttagcttaaatctcttcaaataactcgttgtaatactgaaacgagtcagggttgtttttaacttctttagttgttggtcgaataaaatcttcaaccatgagaatcatctcatcatcttaatcatctaaaaatggctcagcaactttcgttcgtgcaacaacttttgtttttggctccccatggtaaatccacttttgataaccactatcaaaaccccaaataaataaatgcgcttccaccatatgtaaaggctgaaactgagtattcatgcatttaacacacagacacctattttttccatcaaaatctttataagttgaagccatctcaaacatggcttgtatgcacttccaatattctttaccacatttttttctaagttttccaagtcttatcaatcataatctaaatgtgttgtaagaatttatgagttttagcaatgtgagtaaaataattggaatcttctgctattttatgaaaatttgtttataatcataattatatatttctttatttattatttcacgatatttgtttattatttcatgatgtttattgtgttgggttttgtgccctnnnnnnnnnnnnnnnnnnnntaatcagatttacttactaataaagatcagaaataaca

SEQ ID NO: 85102 - DNA, 1420 bp, Cannabis sativa
aatgttaatttacgttttattaaacggtctgttaatcgtgttgctcatgacttagctagagtttcatggttacatgctgatcgtagctactcggcgacttctaccccgagtagcatttttaatgtaattgctcaatagatgatttaataaatttacatcttttattaaaaaaaatgttcaaaaatcaaattttccttttaaaattcattgaaaaagaaaaaaataattttgtaaaatttattttattcaccattccatgactccctgttactttagtaaattattcaaaagccatcgaaattattccccgttattattttccctctactacttctggaggagtcattttcttcttttcttattcctccgagctgaccaaaaccatttcaacagaggagagacccttcgccaaatcccagtatccaaaatgggtgagactgaggccaaaagaaaacgaggtcgtaaacccaaaacccccatttccgaaaacctagaaatcccacctacatcaacttccaccgccattgtccccgccactacccccggcaccacctccacacctgtattggacgatgttttctcagtcagcaatgtcgaaatacttgacacgggtacgcccactgaccgtcaccgccgccgtcgccccggccgcccacccaagaagctccccaagaactctgataagcccgagaagcccccggccaaggccccagggagacgcccctctcggccggttgaaaatggcgacttcgcgttatccactgacctggtggttggcccaggtttgggtgctgatcatgggatcaggtgggagagcgtggagagggtgatgcccgctatggattctgtggtgaaggttttttgtgtccatacggagcctaatttctcgcttccgtggcagaggaagaggcagtatagctcgagcagtagtgggtttgttattagtggaaagagggtgcttactaatgcgcattcggtggagcattatactcaggtcaagctcaagaagcgtggctccgacaccaagtatttggctactgttcttgccattggcactgagtgtgatattggtattcaaatcctccttattgcttctttctttgaaatatttttgctctctgtatattttttgtaagaacctatgtatatacatatattactgattgcttagtttgagtttttttaatataatatttttcccatttgagtaaattgtgagatagttggttgttcggtaatggcaggagtatctctctctgttttattgtagataggtaaaaagttgcaatttttccagatattccctttgtaataaatacttttttttttttttttttacaaaattattgaattttaagccaagttcatcagaaagattattagtataaccgtatatgagcaaatattcaaggaagtggca

SEQ ID NO: 85103 - DNA, 1255 bp, Cannabis sativa
ctgaatgtaaggctgataggattgattcagatacatcttagccaaccaaatcccaattatcctgaaaaaaggagctgctaaatccatccggaccaggggctttaattgggatactgaaaaactgcttgcttaacctcctctttcgaaaaatttccttcaagataaatggcttgctgactagaaacaaccggacccatctccaccaacttctttttgacctccttcctatcttgcattcgggttcccaggaggttcttataaaattcagtaaaggcttcagtaatctcagcaggttcttcaaccctttctcctctcatgttttgaatcgagaggatattatttttggtccttctttctctgatgtatacatgaaataatgcagaattactgtctccatcttttaaccatgatagtttagccttttgctgcaagaaagagcaataattgctatgtatttcagcatattgagttctcgccattgcttcttgtcgttgtagctcatcactgagcagattattgtgcatcaacgattgacactcagccagcctagtacaagcttggatatcagcttgttgtaaattagaaaaaccacctttgttcagctctctaaacaccggtttcaatgccttgagctttgacacaacttggaacattgaagtcccaacaatctttcccttccatttgttttccaccagaaccttgtattgtggatgagtactccacatcttgaagtacttgaagggttttcgaccacttggtctcttaggatgaatcttgagtagtgcaggggtatgatcaaacaacctttcattcgcaaaaaacacttcagccatttgaaatctatctatccatttctgattagcaagaactcgatctatctttgaataaattctatccgccccatcttgcttattactccatgtataataactcccactgtatttaacatcttctaattggcactgattcacatattccaagaaagcattattcccattatgtcttacttgatctccaattctctcttctttagctagtatgtcgttgaaatctccaaatagaacccacggatcagtcctaaacatctccttaaggtccttccaaagactcttcctcccttcctctccattaaatccataaataaaggtagcaaggaaagtatgtttatgatcagctgtagatactaaaagatgcacatattgacttccacatcttaaaatacttactgtaaagcccgcttagttaatttagaaat

SEQ ID NO: 85104 - DNA, 2273 bp, Cannabis sativa
attataatatttaaataattaagtctttgaaatatacttcatgatccataaattattacaattttaaatacgacttttaaaatatactgcattcataatcatacttcatgttagtttgaccggaaggtgggagattcatattctcgtaggtgagagactttgtgttacaccaacttaagaaaatcattatcatctaactggaaggttggagattctaaaagaatatctgaatttgtgcttctttttagaaaatttaaaaaatgctgatgattttttatttttttttcctaaaatggtaattttattcaagattgaaaaggcaagagtcatccatgttaagctaaaaacaccacaatctcaataggagatgacaatttgttgaccaaccacaccaatttgaatagaacaataaattcaagactcacacaagagcgcacatactaaagaaacaaactccccatgaaaagcttaacaccaacgccattaaggacttaaagtgcaccgaaagagctacaagaactaaaataaacaaaccaaacaaaaatatatatataaaaaaaatataggaaacaacgatcaaaggtcattcccctaatgcaaaggaggcaacacaatgagccaaaacacgcaaatacaaaacagaggaatgttgctatcttccaacgagaaaagtctacactcaacattctattgtgattctgaatggtgaaggtgttggaacaaaggaagcacatccctttgggtataacccgagtccctccctctacatctacagcactctgaaagctaatcacgagtcactgtgcactagagccaacatgtttgaatagtaacccaagagaacacaccaagatctgaaataaaaagaagaaaaataaaactctgaagcctaaggtcacgcctgagaagagccaccgccaaaacgccatccctaaaatctaaaaggagatagccagacgaagcccaccgtcacctgctcttaccatcccaagaaataagagatacccacacccatcactgttgtcgtctcgtgcgagacgttcagccaccagccaccagccgtggccgaaaaacgcaggtaccaccgagcctagggtcatatttcaatccgcactattttgctcatagtgcatctgatctgcactaagtgcaaatgttatattttggatccaatccaatccgcacaatagctcaaatccaatttgatccaatccaaaaaagtgcggatttgatcggttactttgaattgattactttttaataatattaagttactttttaataataatgttataaaattgttacaaattattatccatatatttgtaatttattactttaagttatattttttaaaaaaatatattaaaaatataaatttttttaatttgtgcttatttaatttttaatatctattctatataaaatgtagctatgtaacaaaattcttggttgatcaattgtttacttttatttaatgggaatttaatggccatggcgaccacatgatctgacttgtcgggagtgtccttttctctagcaccacctttagcaagttatcttgatgataatctttcagtgtgtactaaggatcatcttttgaggtctctcgaggatcgtcatcagcatcattagaactgtttatttctgagtcaccatctccaaatgcaggagcgtttagatctgtatctttgccaacttaattcttttgatgggtagttacctcattctgatcttatgcatctcttgtcttggtttaagatcaataaagtgaagaccaaatttgttacgggtgagtaccatgactactgtgatctttagatagtatcactgcttccttcagctctcaatgaaagtaccaagatatttatcgagattttcaaaaaatcaattataaataattagaactaaagaaataaataatttaaagagaaaaagtaagaacaacacacaaaattttacgtagttgggcaacgaatcttagtccacgagtcgatattattacataactaaagatagaaaagtttttgggaatacaatgagcgtaagtgttctatttttcctgagcaattcttgtaagagaattattcaacccttagtctgaaggattcattaggtatctatagtgttaagagtattacacttaatttttctttttctctctaatgaggagtttacattgaattatataattgagatcatttcacaaatacaaaaaaaaaaaaaaaaaaatacaaaaatacaaaaatacagtttcacggaattttaaatat

SEQ ID NO: 85105 - DNA, 825 bp, Cannabis sativa
gaagctctacgggtttggttctcatgctcacgatcatgaccatgaccatcaccatgaacatttcggagttttacagcttaccggtcctggtaattccttcaatttcattatactcgtttaattagttttggttgttgagctactctgattgataattgtttgtaattaatgcactgccgtggtttttttgtttttgttttcgggacattactttgttgagtaagagtggtccatttttggattgggaagttttggctctcaacctggggaatcaatggagatttaattcgtttgttgactttagataagattgagttcacattttcttttttgagtgttgggaggtttaaacaataattgtatatttttctttgaatttgaaatgaatcattatatacttgagcttgaagtggtagtgaatagaaagtgaatttaattccatagagttgtgattagtaaagtttagcaattatcttagtagctggatgtttactttgctgactcaagtgatattttcattcaatgaacaaccagtgatggagctagaatttgaggtgaggtagggctatttataaatttaaattgagtgctgcttttatatgtttgcaacctattttgaagtgtaaaattttcacataaaccaaactttgaggtggggctaaaagccttgctggctccatccctctgaacaaatctaagtcacttaattgagcaagattaagatgcagagtgatatagatcttcggtgacagaaatggcttaacgatatgctggcctgcaaggttattagactcaaacggtacaatatagtccatttgctgatat

SEQ ID NO: 85106 - DNA, 580 bp, Cannabis sativa
ttttttttttttttcttttataatatatatatttctaagagtgaggacctcaaaatttaaatagcctttggcctatatattcccagggtcagccttgggtctgggtccaggtccggagttcgggaccgagaccagggtaggggtctccgaccccagaatatttgtaaatattataatataagctattagggatcacttaaataatacgatccatattgtgttaaaatttatggctgtaataattaatacaactataatattttatttaaatataatattacttgttatttaatataattcgacatgtatgctgcctaccaaacgagtccttatagaattatatgatataataagatcgatgaaaagaaatgtaatgacataatagaaacatgatgagaaaaatattaaattaatgatttatcttataactcccacgttaatgtttatatgtgagtaatttgtggtatttatattacactcaatagttactaaagggaaatttgattatatatgcatactaatggaaaaaattattttcctaaacttatgcatttcaaaattaaaaaaatatgaccacttt

SEQ ID NO: 85107 - DNA, 534 bp, Cannabis sativa
atataaaaatatttttaattaatggatacagaaaaaagggataattgcgacaaaagttctcaaaaatttaggattgatgcagattagtcctcaacctcaaaaattgacagtaatagtccctaaggtcacattttttggaagtccgttggtccttaactgatttgtcaaaccttaataaaatattacatgttgatatattatttaataattttaattaaaaataatttaaaaataaaaaatcattatctaaaattaaaaatattattttattttctatattttttttctttttttttactgtttctctcgtcttcctcacctcactacccaaccactcaccaccctaaccttcacccgacccccatccccattacccctccacacagtggttcaagcttgtacttacaagctctgcgattatgaaaaccccaacccaaaaatatcgatccccctctcagtctctctctttctcctcgttttttttctctcttttcgtttcttattggccggcattgacgagctgtctccgaccat

SEQ ID NO: 85108 - DNA, 987 bp, Cannabis sativa
gacatttaccctcgttatctcgtgtaaaaatcacctatagcgactggaaatttgatcatggttagtttttattagaagatccctaattttggcatcgtttacctcaagaatagttttaggtacatatgttttggactcgaatggaagggataaatttttaggacaatcgatctctaagaattaaagggttgtaagttctcgattaaattgggtcatacttatgaacgtatgtaataccaattactgaaaaaattaaatacaacataacccaggaaactatgaatctaatgacctaaaaattttctttaatcttaaaattatccagaaaaacgaaacaaaaaattacctaaaaattaaccaaataatatagataaggggagcaatcaatcacgaagataaaactacaaatatagaaaagaaagacattagaaaaaaggggagtgaaccacttactattttgctgaagatttttgggtagcaaagaattctgcgattgagattgtgatgattgagacgatgaactctgagagtctctaagattaaagatgaaatctgatgaaatacacatgaagtaggtcaacgacagtgagggcatgcaaatacggaggagaaaagcaatcagaacaatcttttgcagaaaaatttgaaagtttgacaagcaaaaatggtgaaaagagttgttactttcaatttttataccctagaattgttcaccattagatcaaaagaaatctgatctaacgaataggaacagttcagatacgatgagacaggtgatttaatgctaatgatatgcctcaaaatcctgaactgccaaaattcaaagcatgcaatttttcaaaattgggtgaagacaaaaatactgttgtaatcatttaaaagttctttttattaaaaaagtacattttatggagaaattgttatacccgaaattcgaatatactttagaagttgacacatgtcctacagaaagaatatgaatcaact

SEQ ID NO: 85109 - DNA, 594 bp, Cannabis sativa
aaagaagaagaaaagaattaccaattaacaatgctatcactattggaaaaccaacatctcactcatgggagaaagccagaaaaattggtcatatatatacataaattcttgtactacaaaaaaacagttacctttagtgacaatattttagttacaacataattttttttgtgactaaatgtgactattagtcacaacaaaaaattatttgtaactaaaacatagtatttagatacaaattatcactaatttacttttagtcacaacaagcatatatcgtgactaaaaacacatttagtcacaataaattgtaattttggtgactaatacctttagccacgtaccttttagtcacaatataagaatttaatgatttataattgatcacgacttttttacttttagtcacaaattttatgattaaaagtaaaaatttttgtagtgtagtgtacgatatgcatgtttttaattaggtaatacatattcaatacatctatatatatacatttacaatatcaactaatatttatatatatttatttttttgtcacaaggtcaacttttagggtttgatgatttcataccaccctttgc

SEQ ID NO: 85110 - DNA, 526 bp, Cannabis sativa
taagcgaatcggtctgattctatctcaattgttacattttaagaaagtaagaatcctacaataccaattaaatcactcgttttaaattttattgaagaaacacttttctcattatgaatgtactaacagaaattcaattattcaatacgtaatctacttacactaacagtcaaattagtaatttttcttacacatcgtgtccatagaattttgaaaaatcaaattgtttgggattcaaaagtgaaagaattcaataaagcaataactcgtaccgttttgcaactataaatttacacttacaaacgactgaattaaattgtgcgaccataaatgatcattatagtagcaaaaacgactatatatttacactatgtaactatcatagtcgcttattttataaattttagatttttttttaaacataaattttagtatttcactttgagaaatttcacaatttaaactcagcacagtataaattcaatatggtaatttcgtaaagtttggaatttcccttacctggaga

SEQ ID NO: 85111 - DNA, 534 bp, Cannabis sativa
gttaaactttttcgaatttcttaatattttgcaggatgtcttaaataactagaatttacatgactgtgagaaaaaatttgtctaaaaaattatttcggttactaaaacagagagagatatatcggtgtatcctttttaaggaggtgcattatagaatttccctatcttatttataagtgctctaaacatgcttaaataccaacaccattttttttatattgtagactattttaaatttctcaaaattttacaagatgtctcaaataattataatgtacgtgactataaaaaaatagactaaataattatcctgataccaaaaaaatagggatgcaccagtacacatcttttaaggggtacattgtaaaaacacctaaaactattttgttgagtctattatatcttatttataagtgctctaaacgtgcttaaatacgaacaccattttttatattgtaagctattttaaatttctcaaaattttacaggatgtctcaaataattataatctacgtgactataaaaaaatagact

SEQ ID NO: 85112 - DNA, 539 bp, Cannabis sativa
aagaccctatcccacctaatgcagtgtgcaaattacaaaaaagcttatatggtctcaaacaatcttcaaggcaatggtacgccaaatcgagttctcatttattacaacaacaattcacccaatctccaaatgatcattctctctttattagacaccaatgaggtgtttttttggccatcctcgtctatgtagacgatattattattgccacaaataacacccctgccttaacccagttcatcacaactcttgatgcacgttccaaattaacagatcttggtcctctctatttttttctcgatctagaaattgcacgatgctctaaaggcatttcagtgtcgcaacgacctttcacccttcaattactcaaagattctggctgtcttggctcaaaactagtttccactcccatggaaccaaacattaaactcaacaatgactcatgggacatactacaaaatccaactcaatatagaagcatcattggcaagcttctataccttactatcacacgacctgacataagttttgccttaaac

SEQ ID NO: 85113 - DNA, 594 bp, Cannabis sativa
ataaaaacatatacattattaatttaaagttcactattaaaaaataataatataaagttagaattaataaaaaataaattcaaattaagacaattacatgagtaatattacatagtgtatataataaatatttctaacaatactttcaatatataagtccaaccttcataactaagtaaaaatttgcacttacaatacacaagcctatcctccatatgtataaaaaaaaaacagttaaagaagagaacaagaagagagtaattaattaaaaaatacaatcttagaaaaaaaaattatacactaaatattattcctaccttgtagagaggagcaaggagtccgtggaacaagcaggtgaggaaaaagtatcgacttgagccatagacaatgttcaaagggcatatcataatcatagtaacaacctgcagaaagaaaatcaagtttttcaaaacaataatttttatttatatgatttagtagagctgtaaagaaattaatacagaagtgggaaaagctgagttagtgctttgtaatctagagttcttgggtctgtttgcatgtcaagattttaaagaacacatttgacacttttta

SEQ ID NO: 85114 - DNA, 1117 bp, Cannabis sativa
tgagaaataatctcattgaaatctcctaggacgaaccaaggagaggagggtgcaatatcaaaacatctacgcaataatgtccaaggaagatgtcgttgagaagcactcggatgtccataaaaaccagtgaaatgtaaagatggaccatcatgactttcgacaaaacaatcaatatgatttagagagtaattattaatagaaaaagtaacatgtgacttccaaaggagcataagaccacccccttgcccctgccgtggaacctcaataccattaggaaaatgcaactgcttacgaaacttatctatactaccatactgtaatttagtttccataatgaacagaacacagggagcttgctcatgaacaagcaagcgtaaatgcctgaatgcactcgggttccccaaacctcgggcattccaacttacgaaattcatggttgagcgcggtgttgctgagcaacaaccgctgaaatttcaggcagagactcatctgaatccaaagtattggaggtggaaacaggaggagccatggagaacccactcggagctgaagaatccgattgaatttgaatagcattggaacgacaacgtttaagaacatttcgaagagattccgaatcaatttgcctcttaaactgcttattaggattaaaattctcagagtcatcttcagaaatgagaatagctttgcctttcaagttttgtgaattagtctgagttggaatggaagaagtggtggacataatagtgctataactcagaggcatcgaagaggatgcaacagtggcaaaaggagtgtgaggagatggcttaacagagggagtatttggtgggtaagtggctatcatgggtgaaaaaggtaggtatgaagggaatggaataattgggacatcattaatggagttaatgcaggagtcagataatgttgtgggagatatagatgagggagtggatggtgagggaacacgcaaatgtgatggtatgtttggtgatgatgatgtttctctatgagtcatattaggaggcaaaggcagaggtctcttggatagtgtaggaatggctgattcaaaggacttcttagcaagtctagtcattaaaggccatgccccccccccccc

SEQ ID NO: 85115 - DNA, 1091 bp, Cannabis sativa
ataattttgaaaataaaatttaaattttaaaatatcatatatatattaaaaaaataaacacatataactaaatatttaaatcatatttttagtactctatatattattaaaaagttacattctataactgtaatatatgctccatcattacaaaaaattgttatttttaaggacaaccttttagtcacaatataatttttttttaactaaatgtgacttttagtcacaacaaaatattacttgtgactaaaacatattatttagttacaagttgtcactaatttaatttaaatcacaacaaatattgtgactaaaagtacatttagtcacaacaaattaatacttttagtcacggaccttttagtcacaatacaataatgataatttataattagctacaactttttttatttttaatcataaattttattatgactaaaagtaaaatttttagtagttcagcatatatataaaactactagaaacctaaaaacctctaaaaatagtaggggtgctcttgctataaatttgttcatattatgaacaatttttttttttaaataaaaaactaagagcactttcgacaaaatctctacctttttttaaagccaaaatcaataccttattgtttagaatatttcacccaaattttatgttttttatttttatcaaatttttatatcttatagtacatgaaattttctatttttttctctctatatatcattaaaataacatatttttaatatgtataatatatattaaccaaattaaaatcaataaaatagtagttagataataataaaatatttttaaatcatgaatagtggttctagctagccttctctaaatttttctttaaaatacatatctagcattggttttacactcttattcttcgttttaaagaaaattgcttccttttttaggagctaatgtgagttcatgaattgtgaatttgtgagtgatctaattcatgaacaaatatttgattaaacaataccgaaacaaaaatagtattattattattattattatggcttgacctaagctttagctcattctcgatgtatgaatgaaagaagtctatt

SEQ ID NO: 85116 - DNA, 2349 bp, Cannabis sativa
  modified_base (213)..(217): a, c, t, g, unknown or other
  modified_base (2302)..(2312): a, c, t, g, unknown or other
taaaaataattcaaataaacctagatattttaaaattatttttcattttaaattttaaaaagttattttaggttgtgttcacgagattttcgttaatgattatgagccaattttcgtaatagatttcacagaaattatagaaatctaagaaaaataatagaagcaaaaataacaccaagtttttacgcggttttgcagttaactctgcatagnnnnngagtcaatcttattcagattttttcggtacagaactagggttctttacaatcagtgtatttctttttctctataagattttttgtcccctttttcgtataatctacccctatttatagtaatataggttggcagttaattacatttaagttcaaatcccgtaacaatattcctcgaaattgtgggctgtcattatgctccacgtaaataaatgcagttattatttgaagatcacacaactgtgatttaaaccgcttttaaaggttcaatgttgatgtggattaacacgctgtgaaacgtatctcgctgaggcgcctcacttggtacatgaaaagcttggtgtattcataagtcttccagcaatggcatgaccaccagtgtactaagcaaacttaagaactgctctttgacaataaggcattgcagactggacaatcatgtccttcaagttattacacttagttactataatgtatattatacactaagttttttaataactgactcgcctcatcaatgcctcctcatacatagcgagaaggatgtctcaccatgcgttatctatgtccttattgggattatgccttttgatgcgaaatggtttctcgtcaatacgtgaatcaatagtttgtacatccttgtctcgctaaagactatgtagtatgcgattcataaatatactttattgattttgcatttaatgagttattccatttaataattattgatataattatcaataaattcgttgattcatattccctgagattgacacgtctcaccttctgaagtaccaggcgaatttcaggtataacaattgccccttaaaaagtccttttcaatgaaagtgctttttaaatgattatcaagggtatatttgtcataatccattttgaaaacatgcatgcctttgattttggcggttttgtggtttagagggacatcattagcattaatgagccatcctttccacttctcttccattttcattcattggatcttctacgttttgatctgacggttactaagttcaaagtataaaacgggaaaggatccatttttcaccatttttaccttttcaaaaaactcaagctttttgaaaaaatttcctcacagcttttggaaatcgtgcatgccctccttgtctttcacattcttcctacgaatttactcagatttgcttttcgacttcaggtgttcaaaaaactcatcacgccgttcatcccgtctccgtttgtagaattctccaccactcgactactcgacttcatacagtaagtgtctaatccttctcctttttttttttttatttttcttggttatgattatcttacatcttgtcactccatttggtttggcgattcgggtttacattttctgggtaactttaagggtttaggcataatttaggtttatcatattctttaagcctctgatttattaaatttcatccaggaattgcgattgttcttttgtagaaatgtcccaatctggtcagaagtttattctccagaattcttagagacagaatatcctaaaaaattagctctcccattcaaacccagaaatttccaacttcggtccaaattagaaatgaatgatgccagaattagagaccatctgattaagtcgaaccaagaagaaattttgccagtctttttatatagaggcgatttctacaagagatttctaagggaaaacatcgttttttcgagatgcaacctagcctgaacccacaatattaacttttattccactcgcgagaccagtatttttacccaaagtcactgttgcttttgaaccaggtgacctagagttttacattatgtctccttagcctcgcaaatcaaagtgtaacgtccccgcttgaagcctccatttttgtaatgtccctgcttgaagcctccatttttgtaacgtacccgcttcaagcctccattgggtccttatacccacggaataatggctcttatacacgagtacgtcactttggatgcttcatggattgactactgaccctaaaaaccaaaacgaatgtttccagcgtgctttgtcctcacacgcactgtaaagcccgcttagttannnnnnnnnnnagcagttgtttatgtttaatcatggaattatttatag

SEQ ID NO: 85117 - DNA, 502 bp, Cannabis sativa
  modified_base (107)..(135): a, c, t, g, unknown or other
aaagaaatgctaaaaaatatctcaacattatttagcatattatatcactattgttataattaattatcctcttccgtaaaatataaagtaataattttgtaaattannnnnnnnnnnnnnnnnnnnnnnnnnnnnaagtagtattagacaccactaatattttataacaatgttcttttatataataagtcccttcttttttcttctcgttagtgctaacatcacatgctttatcataccttgattacaattattttttttttttctttttaatgactcgaggcaactactcaagacgactagatagacccgaccaccaaacacaagatgactcgagagagatagctagttgagcaagagcatgagcagtgatattattagcgaattacaataagacaaagtgatattggaaaattacaattttaaaaatcaatgatttcaatataatcttcaaaactaattatagcatggttgttcatcaaatttatgggaacatcaaatg

SEQ ID NO: 85118 - DNA, 566 bp, Cannabis sativa
attagatggtatacttattttattcaaatataatatatagttacgtctttgttaataatttataaaagaaaggaaaatgttacttttatcttatttatctttttttatataaaaaaaatatgtgtttccaacaactcaaaatatagtttaaaattgcaaaaagaaagctaacctcaaaatatcttaaataataaaaaaaagcatataatatagcctaagaattaaaaaaataaaatcataatttgaaagttctttgataaataagcaactaaatgtgtatgaaaaaaattatcttgaaatatttgctttttaataaaaattaactaatagatatattattcacatcgaaagcaactaaaatgttgtttttttttaaaaaaaaaaaaaaaaacaaacttgtgaaacactgaaatttctggaagcaagaatttttaagtattttcccttttcgataataattttgaatttcgatatttatgctaacgtggcacatcggtatttgtgcaaataaatttgttgaaggtatttttgcaaataaaataaattttaggtatagtgttgaaaaa

SEQ ID NO: 85119 - DNA, 786 bp, Cannabis sativa
aacagtaaaatcccaagccttttctctattcttagagtttaaaaagcttgttgagaaacagtttgaactccccataaaaactgtccaatcggactggggaggtgagtacagggtttttgataagtttcttactcaacatggaatctcttttcaacatccttgtccccatgaccatgagcaaaatggcagggtcgagagaaagcatcgacatatcacagaaactgggctcactttgcttgttgaatctggtcttgacttaacacactggtggctagcttttcaacatactgtatatgttataaataggcctcctacacttgttattgatgatctatcatcctatgaatgtctttttcacaagcagcctgactacagctttctcaagccttttggatgctctttctaccctcatttacggtcatatcaatctcacaaactagaaattcgattagaaaaatgtacatttgtgggatattctatgtagcccaaatgttatttgtgcagaagccaaacaaggagaacatatattgctcgaaatgtaatctttaatgagcaagaatttccaacaaaatctacatcaacacaccaacaggtaaaaccttcaccctccatactatttccaacaacttccttctttactactcctatggaaaatattttaactaactcaagtactcctattgttgatacacctactgctggtgatgttactgcaagttccacatctctccctactcaatcccagcaccctcaacctgcactagctgcaaccatcaatgagccaaa

SEQ ID NO: 85120 - DNA, 612 bp, Cannabis sativa
aaaaaatatttaagttaaactcatttttttatcttttttttttttcgccaaacaatttattttattatttttttttttcagctgacagaacaatcttagtccatataatttaaaaatgagagatttttctaattaaatacaaaatttaagcataaaaactcaaatttacttaatattacccattcatgggtaatacccattaagagtgcacccatttatatttacattgatcaaatcgttaaaatttgtcatagggaactatttttatatcattttaatgagtgttatttatcagttataaaaaatgcttagttgtattcttttttataaagttttaagaatgattttttagtaagaatattagaaaattgagaataaatagttaaaaaaagtgtttagccgtatgtattcattttataaggttttaagaatgatttttatatgtttttttttagtaaaaatattaaaaaataagaacaaatagttgttttaaaaaaagtgcttacctgtatgtattctttaacgttttaagaatgatttttttagtaaaaatattagaaaaaaaaataaaaaaatagatgaggaacttttaaacaattttagaccacctta

SEQ ID NO: 85121 - DNA, 1761 bp, Cannabis sativa
  modified_base (144)..(150): a, c, t, g, unknown or other
  modified_base (398)..(400): a, c, t, g, unknown or other
  modified_base (426)..(429): a, c, t, g, unknown or other
attaaaattaaaatatttttaaaagttttaatttcattcttgatacttaaatattagttattttaagaatttttaattaaataaaaaattattttaagttggaaattttaatttctgaaaaacttaagtttgaataattttcannnnnnnttttattttattaatcattatttccaaaattttcgaaattggattatttaaatggagataattttgaatttttttttcgaaaaatatattaaattttgaaattaagttttaattaattttagaacaacttaaatcaattagatttttcattagtgatcaattaaaataaataggttaaaatatataatattttaattagaaaataaagagattatttagtgaaaatctagatagttattttctgtttnnntgaagtatttttctagttatatttannnnaatagaaaattaatatttaagagaattttattcatgaaacttaaatatttaataattttcttaatatttaattaaataggaaaattatatttatgttaaaaattaatttattaattaattttggagcaacataaattagaatatttttttatgatttattttattttattttaagaaatttcgaaaatgtatttattttagggctcttttcacttttgcatttttaatgaacttttttttttcaaaaatacgtttatattgagaattaaccacaattagattatattttgcaaaaatacgtatttaggctttcatctctaccttcaaccttcaacgtatatcttatacttaaccagaggccgaagaaaacctccattaacgctgaatttggagttgcgccagtcgatccacccgcccccaaatcatcgcctatcctaaagaaaaaaaagaaaacgaaacagagctccgttgcaatcatgccaaagttgtcggagcttagctctccgatccgtccccaaatcattggaatgtgagtttcaatcactcaaatctctcccgtcaaatccaaattaaggtaagaatttcaattacataagacttctgtttccttcatttccctatgtttatctgcaatctccattccgcaatctccatattcttcataaatataacattcattttttttatttaaaatgaccaccatcttatctatcataaatctcaaatcaaaattccaaattaaaaatggtctttgttaggattattaaaaaattaatttgatttgatttgagtcttttattggtttgaatgggactgtgattgttcggcttacaataaaattgaaagaataaacctgaacaataattgggagagagtgttataataatggggatgtttgcgaaggtgtgtattaaaagggtaaatagctcctgaattgcttggatgtttttctttttcagtcataacatttcttttcagctactaccattggaaaaacctttgttcttggatcttgaaaacctaaggtaatcctaatatttatccctattttttattcaattatcacagctggtttaacatttctgttatattgtatgtccaaatcctcatgctatgttcaaattcttcaaggaatttcctttgttatgtgcttctccagtttcatcatcaactaaccctctttgaaccttaatttatagtatatgtaattaataattggtattactatttgttatcacaaaattgatactctgacgtggcatcacgagaatggtgacacgtggactccacttggagcatctgttcggaacgatatgccgagcaggatgcctc

SEQ ID NO: 85122 - DNA, 3428 bp, Cannabis sativa
gaaaagaagtagaattgtttgtttgtaactgcttggtttatttggttcaacaggaacaaagtgttaagaggacaacctcacgatcagactcacgcaatccttgatctggcgcactcttatcttgcggagtaccaagattcccaggcgactccagtgcaaatttcaagagcgcggaacaatccggtctcctggtctcctccggcgacaggactcctcaagttaaatgtggatgctgcaatctcaaagatcagcaggaaagtgggttttggtgggattatcagaaatagcgatggtttggtagtagcagcccttgctcaaccttatattgggggaggagctgtcgctactctcgaagcaaaatccctcctttcgactttacggtggtgcatagacgagcatttcttggttcaagaaattgaaacggactgtaaagccattactgatgcactagctaataacaaggaagacgtttcgatttttggagatcttatctgccaaattaaggaagccttatctcttatccctaatgctcggctctcccatgtcaatcgtgaggccaacgctcttgctgataagctggcacatcgagccttggggttagatgaggttgcgatttggataggcgatgacccctgcgaccttcttgagttcctttctgtttagtgggcaccctttctttcaaaaaaaaaaaaatacattacttctctcacaatatagctacacatagatataaataattcttctttttcttttatttattaattttgtgggggcttaaaagaggaactatcatgaattaaaacacggttgttcaaaaagtgggtatgtcttagtacatacgaaaagaaatatgtacattattattcaaaaaaagaaactccatgaatacacgtaaggcacaacaataaagatacaaaatgtgaattttccatcacagtaatgaaagtactgtcacatttttaattcttttattgagtgtgactcagaaatgaatatattttatgtcattatgtgaaaacgtttcatcatatattcctaataaattatgggacaactagaaacattatacaaattcgattctcttattttatattttgggtaaggtataaggtttctatcaatattagaaaaaaaagatacaaaattaaatggggtcatcaaatcctgccttcacttgcaattttcatttcagttaaatgacactttccaaactgtctccatttccttttcatttttcaatccacttgtccatttgagctgattcaaattcaatggggttaagtttttgctaccttttctaatgcttaatcacagttcagccctggaattatcaaattgactgagcataatggcaaaatccataccctgtaccatagtaggcactgctgtctcgtaagggcagtcccgagaaaatccaacctttccagacttgtgtactttcttaatgcagctcttgaacttttcatgacatttaatatttgtcaaaccttaacaaaccaaaaaaaaaaaaaaaagaaccaattgagccaccgaggaaaaagagcaagttacttaatataacaaaaagaaaatagagaaaacccacgtaaaaaagtatcaaagtataatattcagtacaggagtttctaaaattttatactgttgcaggaaaaaatagagaaaatgatagaaaaatcggataaaataaatcaaatcacagggcttattcatgctttcatgacagtgggaaccataaatgaaatacaaaacaaaataaaccaataaatagcaattaaagcaaatgagttgactaataagaattaattgaaataagagaagtccatgcaaatagagaaattgccaaagggtactagtgtttactgtttagtgttgcaaattgctattagtaaagtaatttgacaccagttccacatattttaattttgtagagaatagcacattttatagtgattttgaacaagactgatagtgatacctaataataaaaatgctcaaaatcaaatcaccaaacctactgaggccatatttggtttaagttaggcgaaacgcttaactataattattagcccactatgcagtctatgatcacaattcacaagtcacaacttttataaactattgtatttgtcgttttcctcaagccaaatccacaaaattagaaattaacaaaaaaaaattatattaaaaaagaaaactaaccttttttggtgacacattcatcgtgaatcttacaacaagcatcaagatcatcgcatggcttctcaccagggcagccagtccaccctactccgcagaacttcccgtatcgaatcccaacagctaattgaaataaaattatgagataattagtagttaccaaaacacatttatgtataatttaaatatttttctaattaaaaacgaaatctaagaaaatcgacataattactcacaattacaattctctgcaacgcagattttgctgcatctaacctgtccatccaataaacaggcaaacaatttcattttcattacgctacaatgacaatgaggaagcgtctctaagtctaatgtgtgcttttattttacgaaaaattaaattagatccaataaaatttgagtggttgctaggcttccaaacaaacaggagccagggaagggaagtttttgcttgttacctcggaatcattgttggaacaccgagctcctacggtaaggaagatgaaaatgaagacgatagtgaatccagaaacgatactgagacgaacgccatgcatttttcgctcgctttttggttctctttactcgactcgaagaagacgaagctcagaagggagttttctgtaaattacacccacggcttcgtcacttgtagtttttatgtcgttcattttagttccttggatttctagctccctttcctattggtcgagattcgtaattactcatttgaaattacaatagtaccctttagggtctggtgttttccagttccgtgcagtaacgtggatccaattctggcctgtaactgtgaaagggccttttctgctcactgtatttagtgggcttgcaacaagagtttcggcccaaacgacaatataaactaaaacccaacatagcattagtagctattaaattaaacgacaatattgtttttatgaaccattaaacgacagtattagcttaactttttttttttttgggctgaatttccatttctaattgagtgctataaaattcatttttggctatatattagcatttttcttaaaaagaatacagtattacagtactattacaaaaagtgtgccaaaatatgacacaaacaaaaaatatgacaaatttggtacaaactatactatagattaaatttatagataattatataaaatattaatttttgtaaaaattacatttttatttttaaaagattttttttatatatatat

SEQ ID NO: 85123 - DNA, 602 bp, Cannabis sativa
tgattgttgtttttgggatggagtgtcttgtgatcaacaatctggtcatgtcattggccttaatttaagagatacctatcttaaaggccctcttcactccaacaccacccttttctcacttcaccatctccaaactttaatccttgatcacaatgatttctatggatctccaattccatctgagtttggcacctcctttcccaacttgacacagcttagcctctttaatgccaattttagcggttacatccctgtccaattatctcatctctctaaactcactcatctcactgttgattcatttgaaggtgatattattcagctggagacttatgtgttgaaaagaatgcttcaaaacttcacaaatctcatggaactttctctttctttcgtcaacatgtctaatgttgaactagttacttctttcaccaatatatcatcttctttggagcttctttatttgaccttttgtggattgcaagggaaatttccagaaaatgtctttcgcttaccaaacctccaacatctcagtttaaataacaactatgatgttattggttccatgcctacatttaattggagcactccactcaggtacttag

SEQ ID NO: 85124 - DNA, 798 bp, Cannabis sativa
actccatatggaaggtgccaaaccttctccaaatccaactagttctacacgaaagctctctctgtctgaaggagagccattcctggatcaaacattgtacagaagcacgatgggagccttacaatacttaacattaactcggcctgatgttgcattcatcataaacaagttaagtcaattcatacatgctccaacaacagttcattgggaagcctgcaaacgattattgagataccttaaaggaacaattcatgagggacttctcatcaggcctgccccacaactttgtcttcaagtatactcagatgctgattgggcgagttgcccagatgaccgacggtccacgggtggttatgcaatcttctttgggggaaacctagtatcgtggtctgcaaaaaagcaacctgtagtggctcgatcgagtacagaaagtgagtttagggcccttgcaaacacagctgccgaactacgctggctatgctctgttctcagtgaactaaaggttgatttgcctaaaccaccaattatatgggttgacaacttaggagctgcttccttagctgcaaatccagtgtttcatgctcggtcgaagcacattgaaatcgatcttcacttcattcgtgaccaaattctagcaaaacaagttgaagttcgatatgttccttcatgtgaccaaacggctgacattcttacaaagccactgtccacggatcgatttcattacctcaagcacaagcttcatgtgtgtccaacaccctttcgcttgaggggggatgatacagttactactgtttctaa

SEQ ID NO: 85125 - DNA, 1115 bp, Cannabis sativa
ttttaattccatttaaattctaaaactaaccctactatcttcctataaatagaaagagaaggttcttatttttataacttacttcaaacttttttgtcagacaactagaaaataaagagagaacatcttttattcgaattccttcttctttctcctcaaatattcgaagcctgtggtgaattgagagtatgcccactcatgtcaaagcaatacttaacatagtgaggaagactgtgtctaaccaaattaaaggagagaagatccaggttcaaatcttgataatactatgctacagacagaaatcaagagctagaatctaaatggaaggagtcattatatttcgctgccataaatgtaagaatttcttaatttcttatgtgtttatttcattattttagaaaatttatatttaagatgttaaattataatttagaatcaacatacatgttagtaaatctagattctaataaaataagtttcaacaactagcctcagagtcatggtaatattttattttcatgaaatatagatttaaatcgatgtttagttgatttaaatgtgttcatgctagtttatgtgttaattgataattgaatgtaaattacgaatttttttttaaaaaataattttattttcattctaaaaataatttatttaaatttcttataaaaggttaagtaagtttagtttttatagaactcaattccaattaaaaacgagagatgagatgaaattttaaaaattccactgcattgagtgttgagcacctccatgcacacgcaaagataaaaaaaaaaaaaaaataatattcttttcaggttcaatccttcagcccaataaggcctccaatgaataattaataagaaaattacactttatatttattttttttatttatattcaattttgtaagtaatatttttattatgtaccttaaaatttttaattttaataaatcaaataaaattacatttagtactttaattataaaaaataattttaaaaaattatatgtaatgggtataaaaaacaataactctcaaaacttattacatgaatgatgatatgatcttcacagggcctattcgtcacctacaggaatattaatcattttt

SEQ ID NO: 85126 - DNA, 1125 bp, Cannabis sativa
aactccggagttccaagggtctccgatcgcgatttcgaactcatacctctgtagaacaatattcgtgagttctattttttccaaccattacttgttttaaatatatatgatcattgaatttttctcaagtggagaatacttttgttccacgttaagcaattgaatataattacgtttaataatgtcgagtcaaaagggaaagaaagctacgaaaataatgtcatgatgatatatataagtactggtacacagatatttatatgtatatagcttaattttaaacttcaaggtcttatggtcatggaattattaagaagaaatgttttatttctctttgatctgtatgtttgagtataaatatttatatatatacaaaatgtccatcagtttagtaaattgattcatgtccatatttctctttctttattttgttgtttttaggttaattaatttgtactatatatgcttctatactgagtttttttttttttttgaatgattataatcttggatctcactttatatgataccatgaatttcatgctgatcgatatgactatatctatatatatagtggaagaaaaacagcatcattaatttatagatttccttaacatggagctttaattactttcttcacaaggtcgtataacatcgattattatattacactcatgttcttgaatagtaatttttctatttattatatggattatatacagctgatgagcataaaatgataattcttttatattatatcattattattcattagtttgtacaaattagtttccgccaccgcgtccaaattatgatttgaattagatttagaaaattatgattctgattctgtgttttcttggatatataatcataaataattttcaaagtataccaaaatttaatgtgtttactttatagcttctatttagtaatccattactgtgatcagaataatatagcaacataaaaataacaacatagtttatatatatatatacacgtagtttttattaatttatttattttccttatcatttcctaggagatttgaatttatatatgcttcttcttaatgatgtacggatattgaagtagtttattatgcaaattaatgtgctatat

SEQ ID NO: 85127 - DNA, 772 bp, Cannabis sativa
tatatacaactgacatttgcaaaaacacggtttttcacattcaatgaaacttttcatctttttcccaaaaaactattttttttatcctaattatttaaatgttaatttcattaatttaataattataaataattattaaacaaaaacaccatttaaatatatttattaattacacttataaagtgtcttaattaataaataaaacatttgttgtgagggagacaaaggtgttgggtcgagtgggtcttcgtgctcagatggtgggtttggttgagtggatctttgtgctcagatggtgagttcggtcgagtgggtattcgtgctcaaatgggttcgagagtaagagagagacgggaggaagagagagagtcgattgttcaaataagaggggtagaatagggttgtagaaattttttacctattctactaatattgaataacttaggttaaggggaccaattttgactgaatgaatgcatagatattcaaatttcctttgtaatatgtcatcccattccattgcttatgaacttgtcaaattggtacttttccttgattatgctataattaggtggcctagtcatctaaaatgtagactttgattaatgacagttgtttttaatgaactcttcatttctttttccaaaaaaattgagttggggtgggttggacttggcccaaaagaaaaagtagcgggtggggcgctgcgaggtaggattgaacattttctttgagtttgactcgaattcgatcaacccgctcagacccgact

SEQ ID NO: 85128 - DNA, 685 bp, Cannabis sativa
aataaacatgatgtaaacaacttataaatttataatcttctattgatagcaaataagattacattgaaatgtagattctatcctcaccatgttgcttgttagtccaagtgtaatagttcccacttgctttgacatcttctaaatggcaagagttcacacaggtaagaaaatccgagtctggataagatcttactctatgcccaattctttcttttggccaaaatatcattaaaatcccccattaggcaccaatgctcattagtacttaaatcacatagatccttccacaaagtcctcctttctctcttattattcgaagcatacagtatagtgagaagcctattaaaaccctcagtggttgaaaccctcaaatgcatcaattcattggtgcacttaatgatatcaacagtgaacctatacgggttccaagctataacaattttcccaccagcatgccaagctatgttagatgaaaagcaccatccttcaaacacattcgagtataaggttccaagctttggagccttaactctagtcttgagaagcccaaccaattcaaccttttgcaaattaataaatcgctttattaattgttgcttggattgattataggcccctcggacattccaacatagcaatttatccatttaagagagagggttctcctcctcctgtattgaactca

SEQ ID NO: 85129 - DNA, 554 bp, Cannabis sativa
caatggaaggaagcaaaacgacatcaattccattgctgcaggaggagtcatcaagatgttcggaaggaacagcttcaagggttcaaaccatagctaacattgtcgtttcgattgtgggcactggcgttttgggtttacctttcgcttttctaaccgccggttggctcgccggctccgtcgccaccgtctttgctggaatctccgtctactattgcatgttcctcctagtcagtacatatatatatgttcatatctataatctatataatatatatttatgttttcattatttcatataattagtctcatgttaatgttggacaggttaagtgtagtaacaagttatcattaaaagaagaagaagaagatgatgatgatgatggtgatgatttgacaaacataaaaacgtatggagatttgggttacgaatgcatgggaacgacaggtcgtttaatggtggaaacactcattggtatttctcagtgtggaggttgcgtggtaaatcttgtgttcattggacaaaacctttcatcagttttcagagcccacaatct

SEQ ID NO: 85130 - DNA, 4137 bp, Cannabis sativa
  modified_base (516)..(520): a, c, t, g, unknown or other
  modified_base (3258)..(3266): a, c, t, g, unknown or other
  modified_base (3294)..(3302): a, c, t, g, unknown or other
  modified_base (3328)..(3336): a, c, t, g, unknown or other
attttggtgaaagccataggttttgattatttcatcaaaccttttgttcctggagcgagaagcttgcttaagtccataaatggacctattaagcttgcaaacattctcttttggccttggaaacttataaccttctggttgctccatatagattgtctcatcaagaattccgttaaggaaagctgtcttgacattcatttgccaaattttataatcgaaagcgacaactatggagagaagtattctgatggatttgagcatggtgattgaactaaaagtatcctgatagtccacaccatctttttaggtatgaccctatgcgacaagtccatctttaaaagttttgacttcttcaccatcaccatttttcttttagtagacccagttacatccaattggatgattatcatcaggtgcatctacatatttccagactttatttcttttcatggaatccatttctgaatccatgtcgtctgaccattgtttctgttctggacttgccattgcctgttnnnnngttaatggatcgtcatcaataccatcatcaatgaccatattaatttcaccgtacaagccataatgggccggttttgtggaaaccctcccactacgacgaggagtagtgaccttttgaagaggcacatcagtggtagattttttggttgtatcaacttgcattggttcaattaagggagtgggaatatcctctatttgagtagaagacgatggaacattagttggagttatttttgaaattatttcctccaatactactttactttgcggcttgaagtttttaatatagtcttcttcaaggaaagtggcatttatagaaataaacagtttattatccttgtgactattaaatagttcacccctagtctacttagaatttctgacaaacatgcaaacctcagttcgtgcttctagtttgtcttatttctttcttaagacatgagtagggcacccctagattctataatagcgtaaactaggtatacgaccattccatagttctacaggtgtcttggggactgatttagatggaacgacattaagaaaatcatttgccatctgaatagcatatcccataaggatgttgacagatttgaatagcttagcatcgacctaacaatttccaaaagtgtgcaatttcttctctctgcaactccattttgttgtggagtgtcaggggcagtatattgcgattcaattctaagttaattaaaatatctttgaaatgcatatccatatactctccacccctattagtcccctattagtttacaagatttttgatgtttttttgatgttttacccaattggttttgagccaaatcatgaaattcttgaaatttcttaaatgttacagatttcttttgcattaggtgaagaaaactatatctagagtaatcgtcaataaaagtgacaaagtactcataacctcctctggcttttacatttaaaggtccatagacatttgaatgtactaaccctagaggctctttggcacgctctccctttgcagagaaagaacacttagtcattttaccttctaggcaagattcacaaactggtaattcacccaaggtgacaattttcaatggaccacctttggttaacttgtgaagtctatcatagcctatttgaccaagtcgtaaatgccatagatatgtttcatcattattatcaatcttttgctttttatggtttttatgtttagcaacattaaaaagttcgttcatgagcacaattggtaaatctagtcttaaaccataaagcccttgttccatgtgagcaacacataattgaatgccattacaagaaataggggaaatagaattcaaaaaattcaattgataactttgtgtttgtaaacattaaacactaatcaagtttctactaaaatttagaatatacaaaacattgtctaaaaacaaaaatttattctaaaacttgaggcgagctttttctctagcttggaccgatactaatcaccattcctaactttgagcttcaactcccttagatttaactaatcccaactttcaagcagctggaatgaagagtaaaaattgttaatagatctagaatcaacaatccaaatggatttatcattctctaaaatacatgattcaaaaataaaattgttacctttgtgcttatggtttagaagtttgggacatcttgctttaaaatgtcccttctctccacagtgagaacatagaagaatatgtctgctcagttgttctttaattgtctttattgctagttcaatttcaattttagctctcaaaattaaactcgaagaagcagcattctcagaggtatcatcctaaatatcttcaacttttctcttgcccttttctgcaactttggagcgagccctccttgcaagtgacaatgtctgttcataagcatgcatttcagcttctagcttatcaatgtcggacaagttaaagttgttgatcatataagatacaataaatttgttatactcaagtgaaaggctgttgagaatgaactgaacccattgctcttttgataagacaattcccagcatagttactttctagaatttcaagttcatcatgagtaagtgttaagtgatactctgaccaggagtcatcttcgcactttggagttcatttgcaaaggcatattataaatgaagattggggtgtgggttgttcatattaattcatacacaagtttagattataacaagtaaaaaaaaatatgtctacaaaaataccaaaataaaacatattcaattaatttctaaggtttctaacaaaataaaatatagtatcccagtaggtgagagtcaaagataacattagttgaatatagtagtcagctcatctaaaatggacacgattctagtaactttttattcgatcaaaataagaatctaacgttgtcccagtaggtgagagtcaaggttattctaattttatgagctttcaattgttatactttatataaatttatttctaagcagtcatcgtaggggagagtctaatagaaatgaaaacttacaaaatacatatcatacgagatcttacggtgttaatgcttcaaaggataaacatatccaaaaaggggatgaattctagcatctcgaggttacattgaaactattaaccatgtaagaccaacaatggagatcgaatgtccttttgattaaagctcattatttaaaataatgtattgttagttaatcattgattttaatctatatattttaataannnnnnnnnttttaatctatatattttaataatgaannnnnnnnnaatctatatattttaataatgaaaannnnnnnnnttaagttggtctaaaattaaaaaattatttttcaactttaatttaattttcaagtttaattttgaaaatctatatgatataattttgaaattatttaaaatataatcaaacaaatacctcaaaatatctaatttaagttgttctaaaataactaaattttcaaaatttaattaaataacaaattaagtatcttgaactaatcatcttaatttaaaataaaatatctcaatttaagttgatctaaaattaaaaaaatttcaacttaaatatatttttaaagaatatctgaataactaattttctagaaaaatctacttaattattcatttcaaaaaaaatattctaatttaaggttatctttaaggttatccaaaatctatttgaaaaattaatttttaacttaaatatattttctaagaaaattcaaataattaagtatctagaaaaatctaattagttataacttctttatttgattaaatacagaaaaatacatatagtttatcttgaattaatttcattaaactaagtctatttttcttaaattaatttcaaaataatctgatgaaaaattaatttcatatattttgaaaattaattatgttgctaatcaattttattcaaataaggcaaatgagccttcataattggggttattcatgtgaaggagggatggggttactaatgacccccctaactctcacacaaggtccaaaggagatgaatttaaccttaattaaataattattattcattgaataagcccaatactaattggaccttgttgaccgagattttcgg

SEQ ID NO: 85131 - DNA, 912 bp, Cannabis sativa
tacctttcccacaggagtcgtggctgcatcgaaagccaaaaggcatttggcatgctctagcttaaggcatatttgagcttttaagttttccaagaattgtttgaactcttcatcaacaatgccaacggaaaaattggtgccatatgagaaggctatttccatctctctcataaataattccatttcttgcaaattttctcccaagtacttccagttgagtcctaagaattggatatgtggtctctcccatgccatacctccttgctttaacatcaaattagtggcatttgcaaccacattttatctctattgaaactcatttgaccgggatatattgtggcaaatttagaatttaggctaacttaccagattattttcaacacgtcgaataagttgatgtcctagagtaaaaagacatctttgttgtgccatgcgttcttctgccgttgtagtgttttgggcatagaaaatttcaaaaataaaattaagcatctttgaagcattttcattttcagcctataatcggtaaacgctcctcacctacaaggattatcgtatttgtattcagttgcaaaattttatgaattctatatttatatgaataaaaattacaaatattttttctatttcggtttattttatactagggaatggataagttttttgaattttatattaaaacaaaatagatttttgtttaattgtagaatttaaaattaagtcttttttatttttatttgaattatgtatatatgtcttatataaaatgtagctatttaatgaaaattgttagtttaacagttttttttttcgttcaagttaacgattaaaattaacaccgctaaatcaataaattaattattattatttttgaaaaaaaaataattttaaatatctaaatttaatttaaaa

SEQ ID NO: 85132 - DNA, 812 bp, Cannabis sativa
tttttttaggttgtatatcactatatttatttttaaaaagtataattttaataattacctttaagcaacttctctcccaaaaaagaaaaaagattttagctttttaaataagcaaatttaatattttttgataatttttattgatctaaaatgtaatatttggcttttattatcatttttttagaaaaaaaaaagacaaaggaataatcctattgatatagtaataaagttattgtaagtgcacaagattttttcaatatcaacatgaaaggatatttatgtaattagaaaaataagggctgaaaaaaaatattagtattgtagttttgaaagaagtttgacttgtaattaaaagagtaaagacaaaaaagaaactagaattgtaataaaattaaacttataagggtaaaatagtctataaatatcacacaaataagccacttttataatagtaagatatagtctttttttagaaaggaattctagatggccagttattccctcctagaaggaagtcccggatggtcgactctagctgctgtctttcctatccagaaaattccttcagtgtgcgctttgttttatctttcaggaagcgtacgttttatccagaagtacttcaccttgtgctgacgtggagatattgttacgatgagtttgataagtcataactaacttaacaacttatcatttgcaaccaccgactttatgatctatatcccgaacctataattaccaccttcacttatctttttgaaacaacgatgagatcaggcgagtttcaaaaggtggtcttgagagagagaggtaca

SEQ ID NO: 85133 - DNA, 793 bp, Cannabis sativa
ttagagtttcattgaataattttagttgtacagcaaaaaactgcataaagggtaactgaatcccacatttactttacgatcatgttctaaagctattattgaagattcagactctgattttgagcttaaagatgaagatttcgagattaaaaaaagtgacacaatctttttttttttttttttggtgggtgggtggggatttttttctcatcttgttgttgtttatgttatatgttgtgttttattttcaatcttgttatgcaatttatagttctattattttattgttgttttaaggattttgtttgtgcatgttcattgacaggtatcaatttgggattttgttcatcacattttaattttttaaattttatatgttttgttattttgtatgtcttattcggtgtttagtattatatacttaatttttatattttttacggttattttttattgttctgattttttttaaaatgtatttagggtaaggagaaattttctaagggaaaggttccctctcatgataatatggaagtttccattggcaaaagagttattgaggtatagtatttatttattattttataatttttggtgattttatttttgtagttttattgttcttttacatttgttttagttgattttttatattattgttttatgattggagtcctaaattatggttattttccggttgttttgtggttgattggtggttgtcgatcatggatgttgagtttgaggatattttttttttggtaaatcggcaagtgtattgaaaccaaacaac

SEQ ID NO: 85134 - DNA, 519 bp, Cannabis sativa
atctcccatacatacaaacaaatagagctcatcacatcgatagtgacccttaattatataccacatgagtctttttatcggttaaactctctttattattgtttcatttttatttaatttctcaaatttaaattttggtaatagttttccaaactagtaaactgtagtaaattaattatcaccctagactgtttatgtgctacgtttatattggtacttttaatatttttattttgaaatttattttaaaattaaataaattataaaaataaaaataaaaaatattataaattttttataatttttaaataataatattatgtgtttaaaaataagtgtataatagtgtacacataattaattagttaattataaaaattaaattacattttaaatttattaatagttcaataattcaataattatgaaggtttaaccgtaaaaaaactgtatatatatatctttatatataaaaagtgcctatttaacggcatttcttggtttaacagaatatacctt

SEQ ID NO: 85135 - DNA, 1138 bp, Cannabis sativa
gatggtaaaggatttcacagtcataatccttaaccaactctaaccaacgcctctgtctcatattcaaatctttctgagtaaaaaaatatttgatgctcttatggttagtataaatttaacatttctctcaatagagataatgctgccaaatctttaaagaaaaccctaccatggcaagttctaaatcgtgagtcgggtatcactgttcatattctttcaagtaacgcgaggcataggcgatgacccgatcggcctgcatcagtacacaccccagaccctgttggatgcgtcacaataaactacgaacttttctttatcagagggtagggctaacactggagttgtgattaatctttgtttcagctcctgaaagcttgttttgcacttgtccgtccacacaaactgctgattctttttggtaagttcggttaagggtgttgaaattttagagaacccctctacaaactgacggtaataaccagccaaacccaagaaacttctaacctctgtaactattttccatctcggccaatccctaacggattcaatcttcatcgaacccactttgattccatccttactgaaaatgtgtctaagaaaagacacctgagttagccaaaactcgcacttcttgaatttggcatacaacttaggttctcgaagccgctgtagaacaatccagagatgttgttcgtgctcctcttctgattgagaatgcacaaggatgttgtcgataaaaataatcacacaaatatcgagcaaatccttgaataccatattcatcagatccataaaacccacaggagcattggtgagtccaaaagacatcaccaaaaattcatagtgcccatacgtagtgtggaaagtcgtctttggaatgtcctcctctcggattctcaattgatgataggctgatgggagatcaatctttgaaaagaccgtcttcccctatagctgatcgaaaagatcatcgatccaaggtaaaagaaacttgttcttgactatcagtttattcaagttctggtagtcaatacacatatgcaaagatccatctttcttcttgaaaaataatacgggagctccccagggtgacacactaggctgtgaaaacccgaggtcaagcaacccctgaagctaa

SEQ ID NO: 85136 - DNA, 1045 bp, Cannabis sativa
actattaaattgtacttcaaattcaaaaatatgtcccatatattagctaacaaaaagtctatagattcactaacaaaatgcatgacacactcgtgacttatttttttaccttcccatatttaataatcttgcaatgtattctaaatttgattaacaatgatttgttgactgaggtttttgagagcttaggtgatgtttagtttgctggaatgtaatagtaatggtaataagtaatgtaatgaaattataagaagagtaataggaatcgattaaaatatttagtttgttattagaatgaatattgaaacaaatgataaattgacaaaattatcccttacttgaatttttatatatggcttatttgtactgcaggtccctaaactatacatgttttggcaagttggttctcaaactttatttttttaacaaattagtctccaaactatataagttttggcaagttggtccccaaactttatattttagtaaattgatccccaaacttttatttctttagcaacaatattaagttcccattattagatattgataattttattatttatcttactttaatttatatttttgtattaaattcaaataattttatttttttaattttaatactttgagaaaaataattatattaatatttttatttattatattattattaatattaatattttaatactttaatttattatattcatatacattaataatatgaaaaaaaaaaagataaatactagcggacacatataataacttgagagaattttagctcctcacatttttatattttaacatttataatatattttatagttgattaacatgtggtaatataatttcaataattttttaattatatatttattaattatttgaattttgcatcaacgatggtaaattttcatagattcgccgcgaaacataacttaaaaataaattttaaaatataatacttttgtagtttataaaaaaaataatattatctaagcattttcaattgttctttttttttttattaaaattacaatac

SEQ ID NO: 85137 - DNA, 985 bp, Cannabis sativa
  modified_base (189)..(190): a, c, t, g, unknown or other
gggtcaattttcaacccgtccaatcaactgattgggcagtttagaattttatcgagttatgtcggtttgtattttttatcagttttgtcggtttggtttggcggattattccggttgggcggtttacgaaaatttctgtacagccctagtagacatttacagaaattgttctataaaataaacttatgnngaatattatatagtaaataataaaatattttttagtaacccatgaaattagctgatatattgaattttgtttaagtgtaaaatttgaaatgttgaattaattattctaggatttttaaggtactattgttttcttttatattattttagaaacttgtaaaaagggttttataaaattaaaatatgatttagtaatatttaaatatgaaataattataatatataatagtaacttattaaattagttggtatataaaattttattatagttgaaaatttgtttttttaataaattaagtagaaaagaaattaaaatgttacttttgattttagttatcttttccgataatggtaaaaaaatatatatatttctcgtatgttaaaatgatcttcttgaaaaatagataatgatggtataatttttaagctcaaataattactagtatgattaaaaaaatatcttaaactttttcttagaagagaaaaagaagagtttttttttttaatattaaagaaaactatgaatatttttatgttttatagttaataaataaaaaagggtgaagaaaaaaaaaagaaaactaaacaattagtccatttacattgatatatgggctgctagtctttggcatttatatatgggaaatttggttaacttttacgaaaataatgtcacaccgaaatttttttaaaaatactatatttttataaaacaccagtaaaatacaaagcagaacaattcaaagcaacagtagaacattggtaaaacactagtagaataacagtgaaaacttaa

SEQ ID NO: 85138 - DNA, 543 bp, Cannabis sativa
atgtatattattattatttaacattttccaccaatatttttgagaaaaaatataattaattaacaaatttcaagagaaattagtatgtatacatatacagatttagtaagtttcatatatttgcgttatgtatcaccgtataaaaaaattagtgttataataaccgtcgtattcataattctttttataagtaataaattaatttcattgatataaaaaaaaattctcacaaaccagtaaattttatacgcgcgtgaaataatttttttttatcgatttttggtgcattaaaaaaaattttgaattatactttgtgtaaatacaatgtgcccttttcattttttgttttttttttttttatatttatatatatgtaatttcttaaaaaaaaataaaaaattatatctgcagtttgaatttactgtgtcactagtacactattctctaatttttttaaaaaaaatggtctggaatctggattattgtctaacttaagtttaacacacacttatataaatatatcaatatggtcaattctaatat

SEQ ID NO: 85139 - DNA, 741 bp, Cannabis sativa
gagtatcgtcttcactagacatgtacacctgagaatgccaaagtgaaaactagttagtaagacaaaaattaaatatgaataattaaataacacaatagtatttgacaacagtgccaaaaatttgatgcgtgtcatatgctgtatcaaatttactaattaatttaattccaatacttccaattgtttaagtataaaagcaagtacgggtcgatcccacgaggactatgtttactctattattcaataattaaaaagtaataaaaatggagattgtttttattttttttagaacaaaattaacaaataaaattaagaaaataaataaaatgcgatactacgatattcaagaaatagttaaaggttaatctccaccctcaacaatcatccttacctactaataacgaatgatatttaaattttccaatcatattattaatctagcagacaatgctaaatcagacaagtatcccaatctccctattacaagtaatcaaggcaaagcgctcaataattaactcttttaactaagcaataaatctattaagcataaaattacttttcccgacgctcgttctcaatctccatctctaacttgaaggcttcaacagcaagcttggccacttcttagttcctgacaccaagcaagcgctctaggccattattcaggtcttgggtttttctcaggcaagtctgtgtcttgacatgcacgtccctctccgtctgaatctcgatctccttagc

SEQ ID NO: 85140 - DNA, 1203 bp, Cannabis sativa
atcattgctcagaatcaaggagggtttgttaaagggagatcacactactacaaactagactttttgtgtcagttcaatatggacgtttttttaaaaaaaaaactgacactaaagactatcccaactctttggtctcagtttataacactgacacctataatgccttttactgttgtttaatagatcgacactaaaagtataaccgagaccaaatttttttttaagaaaatatatatatacagattgtgtattggtatcagttatgaaccgacactaaaagatcttttagtctcagttataaactcacacaaataaacactttatttaaaaaaaaaaagtttcaaaataaaaaaataaacaaataaataactttttttaacctcttaatgaaaccaacgggattcaaaatttacttatacaaatagatatcagattttttattatttttatttcttttaaaataaattgggtataaatagaaagtgtgaaaccctattttttgaaaaccctaatctaagcaaaccctatttttccctctctcaccagatctctctcttcttcactccactttgtatggcaccagaggccaagaaccccctgagacctctcccttccttgcttctctcttcttcgtgcggtatccccagaaaacccatgcccaagaaccccatgagtcttctcccttcctcgcttctctctctcattcctcacggtgtggccgagaatagctcctggtgagcatcgacgagcctctcaatctctgctctcttcactctcaatcttcaaggccacggcagatccgacggcctcaagccttcgtcccctccatcgatctcggcctcaaagtctctctttgtcttcttttttttgggtttcaactcgtcgagaaaatgagtttggctactgtagctccgtggttgtgcaggttaaaggaagaagagagaggccgtaccgatggtccaggcggatccaagatttttttgtatatatttcagtgtaattttaagttcaattttggttgattttgtttgataattgtttgtatttagcacctatatttttgagatttgtttgtccattgagtttaatttatgtatttttcattttgtactgtgaaattgataaattattatgaaaattgtatatttttgtgtgttttaacagatttttgaaaatgggaattgttcattttacagttgttat

SEQ ID NO: 85141 - DNA, 1578 bp, Cannabis sativa
tataattacatggtaggcagttaattacagagttgactgtaatctttacaacgtttatcccttgaaatcgtgggatttgattacatatctcccagcataaatgcggttattatttaaatatcacacagctatgctttttccgctttaactgaggcaaagatgatcgtgtgtttaaacacgtctttaattgtaacatcgtaagatgtttcgacaaaaactcagttctaatgaccttgatagagagctagagccttttcccttatcttttcgaggtcgacaaatgtacgccttattgcttctttgtttgaaagcttaacgcttcattgtggcaatcacagttcttattaacaaagattttctcagtagtcatttaaatgtcagcatttgactcgtcaagattataagtctaactgaaagatgtctgtagttaactggtaaaattaacaggaatgcgccctcctatagtgagatatgcgcctcgcttattaggtctcgagtccacccgactgttacactttgtacattatttgctaagtgttttcacactcgatatgcgtcgcttttgtcttcccaggtgaaacgaagtcgatgtctcgctttatgcatcaaatggcgtatggtttctcgttaatacacgaaacaacagtgtgcatatcttttcctcgcataagaccttatggtcaacgagttgcaagtacactctgtcacttacgcaattaataagttattgaaagtgattccattgatccatattctatttatcttgatacgtgtcctccattgaaatggtagccaaatttcagggaaaacaatttccccttaaaaagttcttttttaataaaaagtgcttttaataataacggagggcattttcatcataatccttttttgcaaaaatgcgtcctttgattttagcagttgtatggtttcgagggtcattatgatccgtcttttcatcttccgcctcactccccaccgttagattttccaacctttggccttcttgttactggactttgtatggtagcaaatgctccacgttcctgtagctttttattagcgagccattgagtcgagccaatttgtaaactccaactccaactattgcttcaactacatatggaccctcccagttcgggttgaacactcctgcggatgcatcccttgtgtttgcaaatactcaccttagcaccaagtctccaacattgaatagtcttttcttgaatctcttgttgaagtatcttgtaactcggtgttgataggctgcgttggtgatttgcgacttagtttgtttttcatcaagtagatccaaggacaatattaaaagctcttggtttttttcttgattataaaactctcgtctgtgagtcgatatgttcacttcaacaggcaacattacttccgagccaaatgctagcgagaaaggagtgtgtcccgttgctgttttcttggtaattatatgagcccagagtacttgaggtaacttgtcgacccacctgcctttggcagtgtctaacttcttcttaatagtatcctttaaggttttattaatagccttcacttgtccattcgcctgag

SEQ ID NO: 85142 - DNA, 1487 bp, Cannabis sativa
agtacttcatctcccaatcagcccattgtgtcaaatttttctggtaagagtgatattattcataaaaacaaatggattattgatacaggtgccactcatcatgtttgcccttacattgatttgtttaccaatatttgtcacaaaactattctttctaatgtcactcttcctgatggtaccaagaaaagaatttcttgcactggtaccattagaatttcctctgaaattgttctggttaatgtcttatatgtaccagattttaaatacagtctaatgtctgtttcagccttaatgtcttctgctaattgctccttcatatttcatgatgatacttgtactattcaggacaacggcaagaagaagatgattgggaagggtgaaagacatggagatcttttctttttaaaatctgattcctttgccactgtttttgctttttctgattctactataagtgttgacactttgtggcattatagattgggccacccttcttgtatcaaagaatttcctttgaataaagagttgaatttttctcaacctatctctcctaatttccattgttcaacatgtcattatgccaagcaaaagaaacttccctttctttctaaccataatatggctaaaacatgttttgagcttattcatatagatatatggggaccatatcacactataacacatgatggtttcaaatactttctcactatagttgatgattgttctagatacacttggattcatttacttaagcacaaatctgaagctaaatctgtcatacctgcctttattaagttagttcaaactcagtacaatgctacaataaagggttttcggtctgacaatgctaaagagcttcaatttgtggatttgtttagatccttgggtattgttcattatcatgcttgtgtgcaaagaccacaacagaattctgttgtggaaagaaaacatcaacatctcttgaatgtctctagagcacttttatttcaatcttatattcccttgatttattggggtgagtgtgttagcacgaccacttatctcattaatcgaattcctaccccaaatttaggcaacaagtctccttatgaagtcttaaaccataaagcacctacatataatcatcttaaaccttttgggtgccttgcatatgcctctaccttaagtcaaaattggtctaaattttctcctagagtcgtgtcatgcatttttctaggataccccatgggaatgaaagcatacaaattattgaatcttgagaccaacaccattttctgctctagagatgttcagttccaagaatacatttttccttttgttactaatgagggactgcctgctcattatgaaaattttttccatactgtccctactattgttgacactgcaggttcatctcaggacatgtcttttagtgccccagaacctgatccacctcccagtacccctgctccacaggtttgtgaacctgctgctgatttgcacca

SEQ ID NO: 85143 - DNA, 1265 bp, Cannabis sativa
  modified_base (162)..(173): a, c, t, g, unknown or other
tgtatagtcgctgggcaacaaacttttgattacatgtatagcaaacttgtataaagtattttgtaaacgtgatcccgaaatgttatatatgtaatacttcaaatttttaattaaataagaaatttttaattattcataattttcaataacctcgttgattannnnnnnnnnnnacagtacgtttaaaatcacgctaacatgcctataatagttagggtgttacaacttcacttgtcctttggaccaattcaggtccaggataacgtctctctccaacctcatcccaatggattggcgatcaacatttcctaccataaagaatctcgtaaggtgccataccaatggtactctgataactgttattatatgaaaactcaatcaagggtaggaacttgctccaagatccttcgaaatctattacacattctcgcaacatgtcttccaatatctaaatggttctctcagactgaccctctgtcttagggtaaaaagttatactgaatctcaacttggttcccatagctttctgtaaactctcctagaacttggaagtatatttgggatcatgatctaaaacaattcactttggggacatgagtcctatttccttaatgtacaattcgaaatactgttccacagtataagtcactcgcacaggtaaaagtgcgatgacttggtgaatctatccactatcacccatatggaatcatataacccaatagtcctaggcaaccccactacaaagttcatagttatgtcttccttccattcaggtattctcaagggctgaagtaaacctgccggcctttgatgttcagccttaacctgcttataggttaaatactttgaaacgtattcaacaataccactcttcattcccagccgccaatatatttccttggtgtcatgatacatctttgctgtcgccgagtgtagggaatacagagtattatggagctcataaaagatttcccttctgatctgatcatttgccggaacacaaattctacccttatatcttagtagtccatttggagtcacagtgaaatcgtttgtagcaccaatctcaacttttgtttctgagttcattcaatttgggatcattgtgttggccaataattattctttccagtaaataagactgcaatgtaatattttccaacttaccgactacaaactcaatctcagccttagccatatcctcagccaatcttggagagatttccttcaactcataaacctgccctgggcctttccggctaagt

SEQ ID NO: 85144 - DNA, 642 bp, Cannabis sativa
cctcagttaacaatctccaagcttgcttccccaataaagctagattatattctctaaaatctctaaaacccaagcctcccacagttttatgcttgcataatttcttccaactatgccaacttacaccttgtttatcttttgacgatttccaccaaaaagagctcattataccttcaagacttttacatgtttccaaaggtagtagaaagactgacatcgcatagcttggaaaagcttgagccactgtttttagaagaatttctttccctgctttagaaaggaaccggccttcccaatgttgtactcttttttgcagcttgtcctttatgaaacccaagattgccttcttgtttctgcccactaacgaaggaagccccagatacatgctagttccatcagctgcttgtatttgcatcaagtgacatatgtgatctctagtattctgtgttgtgttgctgctgtaaaaaattgaagatttattaaagttcacaacctgcccagaagcttcttcaaaaatctttagcaaacggatcacattagtggcctctcgctcattagctctgcaatataagtaactatcgtcggcaaataacatatgcgagatgatgggagcaccattagcaatccatatgtttattaaca

SEQ ID NO: 85145 - DNA, 597 bp, Cannabis sativa
ttccattcgacatccttcaatctccatatccctcccagcactttcttgagaaatcccctactgtgttctgagtttgtacagaggcggcctctcaaattgaattttgaaaccgttattgattagcttttgtccacttcccattcttcatcttcatccgtgacttgaagattgtgggttttcttcagtatctcatccattgcagaggcgaaactcctcaatcccagcgtacgggaacccttcgaaagcgaaggaagaagacaggatcagtccagaaccaaaccctagcaaagcagggaaaggattgaatagtattccatagaaatttatttatttggggttagtataattcaattaagtatttattttttataaatcttaaattcaaattctctttatatggcatatttagtggttagataatgccatatttagtgacatttactttatatggcatatttataataaccttaataacttttttttttcatatttttgaaaataatcctatgttattttactcttattaatatcattttttaaaaagactttagataaatatcattattgtaaatagcacaccatcaaaatcacattttc

SEQ ID NO: 85146 - DNA, 806 bp, Cannabis sativa
atatataatgatatgaacacatgaagtacacacaaacatgatataaatttatgtgaaaaattatttttcataactcatactcatcttaaataaaattaattagttaaatatagagtaatttgcagcataaatatctaagtttaactttcagttgtaaataaatacttaagtttgatttttaacggcaataatttgacatttaatgttcaggtacctacagagttccaaaaatataacttaggtattattaccactaaaagtatttatatgcaactgatagttaaacttaagcatttatgccgcaaattactcttgaatatactattaccacataagtgcatatcaaatttgtatgtgtatattatgtgtacaaatatcattattctatgagtattgtttaaaattccaaattttttgaaaaacaatagatagattgtggcatattctctaatattttcatttattcgctagtaattaataattcacaatctctaaatttcacagcaaaattctcaaaacttactttttattagcatttaatcacttccattagttaacttctaagttaattatttttgtgtacactgtgtacaatactttatgtacacatgaacaattaatttgacaattaactgttaaaaataaataaaaataattaaatgctaacagaatatgaattttctaagttttgtcgtcaaaatttaaggattatttgctagaaaaataagagtattgagagtgatgccgttatttactcaaaaaaaagaaaaattactaaagttttttgaattaatggaaaaaaaatt

SEQ ID NO: 85147 - DNA, 583 bp, Cannabis sativa
atggcttggcagaccgatggcaagaatcttaagcttgacttctaccccaagcgtgaagaggtccttgcccgcttctgggaaaaaaagaagaggcttgacgcagtgttggaggagcgcaggggccctcaccttccaccccgtattgattaaaccgattgtttaccaccacaattactaccattatctcttcttttttttttcctttattacatattcagtcctcccttcttcaaagacaatttattttcttttttcttaagaggagacacttatggcccctccccaggcccttatttatctttttgaagcttttctttgggatccaaatagtttatatttatgtttgaatatatatatatagcttttaactttgttaaatttggtctgtttacatttgtcagtgtgatatgccttactacccactgagtgacatgaaaatcaacttttaggtcactcagttttacaaaattaagttagaggttgcatatatttgttcgatacaaattttctttacacaacataaactttatttttcaactaatggtaatactttcgaaggtgatcggcattccaggccctaggc

SEQ ID NO: 85148 - DNA, 1363 bp, Cannabis sativa
gaaatcaaacttccaaatgagagctaccaacatgaatcccaacacaatacgaattgtaatagaaactgcgtaaattgtgtaattcttcatcctctggaagatggctcggcttgtcaacacggcgctgatgatgacactcaatcctggctctgtcaaaacaatgtcagatgcacttctagctgcatcagttgcatcagcaacagctataccaatgtctgccttcttaagtgccggagcatcattgacaccatctccagtcataccacatatatgtttcctttcttgtagccttttaacaatctcatacttgtgttctgaaaaatatatcaaataagtcaatactagggaatagaaaatgccatgaatcctcattatcaataatacaatatcattattaccagggaagacaccagcaaaaccatctgcattctcaataagctcatcaatgggaatgccagcagtggattcatctctattctggccaaggagaaaggatgaaggatacatattagttcccataccaagtctacgaccagtctcctttccaattgcaagttggtcaccagtgatcatcttcacattgacaccaagctcaagagctcggcgaatagtctcagcgctatcatgccttggagggtcaaagagaggcatcagacctacaaactcccatggttctccagcactctcctttgttttctctagaacagtctataatttgacataataaacaatccaatcattatgtttcaattgagataaaagagtcaatcaataaagtaacttgttcttgatttacctgtcgtgcaactgccaaggaacgaagaccgcgttcagcgtacttgtcaatgattgcatgtgcttttacttttacttggccagtgagattacaaagatcaataatcttgcatagaacagaattgacatagttagtttccatcaaagcttagagataataaaatggttgaacaagaggaggattttagcttacttgctcgggagcacccttgctgcatctatgccagtttccattgttgtcaatgtaagtgattgcagtgcgcttatccacaggattgaaaggtagaaaatgtacctcagtgattccttctcttgcctataacacacaccaacaagaataaacaagagttcattgcttcaattctttatgttttagggaaaagcctttagtattttacctctttggggtcacctaacatcccaacgattgaagcatcaatggcatcttggttttcaactctagaagctctagccgcaagcaagacaacagtgtccttatctatgtccttgaacacctagaattatgcaatgcattcattataataaaggctcaaattatcaaattatt

SEQ ID NO: 85149 - DNA, 564 bp, Cannabis sativa
aaatataaacttggtaataaactaaaatttggtgaaaattgtgtttgtggtcaaagttgcaatataaagttcacaaaagcaaggcacacaacaacatggaagtttgattatatatccattcagaccttgagttacatccagaacagaaatcaaaggtggagcaagctacgtcttgagtatagttgatgattgggtttttttactcaaaaataaaaaagattgatttagcaccttggttaattggaaaacattaattgaaaatcaaattggtaagaaaattaaaatgttgagaactgacaatggcttagagttttgttatgatgagtttaacatgtattgtcaagaagataggattaaaagacacaaaactgttatcaagacccctcaacaaaatggttaactaaaggatgaacatgaccctgattgaaagtctaatagatgctaaatggtgcagggttagggaaacagttttggggagaaaccttgaagacaacatgttatctcattaataggtgtccctctacaacttaaaatttcaaaagacaacaagaattttggacaggt

SEQ ID NO: 85150 - DNA, 1346 bp, Cannabis sativa
gaagccaatgaactcgagaaagactgtctccatatagcctgagaaagatcgtttgcacgtagcttggaaaaagaccgactacacatagcttgagaaagactggctacatgtaaagagccttgatctctgcatatacctcattctcctcatcgtcagaccccatttcctgaagccaagatcttttccccagtcttagggaatttcttaataccagaaagaggttggcaccaagatcttctggcataggtttgggtcttgagttgggtggattctttgatagaaaccacgccaattcctttcccacattcatctacaaccatgcaaactttcctcagaaattctttatcagcttgaggaggacatttaagatagctcacaagatctataccctcagggatcaattatgaggatcgcccatggcgggctatggggttcccttggtttggattggttggaaactcctcagccttagaattcatcgttttggctccagttgaggattgaagtctttaggaacaaatggaaaatggttggtgcatctgggtattatgagtttggaagaatgaacttctgaactcagaagggacattttgacaggaaatagatgatccattctgaaaatggatctcactaaagagccagaggtttatgaaaaatgacaagcttgagccgtccttttatacataaagtccagtgacaagaaagctaaatattaaaaaatccaatggttgagagaagtgcagaatatgaagagacgattcataatgaccctcgaaaccgtacaacttctagaatcaaaggatgtgttttttccaagaaaagatcttgacgaaaatgccctctgtaattattaaaaagctctttttactaaaaaagaactttttaaggggcaactgttatacccgaaactcgacaggaggacacatgtcaagataaagggaatgtgaatcgatgcaatagcttttcatggaataactcattagttacgtaagtatcagagtatgtaacccgctgactgtaaggtccaaggcgagaatcaatgtaaaaactattacttagtatattaacgagaaaccatatgtcactaaatatgaatagcgagacatcaaggacagaacacactagaagatgaaagcggcacatatccatcgtgaacgtccttagcatgcaatgaacaaactaagtgtaaaagtcagatcggctcgagaacaagtaagcaaggtgactgtctcgttatgggaagactacatataacttcatctcgttagcatcagtgaggcttacaatcctgacgagccagaagacagcatttaagtgagcctcaaagaattccttgaggataagaa

SEQ ID NO: 85151 - DNA, 557 bp, Cannabis sativa
agtgttcagctgcaaaaaaaaaaacaattacagttgagatggttgcaattacaataatagaacaacaaactatgtacacacgtgtataccatctctaggcaagcgttccgacgtgacctcttatgtattgcaaaagacaacgaatctctgatttccactgttgcattatccatggtcagattcgttgcataccagtgcggagcactctcggtatccaataggggtatcaccatctgcgacaaagtaaaacaaacaacgtcataaaaaaaagttaactaaagaaatttgcaaaaatacaaaagtatcaagaaaatggaaattacattgtgacataaattcatatcttcatcgtaataaagagtggaccagtcttgctgcctcgccatcctctccacagtcatatttcttccaagtaactccctctgctcaataagcacacacaatagagtacattttttaaatgaaagcatagtcgacattgtatgaaagcataaatacaaaaggttcatgccgatttttaaataacaaagttcgtacagaaattcttgtgggcataa

SEQ ID NO: 85152 - DNA, 621 bp, Cannabis sativa
attagttgtttattcaaaaaaaaaaaaacttgcttattagttgtattatatactttttgactttacaattaaataaaactaaatctaatctctactttctctttatcttttatttattttatttatttttcttcttaaataattatcctaattcatgacaagaaaatgaaattaaatccaagactaaaccaagtcatttgaaattattttttagtcagagtcaaacacatttaatcatcaacaataattaaacaattataaatacaaaaaccaaggtttagttgaactaatcctactaattatacttttgagtcaaaaagaatagtgacagagcacatatttgaattagttttcaatccatttagataacttgtatacaaattcgaaaattgtatacggtctcctattactagaatattttttttatgaatttcataagagcataagcatcaagtgctcaacaaacactctaatgcgacacattataattagttagtagttttatatagggtaaataataacataattattcaaagttttaggtttgtaagcagcataaattcaatgatttttttagtggcatagtacccaatatttataaaactgtaattttcttctagt

SEQ ID NO: 85153 - DNA, 581 bp, Cannabis sativa
tttgtattaaatatgtgaaattattagttgttttgtatttttatgttagttggctcgcaacagatttaactgttgcattacagttttatcatagttgacttgaagttgactttttctttctctttcgggcgtcagagttgacatttttttttcaggcaaagacacctttaactttttcttcattggacgatgaccacctttagccacgggggaagcgaaaatcgaagtcatcatcgtcgatgactgggcgtttccctttagccttattagcaactgatttatgatctatttttgaagctttttttggttataaagatggagaagcaaagccacaggaaataaccattatatatacgaaatgaaagatataaaaaaaactaataaaggaggtaattgggaaaaaaaaaaaaaagatggcaaaaattatggctgagaggtagtttttgtgagttttggatgtgggtttcgaaagggtaatggttggaagttagttttgaaatgaaaaactgagaaagaaaaggaacaagaaactaaatgctaaatttgaaaatgaaaaatgaaagaaaaaaagagaaaaaaaa

SEQ ID NO: 85154 - DNA, 947 bp, Cannabis sativa
aacctaaactggaccatgaacttggacctgaactgggacctaggacctgaacatagatgggggacacaaaactgggaatcgggccccaaaactgggaccagaacatgggcctcggaacttggatcatgatatgggactcgatcccagacccaaaccttgacctaggacccacctcgggacctgggatctgggactcgatgcttggacccaacccgtagtcggtgtttggatctgggacttagactactacccgaacccacactcgaactcaaaccaggattcatatacatacccaaacccagacccacactcgggaacaaaaattgaaacttgaattggaaccggactaggatcttggaacgggatcgggacttggacctgtacccaatctcggacactaaccgagatcgaaacccagacctgaacctcgccctagacccaaatcaggacccaaaacaagactcggacccaaactcgatcggaactcgtaccccgtgccttgtaaattgaatcgaaactattagcggattgcgatctaggaacaggaccaagactaggacctggaccgagacccaaaactataaccggaccaggacccagactcacacacagacccaccttgggattggatgccaaacctgaatcggtactcgggacccgaacctagacctgaacatggagaggactcgggacccagaattgggaccgagacccaaaactgcaccctagcctcggtcccaaacctagaccgagacccaaaccgagacctgggacatgaatcgaaactagactgggacccatgattgggatcctaatcttattctgagattcaagaactagggctcagaaaagacccgtagtcggtgtcttgatctaagactcagaaaaggacccgaagctttaccaggaccttgaccctagcccagacatggtacccgaaatcgaaa

SEQ ID NO: 85155 - DNA, 676 bp, Cannabis sativa
aggtggtaatccttatcctaattggcttatagatggctttcaacaaactgtctctgattgtaatcttgtggatcttgagcttgtgggtcatccgtttacttgggagaagagtaggggcactgacagttggatcgaagtgaggctggatagagcgctagctaccacttcttggatgagtctgtttccgaatgcattgttgattaacatggtcttttccacattggatcattgtcttctttttttggatccatattttcagttccaggcagcttctaggagggtgtttcggtttgagaatgcttggttgcgtgattctaattgctatgctattatccaggagcaatgagaaacttgtgtatcgggtaatattgttgacaaagtggcggctattcgaaggtcctcttggtgtgtggggaaggagcttaactaacaattttaaggagagaattcaaagttataaaaccagaattcgtctccttaaaggccagttggatgtggagtctctttctgaatataaggaggcgagaaaacaacttgctgaaatctatcatcaaaaagattttttttggcggcaaagattgaagcaattgtggcttagggagggtgaccaaaatacgaggtattttcacgctgctgctagctcaagaaggaaaaataatttcattcatgaattaaa

SEQ ID NO: 85156 - DNA, 748 bp, Cannabis sativa
ccgcctaaattttagttttgggggttaagtgaaaccaaaatgaaagttttgggggttttgccgctatttaccctaaattatattagcaaaaatatttatgaataaaaatataattttatcttttaaacaagtataaaagaaaaactaaataaaattatagatgtattacttttaaaattagaagaaaatattaaaatatactgtcacttttttgtatgtgcaaaatatgagcacattcttcttttgattattataaattaataatgattaagaagaatcttcttgttcttcaacaaaatttagtcaaatcttttgaaaatttattgcgtatgataaatcatgtcaaaacaactcaattcatgaatttcaggttcgctataatttttattataatgaaacttttgtaggataatttataaaatcactgcaatatataactaatcattacaagttttattttgatatacacaaataaaataattatattattctccaaaacatatacactctccaagagtcactattatgtttatcaaactttatattacctcattatcaattccatgatgtgtatattaattaaaaggtacaagacatcttcatcatgttgttgtaacagtcaaatgaatataatcataacataatatttatttttctacatgtctttctaacaagtggtataatttattaatagactattctgaggtctaattatcatgactaaatatatattatatatttaaatgta

SEQ ID NO: 85157 - DNA, 840 bp, Cannabis sativa
aacatatattttaaaaaaataatggtagtgatagatcttaatttgtagttggttataataaagtgtacaaattattagaagcatctttatatctttaatcattttttaaacaaaatttttttcgtaaaattaaggtttaaatatatattttatatatagatgtgattatatattgatgtaatttttatttttaaatatatataataaaattaaattttttacataaaatatcggtataatttttatttttaaatatgtaaattaaatattatgttaagtaattgatatgttaaagttaatgtagaaaactaaaacacacccgtcaaaccaaaaattttgttacatagtcacattttatatagaatagatatctcaataataataattgcaaaatgtattcatggtcaaattgttatttaataaaaagctaattataatctttaattacaatcttttaatcattctccgtgttcaggaagacatgttagaaatattatctctataaatttttaaaaatttttaaataatttataatactgaaaataaaatttcatgatattttaatttagtacttgtgttcaaaaaactttaaacttatttttaatactataaactatttgaatttttttaaaactttacaagattaatattgtaactataacgatcgaatattgtaatgaaaaaaatattctgatattttttttagcatgaaaattaacttaaaagttgtattaaaaaattaacggtaacaatcctcgtatacaaaaatgtattattgaaagaaaagtgtaagaatgcaaaaaataaaataaaaataaaagtaaataattttaagaaata

SEQ ID NO: 85158 - DNA, 1605 bp, Cannabis sativa
acggtaggcacccacccacgacgatgactggctcccttgtcggctcagttcggcgtcccgtgtccacccaccagtcggcgacggcgactattctattctctgactggctcagcccaataggacccgaacccgactacacccaacccgaaaaaacccgacccgataccggcacacccgcacacctgaacaccgggttcggttgtgcacttccaaaacccgaagcccgaaaacccaaacccgaaaccccaaaaaaccgaaaacccgacccgtgtgcacccctattgtggaggtttagacacttattaaactagtttcctaatcaactacttgatgaagactcggttgttttgccctctctttgtacaagccaatgtaaggccttagctgctactactccaaatgaggattgagaagaattgttggtcaacagaagtgagaaagagattgagggttgtacagagtttcgcgtgtttgattgtgaactctctagggtgagctgttttgtaaaggagcaaaactattgtaactagttctagtgttttaatctttctactccgatgcattgattcatgttaaacattcttgttcatttatttgcaggttttcatttactggtttatacttgatagtttatgttcttagtttagttaattgtgttcttgatatgtgttcaagacacaaaagatatggggttgtgtatttgttttttagtttcataaatattagaaatgcgagtaatactttttcttttattgtatttcaaacttcttgactatgaaaagcaaaccacatttcttgtagcttctattatgtgtttattgctatatttaagatcttagaaagtagaccttagaaagttaatgaagattttttcataatcattacagtatggggatgtaatgatggtctccgatgggttgtaatatggcttgcgaatgaacctaatattcatacctctccaaatgagaagattaacaataaagaagaattctaagccttaagtaaggcccagtaccctccttgacagtatctttatcaacctctatgaggtcaccaatttcaacagcaatgaatcgagctaagtcatatgatttacacatgaatagtataccatagacttgaatctagaaaggaacataatggagattatctggagtaataggaaaagaactctcaggggcagcaaagatggtaatgctttgggcaaaatgacatggttggccctctaaaattcttccctaatcaccctcacagccaaacgttacaagaaacaaaccatttgcatgctcagtaacagatacagggaatctgcactgtgatgactaaataccacagagggttgtcagagatggtctattgtaaggtcaaatagtatggagtttgagaagaaggctaatagtggcaggagaggatgaagaagagctagcatcataagtgaaaatggtgttttcatcagaaggaaggactaaagcactagaaacattgttaataaactcttcttgtaacaccctaaataattaggcacgctacccatgttacttaagaaaccctaatctcctaaacgggattactaatcaaaaggcgcagaatttaaacttttgtaat

SEQ ID NO: 85159 - DNA, 1077 bp, Cannabis sativa
aattaagtagctaaattaagcatataattaaaatttctcttttattattcgttattagatccgaatctaatggtataatatttttaaaattaatttttatagttaaatttatttagtttctatcaatgagtaatgcccattgagaagtgttccttttatatatatttcatatttttttttcatatatattttttattattaatgttatttaaattaagtataaattatatataataagcataattaaaaattaaattgacaagttaaataaatacacatttacgttctctaaataaatgaattgcattaatattctaaaattactctaagtgtttaagagttatgaaaacatgaaaaaatatatccttataaaagtagattaaaaaaataaatttcaatggctaaaagatttcttgagtaagtgaatgatttctttctattgcattcagtatgtgagttacaccattgattttccaatcaaccccctcacacttgtgaatggggtatttataggctctaatggcctgagttacatggtggtcccaaaaaagcaaactgcaggtgcaggaggtggtcttgtgcctcgtacccttgtctggtgtcaggtagtcccaagtcgcataggtggtgcatgcatcgtacccttggttgggtcctcagatcttacaagtgtggtgcatctactactcgtacctccttactttcagaaggcgtggttgtatgtttttcccttgcacaccttatcctttgattcctcctccaacgacattctcttcaacgcgtattcaaatttcacctttgctccaccttacacacacaacacacacaactcaacacactcgacacaacaaaacacacacacacacacacacacatgcatatgcgagccctcatgcaccatgggctcacatgcgagcccttacacacacacgacgcacaacatacacatccacggctcgcatgcgagcccccacttgcgcgcacacacacacaacgcacacacccatgactcccatgcgagccccctatacatgggctcgacgcgagcccccacactcgcacacacacacacacaca

SEQ ID NO: 85160 - DNA, 580 bp, Cannabis sativa
tccaaagtgtacaaaccactgctgattaacattgatagagttgcagttggttaaactactcacagagataatgttatatttgaaacttggtgcataaagaacatcagttaaaacaagatctttgttcacaacaataggaccactttgttggaaaaaaataaactcattatttggtagaattaacctgactttaggaatggaacaaacatattgaaaactctttatgttgttgcaaatatgtcttgtagcccccgaatctattatccaagattcgtttttaggattgtgatagtgattggacaagataatacctgttgctcccgaggatgaattgggatcagtagcaggtatgttgttcgattgattagctaaaagattcagcagttgctgatattgggacatactaagttgaggcagtagggtgtggctttcttcatttgaaggatttgattcagcattggcctgtacttggttagttgctgcatcctttgatctgttgttcttgaatcctgggggataaccaaggattttgtagcatttttcaactgtatggccgtgtatgttgcaatgagtgcagaat

SEQ ID NO: 85161 - DNA, 637 bp, Cannabis sativa
cattccaacaccatgtgttatctaatcctaatgccatctgggctaaattatgagcacctgtattcccttgtctacgtatatgatgaagggaaatagtgggaagcgaagataacacctgtcgaatagagtcgataatagctccatagcttgagagaatattttcatttgatcttaaatcagtgacgagatttttacaatcaacctcgacatagtgaatgttaatgtgattgtgtgaacaccatcggaggccttctagtaacgcccaaccttcagccacttttggtggcatctggcccatacgattggaagcccttgctgctatcacttgtcccgtagagtcacggacaagagcccctattcctattttaccccagtggctagagatagcaccatcaacattaagcttgaggaagccaataggtgggggtgcccatgtctcttcattgcaatctgtagttggttgtggccggttttgatgctgtttctgtgattcctgatataagtccaagtattcttgggcctcttgttgaattcgctttgagttttcacattgattcctgaaaacaaatgcattcctgctattccaacacttccataacatacatacaaataggttaaaagagtctggtgggaaatt

SEQ ID NO: 85162 - DNA, 561 bp, Cannabis sativa
  modified_base (514)..(515): a, c, t, g, unknown or other
gattggagtacgagatatgaaatgatagagcattgaaatggcttcaaaatgcaagttgaattgcatcaaccagatcattattgagtgagttatgaccgttttactgaaggttactctcggcccagcgcccaggttgacatcccagcacccaggttgatatctagcgtccaagttgacatctgaagtcaacctagatgctgggtgagtaggaaaacgtgtcggggatgtattttttttttatgcctaagtgatatttggacatcacttagccagtttttgtgttctggtgaagctggttaccatttcttggagatgttgctatttgcaaaaatgggagactcaaaactccctgatttcaaaataagtgactttgtcggaaaagtgaaaataagttgtgaatttgactcttttgacttcatagctctcaatcattataaaaaactagatgagcggtcgagaaataattagaattggataagcagattccaacgcactgttgggttttatgccctanntaaaactctttacaatctgattatttatcaatataagaaatttgaa

SEQ ID NO: 85163 - DNA, 911 bp, Cannabis sativa
tagcagagctaccgttatcaatcaatatatgtttagtaaaacaattcgaaataaataaagaaatgactaaagcatcatggtgaggattataagcaaatctgaagctttttcgtccacgaagctgatggtttggccgttgtacggctgttggttgtttctttggtctaccctctgtcctggctatttcacgtgcatgcctcttagcgactgagtatgttacgcccccgacctctgaccctccagagatgacattacgtgttcgagtgtgatgaggtggctctggtggtgttatcagccttttttttttttttttgcttttgtcacgattgtctttcccttgtctgatgaaaaatctcacaatttacctttgcgcaagagtccagccacttcataccttaatgctatgcactctggagtggtatgtccgcggtctttgtgaaattcacaccactttgttgtgtctcacattgttgttggttttttaatcttttcaggccacttgacctagtttcccattcccttcattactgcaactactttgacaaggctaatgttcaggctgtattcgggaatcggtcccttgtctaattccctcatccttcaaggtagtgttgacttgacaatgtaatcccttggtctgtgtggttgggtggagttctcgttatctctgtatgaccgtgatctgttggttggataaggttctgaataatggtaggaattccgttgctctaccctcttcggtcctctactgtcgcgagagtaagagtaggaagttgtcgattgtccattggatttgtcttcctcccacttgattttcggccaagctttggcaagcacgtcctccattgtcctacatgcatattttgtcagttctttgtaaaggtcaaattctacctgtaggcctttacgga

SEQ ID NO: 85164 - DNA, 1181 bp, Cannabis sativa
  modified_base (65)..(67): a, c, t, g, unknown or other
ttggttgaacatgttcacttctgctaagctccataatcttgaaatttcaacttcagaccatgctnnnattcttatggtcatggttcctgctgcagtccaccattctgtcaagcagtttcggtttgaaaatgcgtggttgagggaacctctttgttatcagattgtaaaggatagttgggagacttgtgagtctgctgatgttaggcataaaattcaattctgtggggataagctggctgtttggggtaaggaggttactggcaatttcaaagaaaggttagagaagtataaaaatgaagtgcagaagtggaagttgggtcaggatgaggtctctatagtcaattacaaacaagcaaagaaggacttggccaaatgttatgtgcaatgggaagttttctagcgtcaaagatcgaagcaattatggttgcaagagggagataataatagcaagtattttcatgcttcagcaactgcgagacgaagaaataattttgttgcaaagctcaaagatcgttcgggtgcatgggttgactgggatagtggtttgaatgatcttatggtttcttacttccacgagcttttttcctcttcccaaactgactggagagaagtcacaggcagcgtgcaaactcgtgtatcatcacagcagaatgctgagcttttgttactggtttcagatgaagaagttcggaaagctttgttccaaatgcatctggataaatcctcagggcctgatggaatgacccggggttttttccagaagtgttggccggttgttaaggataatttcagcaatatggttaagcagttttttcatagtggttctcttcccacagaccttaacaaaaccatttcggtcttaatccctaaaaagaagcaacctatggatatgggggatttaagacctattgcgttatgcaatgtgctgtacaagattgtgtccaaagtggttgctaatagacttaagagtgttatgccatttatcatatctgctactcaaagtgcatttttgcaaggccggttgattttggataacatcatatgattccttacgagattatgcatcacctaaagaggaaacgaagagaaagggatggtataatggcactcgagctagatgttagcaaagcctatgataagcttgagtggggttatctccgggcgatgatggtaaggatggg

SEQ ID NO: 85165 - DNA, 553 bp, Cannabis sativa
ttgttttttcttggatgcaaaatgttaggcctctttagtaaaccgctcaatccatccgcatcgcaagaaaaatgcagtttgaaattttttgaggtgtggccgcgggttgaatttttcctaaaccgcgcggtgcagtttgcggttttatatttttaagatgcggttcaaatcgcactgcaccacatattataaaaatattaatttttatatttatttagttcaatacgtgaaggtctagcttaaagcctactaattattgtattgataaaacttgaaactttttttcatatttatttcaatcttatggtatttttgacaagtgttgttcaagttttgttgtatttgtgacagtttaattatttggtaattgtctgaattgtactgcattgtaccattttttgcggtgcgatttttgcgtttttttagtttcgtcgtgtggatgcggtttggaaaattaacaaaattacatgtgtaggttgatttaaaaaaatagtcaaaaattatactcgcactgtgaataacattcctattaaatgtagaccaactaagtact

SEQ ID NO: 85166 - DNA, 889 bp, Cannabis sativa
agtagtgatcttctaatttatccttcacttgcattactttttcccaataccacccactatcttggtgtccaaccaaaaaaataaaaaataaaaaactcactatcttggtggatcttgtaatcccaccaattttcatctttcatataaacttcatgtacccacttcatccaaaggttgtctttcttttaagctaaaaaccaaaatggccccaatatttcactcttttatatttcaaaaatccaacccacttattttgttttttagtttacacacatttttccaagcaattaaccttgacttatcatgatcagctacaccagaccaaagaaaggtttgacaaattctgtctatggccttgagaaccttttttttctgaaagaatcataacttgtgcctaataagtgtgtattgctactagaattgagttcaccagaacaatccatcgatcatacgtataacaagtttctataactccatatgtgaagtcttgctaccattttctttgtagcaccttacagtctgcacgtgaaattctttttaagcagattggaactcttagataagtgaaagggagtttactttgcttcaaaccagaagcatctaatatctgctggacatctgatcattcatccttgtacaatatatagatgtcttgtttgtattttcctacagcccagaggttaaaccttttataacttcttagtaacagcagaatagatttcacatcgccatgacataataggagtaggttattcgcaaagcacaagtgtgttaaactcaagccttcacacgtgataaaacttgaaatctctcctaaaagcaatatgaacatgtattctagataggtattccattcatagcacaaataaaagagagggcatggggtctc

SEQ ID NO: 85167 - DNA, 500 bp, Cannabis sativa
agtaaaaaagtaagtttttttaaaaaaaataaacaattagatttttcatagatttggatgcaaatttgtgtatgttcatcaaattagttgaattttttgtatattttggataatgtgtgtttttctgtatgttctttagtggtatctgtgtgttttaacagtgttatcgttgagatatcgataggttatcgatacaatgtcgaccaaaattaaaaatagtttgagcataagaaattactattttgttactgtatatcaataggttatcgacattttgattaggatatattttgtaagaatttattggttatattgacttttgtcgatgaaatgtcaatatgttgtcaatagtaggttttgtttgaatagaattggtttttttcaatttattaagaatatatcgataggatggcgacgagatatcgatagtttttcgacaccctatgtgcaataatttcctgatgtaatctatcaataaatttttgacaggttatcgatat

SEQ ID NO: 85168 - DNA, 1026 bp, Cannabis sativa
attgtttggtaatctttagtttttttccaaccatcgaacaagagtttatctgcattacttagcaaattcatcaagaaattcctcatgtgcttcatcaagcaagtccattggatggtcatcgaaattattaccctcaatgtcatctacctctgctttcataatggatatggatcatttgttaaatgttacctatgtcaataccatgtagtataacttctattgaaatctcttaaatacacatgatccttaatcattgtaatatttccttttgatccattacaacaatctacgcatggacaatgaatacatttggggtttctagaattctttaggataaactttataaatgctttgaatcctaattgaaattatagtgtgtctctctcctcacgcatcaatgatttatccataataaaaattaacaaaaaaaaaaatcctaacaagcaagtttaagagaaacttaaatcaaataattttatcttaattctaccgaaattttgacagcataacaactataattgaatgttctaaaaaaatttaaagctactaataataacaaaaaccaacccaaaacaagataaaccaatcacaacaacactaatctcaatatttagtactaaattactaattagcggttcaatctcaatgtagcttaaatttcaaacaagataaaaaattttaagagatgaccactaatctcaaactctagatatttttttatgtctttattgattgagatgcataacttaagattttgaaaaatagtagcaattaagacaagagtttctttcatattactaactagtaactaatcaaaattagttactagttatatactttgtaactaaccggtttctcacaatcgattactattttttttaatttgtaactaactagtaacttgcaatgccctgtcccacagggacaccacgtgtgtgcttttaaaatttttattaatttaagaaaagtgtgatttaattaaaaacttttaatcaaacaaatacataatttctttaaatagcaaaa

SEQ ID NO: 85169 - DNA, 3166 bp, Cannabis sativa
aattatattatatataatattatattaattttcttataatattaaaaaaaaattctagaactaaaaacctaatatagtttcactccttccagccgtcaaaagattctcgacaacacctaaacttaaacctaaaaaaatttcacttcttctcagtcgacggtcgactcccactcacgtccttccgaccaatccatcttctcagtcgacggtcgactcccactcatgcccttccgaccagtccatcttctcaatcgacggtcaactcccacccacgcccttgctgccctcactaaccagttcgtctcctcagctgacgacgatccatttaactcgtctcttcagtcaacgaccatctctttagtcgacgatcgtctttacagtcgaaggtaagatgcgaaatatttgttgtgatataaatgaatagtctttgctttgaatcaacaccattaaaattatgggtttcttttaaaatcctacacatatacatatataaataataaccatggaatatgatataaaatgattattgggtttcgagtgacatggactgatattgagtgtggatggaataacaatgactaaaaaggattagtgaatgccacaaaatttaatttagttattggatagatttgagggttaggatttgtgaaatagaggtagtaggaaattttgtctggtccgaacatcttttaggaaaagtaatctggtagctcaaaatgatattgggtctctaatgatatgaaatttgaagaaaacttattaagtattggatttgataaaggtattgttgaaacacgagagagtcaacatcaatgataagaaattggacattaaattatgctatatgtagagttgcattgctgtgaattcccattaagctgttgatctttatttaattttcattggtcttttgtgtttgcttgattattcagaattatttggggcatttgcaatcaggtcttgcagatcaaaagtgtgtaggtactggttgttcaatttagaagatggtacatgcttgtatttttttttactgttatgacttatgggagtctaatgtgttgttggagattacgaaacaattgtttatttgttaaattttaaatctattttaattgcgttattgctgggtttttttctccattttgaatttttattgaaatattaaaatgcaatccgcactaaaacaaccgatccaatccgcactattgcggatttgattggattggatttaaattgctatgcgaatttgattggatccaaaatatgaaatctgcacttagtgcggattggatgttgtttgaccaaaaaagtgtggattggatcggatgaacaaccctagctgcaagaaataagattgttaagttagttaggcaataacactacaagaaaaattaaaaataggggcagacacattattggcggagcatgtccacccatattaatgggcttattaccagtagagttgaacaaatttttttttttaattaaaatgaacaatagcggcagacaatagttattaccggcggaatgtctcgtcggcagtgggcaatgtggtttgtgcgggaaaattcctgctttttttttttactttgaaaataattaatggcagaattttaccagcgaatcttgccgctaataaaacaataatttgcctgtttatactattacaagcagaacccactaatatcggcgggtctccgccggtaatagttttatatgtgtaaaaaaatcttaacactaatcatttcgtgactcttcttcttctctccttcatctttcatcttctcactctatctcttgctctctccccatctcagctcctatccaagatcccaccactatctcagctcatgtataaaaaaaaatttcacagtttctcaaatctgaatttttcactggcgtggaagctccgtccaagctctgtccaagctcccccgtagtccagccaaagcttcagtaacaattttcttcagatatatatatattgatatgtataaaggttaaatttatttttcatcatctctcaaattgtaaacattatcactaaatccaaacccactaatttttaatatatatcaaatccccagatcaaccatatctatattcatatcccatcccaacgagaccaaatcttaaaccccaaatcaaaactcacatagatctcttttagtataatgtatatatatatatattttatatctatatataattttgtttatatatatttatgtttatatatattcatgtttatttttatggtatattgtgattttagtataatttaattttttgtgtgggttgaaattgtacttttactttgtgtgatgtttttcttcttacaaccacttcagattggaaaatgtagtttttacttctttctcactaatccactctctctttgtctttattatttatttatttatttatctttatttggaagatttgtaggacttagttatatttactgtaaagcaacagaagaggaagcttttaacatcaaagaactgctgtatacgtttgaaatggcttcaggccaaaagattaatttccaaaaatcttcagttttttacagctgcaatactagtgttggtgtgcgtgatgctatctgtgacttacttggtatttttgaagctgatgaaaatggctcttattaggggttaccgtactcgattggaaaaaataagaatgccattcttggctttcttatagataaactgaggaaaaaaataaagggggggctgctgtcaagggctggcaaagaagtgctccttaaatcagttgcccaagcacttccaaattacgctacgagtgtttttttattaccaattgatacatgtaaggagcttgaacgactcatggcaaagtttcggtggagcacgtgctctaatcaaagtaaatgtaccagttggatgagttggagtcgtatgtgtccccacaaagatactggaggttagggattcagagattgactcatgattcttctttggtagggcgtgtgtacagagcaaggtactaccctgacaattcatttttaaaggctaagttgggtgacaatcatagttttgtgtggcgaagcatatttgaggcaaaagagtaattgatttctggtgtatgtcgttcaataggttctggttttttagtctctattcttatgatccctgacttc

SEQ ID NO: 85170 - DNA, 628 bp, Cannabis sativa
tgttacattgtttttactgctgtgcttattaagttagttattaagtctgttaaagaattagttagttgtcttcctttagtttcggttgtctagcattgtactctgttggatgttttctctgtataaataagaggtctctggccaactgaattcagttgagctttccatttcacttcatcttcttcctccatcatttttccagattttgctcaatcttgagtactgaattcctgtactcttacatggtatcagagccatggcgaatcatggcattcgagtcgaacctccagcaggtgaacgagttgagccacaacaagctcgagctgcagatccagtccctgaagctcaaaatccaattcccctccccaacaatcatctccttgccctaaacattcgtctcgatcgttcgaactacactatatggcgatctctggttcttgctgcggtcagagcctatgatcttgatggctatgttcttggtcatcatcctcaaccaccagaatttcttgcaggtaacattcacaatcctgcttttcaaaattggatgcgttttgaccatttcttgatgcattggctcatgaattctgtcactgaacatatgcttggccatgtcattcgttgtgcaacc

SEQ ID NO: 85171 - DNA, 810 bp, Cannabis sativa
tttagtgccaacacggaggagggggtgaaacagagactttgtcagagtttatctatgagaactgctccggatggtagtttctatttaggactgccaagttctatgggccgaaacaagaatgcatctttgggatatctgaaggagaaggttcggaaaaggctgcaaggttggggaactaagtttatctctcgtgcggggaaagaagtattgataaaagctgtagctcaggctctcccaagctatgctatgaatgttttcctaatccctcttgaaactactagggaaatggaaagtttaatagcaaaatactggtggcaatcctcatctacaaccagttcgggtatacactggatgtcatggaaaaggttgtgtcaacacaagtcaaaaggcggtatgagttttcgaaacttaagagacttcaatgtggcacttttgggtaaacaatgctggcgtctattaatcaatcaagattccttagtgtcaagggttttcaaagccagatattatcccaatggtactttcacttcggcctccctaggtcccaacccaagctatgtgtggaggagtatcttagaagctcaaaagttaatgtctaatggggttcgttggcaggttggtgatggtaattctatccctgttttaggagaagcttggctccctgatgaaacaaatcctagaattatgtctaaccacccaagtcttatgagcgcgaaagttacaaatctgatgaaacaaggcagttttgaatgggatgaggagctattgaatgacttgtttgagccaagagatcgtgatttgattctacaaatt

SEQ ID NO: 85172 - DNA, 597 bp, Cannabis sativa
tactgttctcatacccatacaaatagtgactcaacaagtaaacaaccgccatcttcatagcgtcaacatcatcatcaaaatctcccgccaaaaaccttgctctaacttgttcttgaaggactttaatagtcaactcaggaaacatcttcttcttgaacgacatcttgtgtttaaaatcgttcaagtcaaaagacccttctggacttaacccggttatcaatacaaactcctccaaaccgaaacggacaactctgtctcggattaagaaccacttttctacatcctccctctcctggtgaacctccctcactaaagcaaggtgaggaagggcaatgtgccacttaacaatgcccatctttaaaaactatgaaaaaggcgtcgtctaaaataacgccttttgagaagacgtaagatttgaattgatctccttaataacccacgggttattccaaatttggagcttacttgcgaaccgatgctcaagtttcatctttaagtaaacatcctaaaaaaaaaaccagctataaaataagatttagcctgtaacaacaacaacaaagcgcatcataaataaaaataactggttccataaacaaa

SEQ ID NO: 85173 - DNA, 898 bp, Cannabis sativa
gggcacaaaacccaacagaattcaggtttagatcttgatcatactctacaatcaaaaggaacaagggttagagattcgaacggaaggagccatattattatgttaccatcaatgtaaggttttatatacctttatgtgtttaatttattatttttaagaaattcatatttaggatggtaaactatagaattataatcaacatacatgttagcaaatttagatcctggtaaaatatttccaagataaataggacgttgatgatgcctcagtggaaacccacctgtcctaggttgagtcccaggtcgcctcctgttctcatttctgtgagaaggctccggttgatcatttggttgttcatttttagggggaccctcagtttcaccaggttgttcttcctgagccgtctcttgcctactggttcgtgagtcgcgaggcctgcctcgtggtcttctcactcctagatcaagttagttttatgcattgttttcctgtgccaccctggctgcggctgcctcccgttccaacttagcattttgtcagtttgcctcttccagatgtcgcctgaggtgacgattttccaacttggcaatcagtacgtatctcatgggatcgatcatatgcgccatcattcatgggttgagcaccaccaacacttatgttgggttcttcatttcttgtttttgggttttggccaccttcacgttgagtccttcttgaatgtgtggatcgtgtattttggccaccttcatgttgttgggtccttcttgaatgtgtgggtgttgggtccttcttgaatgtgtggaccgtgtagatcgtgaattgcgaggcctccgtgagcccattggttcttttctaggatggtgagtagtctcctcaggatgagtatcaacattttctc

SEQ ID NO: 85174 - DNA, 2675 bp, Cannabis sativa
gttctcctttcaaaattgaatggatttcagcttaaatcctctcaatgcgctctctacaagtaataatgtgtttaaagtgattggccctctcagacattagcctagcatatctagcatatgggtcctcttaagtgtccttcaaatcagaggacaaaatgtcaatgatatcagtcatcggaaacatctctttttggagttgctcccaaatgggacttagaactaaaaaattcaaagagacatgatgccttgacacccctatctaaaagttaaaatcaaggcattgagctcactagacattattacattgggttgtaggcccctacagggatgtaggtgtgcaaaccgacaccacaaaggtaacatacaaaccacgactgctagtataatagacacgtagtgtagaggtaacgaaaatggaagagatagagataatcgtggtacctcttgaagcaggaaagatcacaaagaaagggcaattcactctagagtgagtaaggatgcatgttatccagatcaaaatgcaagcgttaagacgccactccagggtcaaaggtaacacaagccaagtaaggcgaagacaagggtagaaaatatccaagtatattcaagtatgtatgaaaaaataaaaatagatgtgtatgcctaaataagagaaataaaagtggaaaaagtaacctggggaaggatcaaagacctcttggaaaaagtgaggaggatttgccactacaccaaggtgatgttctgacgtaaaaattcaagcaagggaggccccctatatatagtgggcacatcctcgataaacgtgaagaagataatgatcacactgcaacaaggaaaattccccaattcacttagtctaccagaaacttaaagaattcttgtaaactggggccaagtgttaaccccaaaaattagcgttgttaactctctacatttgtttcctcgtaactaaatgattaacaaggacatattcgattcccctactcacttgacgtgtatctctcaaagtcaccaacaatactaatgagcctcgggggacacccgagcagatcctagattagctctacaagttatgtctgtgtgcgggggtgcgagatgggggcttgcaggcaagcccatgtgagcgctcacatgcgagcatgcatgagtgtgtgtgtgcatctgggtgcaggggtgcaagacgaggggctcacatgcgagcgtgcgtatgtgtgtgtgcggatgcaggggtgcaagacgaggggctcacatgcgagcgtgtgtgtgtgtgtgtgtgtgtgtgtgtgtgtctgtgtgtgtgtgtgcggatgcaagggtgcaagatgaggggctcgcatgtgagcatgggtatgtgtgtggagatgcaggggtgcgaggaaaggggctcgcatgcgagcgtgcatgtgtgtgtgcagatgcaggggtgcaagacaaggggctcgcatgcgagcgtgcgtgcgtgtgtgtatgtgtgtggtgcaggggtgcgagacgagaggctcgcttgcgagcccatgggggggctcgcatgcatgcatgtgtgtgtctgcaagcaagtccattagcatgaaggtgctgtgtagtgccaagtgtgttgtttgtgtgaagaggggttaaggtgaaatttgaatacactttaaagagaatattgttagagggggaatcaaaggacaaggtgtgcgaatgagaagcgtacaaccacgcccatgcaagctctgaaagcaaggaggtatgagtagtggaggcaatgcacctgcaaggtttgaggacccgaccgagggtacactgagtcacacctctgcagtcagggactacctttgcgactgaggaccacctgacaccagaaaaaggcacgaggctcaagaccacctcctgtaccagcaatttgtagtccgaaagcgacaacttgtctacttaggaccacagtgtaactcaggccattagagcctataaattccccattctcaagaatgagagagggttggaaaattaattgtgtaactcagacattgaatgcaatagagagaaaacattcatccattaatacttgtatatcttttcatcttcatcatcatcatcttatttctcggtttaacttagattttacaaccactaagttggttgatgttaacagaaaatataaatgatgtcattgtaagtttttttttttttgggtattttttcactctaataataatcgtgaattaaaaaatgtcaaaaatatatccgttcaaaatgcttttagagcatctttaatagtaaaactttagaggatgcttggtgaggtgaacatattatatgacaaaatattgagatgctataccatttgagagaaaaaaaaatacaattctaaaaatttgcatggatgctatgttgtagcattgatgctattcatttttttaataaaaaattgaagctaaaaagttactgtagttaaaaattaaaatatatattaaataataatgtgtaagatcataattatagtattttgaaaaaatgttatacattagagtgtttttaaaaataagtgtgccaaaaataatatcgaagataaataaaataaaatattatatttttagatgatgtgtaaatttttaacatccttaaaagatactaccatttaatttagggccaagatgcaaaatggctccaaatctaacaattaagttaataaa

SEQ ID NO: 85175 - DNA, 688 bp, Cannabis sativa
attaactttatggttgctcttaaactattttcatttttataactatatcaagtaagggtgagtgtgttgtgggttgggcggtgaattgataaaaaatttaaccaactcgtaaagtacaattaagcaaaatcttaaccacgtagttaatttaatattccttaactgcaaaccacattatgcaaaataatatgattaaccatgattaaattactaattttatatattataaaataaaaaataataaacatattcatgaaagttttttactcagctgttaataatatatacagataaaaaaattaaaggagatgcatcttcattatcatcaacatgaaattatatatatttattttatattgaacaatgtatgttaattgttagttatggttatacaagtttagtcatctgggattggaagttgtaaatttggagagcatatataccataagattagtgtggatccaaaaagccatgtgcagaaggtcttataggatccgaaagattcttccaaataagcttgtaccacgtatggaatgtctctcccgatcggatagcttgttattaatccagaactacactcccaaacaacttactgtcaatcttgaaggttcttctaggaatgaagtcttgtacgtatccagatggcttgtgtacttatagagctttcgaattgtccatactgaaagtg

SEQ ID NO: 85176 - DNA, 715 bp, Cannabis sativa
tgggtccacccatgtttaaattattataagttcaagtaaacgtaactctattaaccgtgaagaaggatgataaattattataaaattcggtgtctcactgtttctattttcctctctctcttttcgtttatcaaatgacactttgttgaatatttttacgtttttctatatggtgacttgtggagatactcaactttttctatttctacctaaggtagaggttgcctaaataattgcatatactaatagtcaatctcatcctccttggtcaatgtaggaacaagtatcattctatcttttttcaaatctttaaagaattagcagttagtctagtgtaggttcactgtctcgacgctatctgtgttaaaattcttgatctaaatagtcaaatagttatggatctatgggtactatgccctattatatgactgattgaaatgaatttgtgcaccaccatctacatgacggagttaccttccattttttattttgggtatattatattaaatatatttaggacaaaatgtgtcctatgtatatatatatataattaatgatatataatttatctccaaattaatttcttaagaattcgtcacatcacaatctctcctcctattcactcaatcactgaatctaaataggaattatttcaaaaataaataaaaacaagaaaataattataaaaatataattataaatatttttacaattt

SEQ ID NO: 85177 - DNA, 555 bp, Cannabis sativa
  modified_base (319)..(341): a, c, t, g, unknown or other
ttctattggattttgtatatatcttaatttgtattttgatatgatttgacataataatacatatgaatatagacacaatctatagatattttcttttaaaaaaaatatgtcgatacactctcttcactcttgtattaatcattgaattaataattggataaattggatagagtgttataataggtttatatatagtttagggtgctctacttattttggcacagaaaaattttatagcctatttttatattcacgtacgttatagctatttaaaatatcttataaaattttgagaattttgaaataatttacaatatannnnnnnnnnnnnnnnnnnnnnnttttacacgcgtataaaataaatagtcacgcgtacaacatactgtttgaacgtaatttttggcatattaaacttaatccttaaaattttataggatattttatataactataattaacatgatcatgagaaaaaatttgactaaaaaattattttaaatattaaaatagatatagatatattggtgcattccttttaaagggtgcattatagaa

SEQ ID NO: 85178 - DNA, 712 bp, Cannabis sativa
ttccttagtttctaaggtgacagtcaataccagctgctgtcaataaattgataaacagatggtagaaagatgagatggctcggaggttgtagggtgttgacctttcaaggagacttggtgttgatcactatgtaagtagtcatagtagtgttctattgtggggtttttttgcctattagtggtaatctgatttcaccatagggagagatgtcagctctgctgaaaccatacattagttgtttgtatggtctgagattcttgcaaggacaaacccattttttccagggtatgtttaaataggatatttgacgatgcttcatcattaatcatcatatttttcatcatcatattggtgagtcaaaccttactaatgagggggtcgttctttcatcgatcaaagatgtgattagtgcttgacgttgttgggaaccagacaagttgcctgttattagaaagaactagacaggcaagtggaaagttgaaaggttggctcagagatgcctcagttctgatgtttttgtccccaagcatcagtttcttagtgggtagagagaagctttgaagtttgtttttgtccctaagcatcagcgcttaagagcgtcgtcgggtttttgagctacaattgatcaataacaataaagtaccaacaacctttcctcaatgcatttattcattagacattgaatttttacaacatcattgtagctagatt

SEQ ID NO: 85179 - DNA, 871 bp, Cannabis sativa
taattaaaaattttaagtcgtaaaattgtaattataagaattttcaaaaatattatttttctttttgtaacattttattcttgttagatattattgaaattattattattattattattctttctcaacacctataataaaagctttcatcgagtacttttcttactatacttttctttggtttgtttagtaacaagaacaacacatcacaagtggtcaagtagttaaattgatacataaatacatatatataattactaaaggtgaccttagaattttccaagtcttctaatttggccaactacttcggttcatgaatatgaaggtcgactaatattacaaaataattgacttgggaaaaattgtttcattatataggaatattctatcatagtgacattattaattatttttgtccctactgatagtgataggaatgtctttattttaagagtttagagagatattttatttttttttgggaaaatattggtcaaatttaacatttcctatgagagatggctttatatgttattaaaaatagaataattagtatgttttcttcgactttcgacactagctaattttatctcttaaaatatatgatttgttaaaaattctctttaaaatataaccgttacataataatgtctttgtattagagttttgtttcttttaccattaaaaaattaacatttttattgccgattaatgcaaaaaaaaattcttttattaaaaaatttgattttaaaaattattaaaaaaaattaataaaaatatcaaaacaattaacaaatattaagtttacttaaaaaacttaaattattttgaaaaaaaaaaatttcatattttattttatttataaacacat

SEQ ID NO: 85180 - DNA, 737 bp, Cannabis sativa
atggggaggagaagttcggccagtggggaaattgttattaactttttgaactagggtaatagacttgatttggagcaacaaattactctaatcaggccttttagtaaaagtgaggtgatgaaggctctgtttagtatgcattcatctaaaattccttgattagatggctttggatctgggttttacaagggattatgggagaatataggagatcaaatctctaacactattttagagttctttcaagatggttatctgcctatgtcgctcaatgaaattgtaatctctctaactcctaaggtggctaacctgaagattgctagtgatgataggccaatcacttgttgtaatactctttataaatgtatcttgaagatgctttgttcaaggctttcagaagtgcttccctttcttgttcataacaatcaagggacttttattaagaatagacttcttgctcataacattttgatcttccacaatcttctcaaagggtatactaagaagaatatttcagcaagatatataataaagatagacttaagtaaagcctataatactattgatttacattttatgaaggagctgttgaaacatctttgctttcctcgagatttatcaattggattatggtctgtttaaaaggaacaaactacaatcttcttatgaatagaagaattcagggttccttcacaggagaatgtaacgcccttatacttaggcactagcactttgcc

SEQ ID NO: 85181 - DNA, 584 bp, Cannabis sativa
cgaccctcacaatgttttgaactcccccaagggaaaaatccataggggaatgcatttcctcaaaggaaacacataccctaggagagtagggaacatcgaagcatgtttgtacatcagggacaaaaggtaaaaggtggtcaaagaaagagagacccactagtggacttgagagaaataaataatgcaaaaaaaaggagagattagagctcgcatcaactcctaaaagaacgactcaggaaatgccaaggaaattttaattgagggaatcttggaagagttagccattttcaggaaagatttcgctaaagtgccttgaagatagaaaagagatgattttgaatctaattgtgaggatcgtgagctatgtgctaggaatatcctagaggctgaactctgtaaaatctttaagatacaagaaatgacacagataacgggggacatggaccctaggaaccatttttcatggttcaatagtgttatgatagttttaagactgagtaatgatgcaaagtgtttgtgcttcccgttaatcttgggaggatcagaagagtggttcaagaagttagacccaggtttcgtgagtt

SEQ ID NO: 85182 - DNA, 801 bp, Cannabis sativa
  modified_base (515)..(517): a, c, t, g, unknown or other
cacttatctttttcatgtatttcttaaagtttttagttaaaacatcaatttcatcatcttcttcatcatctgaaatttctttttcagcaacattaaaagtaataactttacatttatcagcaatggacttgggtttgttcttctgtgcttcatatttgttgattcaattcagaagtacgcaaagaacccattaattcttccaccttcattgtgctaaaatctttagcttcttccatggccaaaagtgtagtattaaacatgtttggaagaactctaacaatttttctgacaagaacagattcatcaagcttttcaccaagagcaaaatattcattagctatatcagatagcctttcataaaattcaattagggcttcattttcagacatcctaagatcatcaaatttggtctgaaacataataaacctagaacgcttaacatcagatgtttcttcaaactgagtttgaaggatctgccaagcatccttagcagattcacaagaagatataagctnnntataaccttcacctactccattaaatatagcatgtaaagctttgctattataagcagacatttatcatcatcttcagtagaccattcaagttcagattttaatttagaattaccttcaaaatctaccacaataggaggagaccatcctgaaagaaccatcctccatgttttctgattaatgaacatggcttagagaaaaaaataaagattatccaatgattgtgaaaaaatcaagaacaagtttcattccaattttgattactccaagtgtgtgtgtgtgtgtg

SEQ ID NO: 85183 - DNA, 1226 bp, Cannabis sativa
ccaattccgtaatgggattccccttaccactgctgccgctgctaacttcactcggggcgagctcgccaccgctttacgaaaggtatttcattagtttttcttttcaattgttgtgaattttgtttttatttggggattatgctccactttaattcttagttttttgcaatgggtttaagtagatggatagtctaggttttttttttggtttgtttatttgaatatgtatggggacgttcgattaaatgtaccaatgttgaagttaaaaattcaaatgattgattagattttgaaaatgggtttaagcagatggacattctagggttttatttgcttttagtttattaaagatgtgttttggaaattcatatgatatgaatcaatgtggtaggaagtgaatcagttttgaaggagtggttaaaattaaaatttcctttgaattgtaaattaatttccaaagggattagggtaaattacaaagatgtttgcacatggtctttcttttgggtttgtttgatatgtgattcgtgtgcaagtgtgaaactgaaagtcaggttggcaggttatggtgcttatagagactgagactatatgtgactactagtagtaccctgtattttgtttgatctgaagattagattaggttcctaccggctacagcctatttaaattttttgattgaaacccctttaactcactttagattgtagattgagagaaatttcaaagaactcgagtgtattaaaggcattatggcatttgggtagtgataagctttggttcttttcaattttagctgtaactttttattttttttgttttatttaccttatgagtttcaaatagacgttgcttagctatccgaataacaagttacgaagttatggtgatgtagtgactacatactatatgtgatactgagttctcctttcctgtgtttttgaactgattaggtgcctatggcttatttcattttggtcgattctgacattctcagtattgatttcttctattagttagaagaatgcagaattgaaaaaagaagttgaatttagtaaataaacatatgaaattagaacgactttacttcacacttgctgcatagtttctatattttcttgtctcctatattcgttttgctgtcttactcccatttgaattttgtctttctagttagtagaatatgtgatacttttaaatttccatgcaagcattctaaattcatt

SEQ ID NO: 85184 - DNA, 750 bp, Cannabis sativa
caagccttttcactagccgacctaggcggtaaaatcagagtttcaaaagtacatcattggtagtccccaaccccgcttggtctagtgtggcccgaacctgtacatacatcaccgaactctcgcactcatggctgatccgagacacatttaccctttcctgcacaatagagcacccgtgagccaagcctaacaaaacacgaaaaaatatcaataatcataattaacacatcgaacaaatattattgccatttcacatttttctgtatgacacagactcacgtgttacgctcacacacctatttgtgtctatgtggcatagacctacgtgtcacactcacacgtttaaatacaataatgccttagaacggttcatctcgattctaattaccgagtccgacccgattatgcgttgaacgcataacccttaatctcaatatgcatatacatcatggcataacaattacgcatttacaattcactagggtaataaccctaggccaataaattggtcacttttgggtaataaccctaagccaataaaccgctcactttagggtaataaccctaatcctggtttctaattgctcgcatatatcacatgcaatataagcgccagtacacatgactctccatgctaactactgtcttacctgatgtcccacaaaattggagattccaaatgcctgggtgctcctgaccaagtgtcggtaatcctagtcacaatttcaagattcacaagtatagggttaa

SEQ ID NO: 85185 - DNA, 501 bp, Cannabis sativa
aaggaagagtaatggtggagaaggaccattctctcgaccataaaagaactttgttattttttgaattatggaaagagagagaaacaaggtatttatctaacaacttgcattgtttattctaactataactatgaatatcaaaaaatttatttattctaactgcattaacaacttggattgttttatcttgctatcaagttatcaacttggattggttgctacttacactgactcaaacagttttcttttttatgaattccttgtcaacaagagccttgatcaatacatatttggtgagtaaatcccattaaaaggatttttacacttggtgccacattttgccatttttttttacatttttatcattattcggttatataaacaattataataaatttgtttttcaatattagattttcaaaagtttgatgattacaaaaatacctatgcatgcttatgtcatggattttctcccatattacacaccatccctgacatctt

SEQ ID NO: 85186 - DNA, 670 bp, Cannabis sativa
tgaaatttgtggtgatttttcggattaatgtgtttaaggttgtgtgaatatgagtattatcactctaaatttgttcatatatgtcttggaaacaatcttttacattttctattaaaatatatatgagctttaacaatggagaaactcattttggattcattattttttgatgtattattctgtattttttgagtaaatgggtattgaaaaatgatagaggattgaaaatgggacaaaacacctcaaacggcgttgaatttggtggccggatgtgggagatatggtcgggtcacggaggagtcacgaactgggtcgcgtgacctgagtttcagacccatgggaattttctgggcgaaagggacgaagaaaaatgacgtgtcatttttcagcctttgggaacaatcaaaaaatgacgggtcgttttcaagtcttcaggaacatgcaaaaaatgatgtgtcgtttttggttttcggattttcctcaaaatgacgtgtcgttttttggcttctggtatttgtctcaaaacgacgtgtcgttttgtgtcttcgggatcagcctaaaaaacgacgtgtcgtttttgtccccaaggccttcccgtgaacgatagtcgttcgtcgtccccttgagctagtcgttttgtccaaacgacacgtcgtttctgtcaaacgac

SEQ ID NO: 85187 - DNA, 568 bp, Cannabis sativa
ttaattcttaatcttaaacgctaacatggattgtccagtgtaatttaatttttaaggactcatttggtacatcgtgttgtatttgtgttagattgtattaaattgtagtagtattatttaatatagtacaatgtttagtatgcattgaattttattaataggttgtataaacatatactatttacataaacttgaccccaaccacgaccccgaccatgaaccggggtttggggttcgaatttgagtctaggctttggggtcgcatcagggtccgagtttggggcctagctagtctaggagtgcaagggttgggttcaggttcgaggttcatgttcgtgtttggggtctggtttggggtctgggtcagggttgaagttgggagtggggttgggtccgggtccaggtctaggtcggggttcgaatgcagattcgagactagggttcgggatctggatccgggaacgaggtttggtatgggtccgggtttggggtccgagtctgaagtctacgtttggggtttggggccgaggtctgggtttgggtctagggtttaaatattataatacaa

SEQ ID NO: 85188 - DNA, 999 bp, Cannabis sativa
tcattcattatatttgacccaaccttcaaaaatattgatatatatacgttcatatatttgagttactatatacatatataactaagtttacgtttttaaaataaaaatttattgtatatataattatgtattgtacttttactttatttgaattgaatactatgatatgtgtacattttttttatttcggtgtctaagaaaatttttcaatctattttttaataattgtatacattctagttatttcagacaatatgtataattttaaaaaatttagaataatttaaaatattgaaaacaattttcaaacggtatttcacacgcgtataaaataatagagtcacccatgcaacatgttgtttaaactatattttcggtgtgttaattttttctaaatttcttaaaattttgtaaaatatcttaaataattacaacgtacacgactatgaaaaaaaaaattagactaaattttttttgtcgaatgttgaaacagataagagtaaaaaattttctcgaatgctgaaaccgataagagtaaattagtgcatcatttctagaggtactttgtataattttcctatgtatatgtgacatgtttcaactaaaggtgcattaattatttattttatattaggtgagtaaacaaaaatagtgcattcttacattgatactagacacatttttttattctctctttcaaaaattacaagtaaattgatgagttttctaacaccttattaaagcactaatcaatactcaagttctatttttattttcatttcttgattcatattttttagtttattgtatataatatttataaaaattaataatgtgatattttcttccatcaatctatacttaaaaatgagttttagtgatcagaatatttaatggttttgttggatgtgttctactgtcattcgatattggccccctctacaatctagtcctggctccgcccctggccctatatttacaggaccgtttgagatactc

SEQ ID NO: 85189 - DNA, 608 bp, Cannabis sativa
gtgctcaatttttgtagtttgaatttgtgtactgtcatacgaccaattttaaatttctcaaaaaaattgaactgtacgaacctacctccttgtatgttttatctttgatgtcccactcgataggcagtggacatttgagatttttttgtttttctcgtgtgcttaatcccttatggagtccacgtttctttaaaagagttactgtcatgtttaaatattcataagttagtatattcacaaagatattaataacatatgttaaatattttaaattatataacctcacacacagtcagtcaatatttgtcgcactaagaggaggatcacttcctctatcacccccttgagaaccagcaacatctgttatatttgagaaatataagtagtaaaaattttgtaataatattaatgtcacaatgtaataaaataccaattaatgatatatatatacaataaattactacttattcatcactataataatcatcatcattatacttctaaattatcaattttagcgctgtgcccattgtcatcttcatcttcctcctacgcttcttctttgtcttcctccactactttttccatctcgtcatcctctacttcat

SEQ ID NO: 85190 - DNA, 1021 bp, Cannabis sativa
  modified_base (981)..(996): a, c, t, g, unknown or other
aaccttcttctcgatgtttcgttccataatctatttccatgtgtgtaatgttcttttttcctattttttctacatcacacgaaaacacactacctttctcggatctcaagtaaggatattccaattcattaaaaataacatttctaggaatcacaatctttggtctacccttcttggaaatgtaaattatatactccttggtacctaaggcataacctagaaaagttcccttaacatatttaggttccaacttatcaatagattgatgtacatatgttatacacccaaaagctcttaaatgcattaggtttggggttttgttgtaccgcatttcataaggggttttaagcctataactcagtttgtgcttctatttatatggtaggttgtagttgctagaccttccccccaaaattgtttttctaatatgaaactgaacaataagcatctacctttattcagcaaggttcagttcatccttttaacaatgccattttgctctagggtcttcactacggttctatgcctagtgattccatcttttgacacaacatgtcaaattcaaagttaataaactctaacctattgtccgccctaaggatcttaacttttagatcagtttggttttctacctgagttttccaaattctaaattgttccaagcacttattcttggctgctagtatataggtccaaacacacctactataatcatcaactatagaaagaaaatacgctttgtatgacccttaaagattagcatgcacatattcaaatatcttttagttgtgtgccttgccatagtgaatttcagcttatgttgtttccctaaaacacagacttcacaaaatggtaagacacaagattttaaatttttaattataccttatttgtgcagttcctttgaggtcttgttcactgatatgcccaagcacgtgatgccacaactgcatatttgattctagccctttcaccaaactnnnnnnnnnnnnnnnnacagtttctccttggagaacatata

SEQ ID NO: 85191 - DNA, 2169 bp, Cannabis sativa
agattgcataaaaagtgatgctgaatggagatcatttgttactcaaaaaactagtaaagaacatatggtaagattagaaataagtacttggatattagtgtagattaagttatgttttacctaatgttatttattttttattaactaggctataagggccaaatttcaagagagaagaaagaaagttgttccacacaccttaagtcgaagaggttacgctcgaacaatcgatgatatggtaacaattaacattttgattgattgtattttgttttttatttttatattccttggttaaactgtccattgtactttgtagaagaaagataccaaagaggaaaaagtatctaggattgaggcttttcggagagcccatactaagaagaatggtgaaccaattaacctgacagcgtcgaaagtttttgtgagtacttattaattaatttttataattacactcattttctataattgtacttcagccttactcattcatatacagggagaactggataacattatacgtgaagacccaaactctgaaattatagaaaatatagaggaggatgcctaaacaaaattatttggtgacccaaaatctggtcgtttaatcgaacaaggaagggggggtaacaagatcaaagttgaatgttattaatatgtctaataacaagatctgtatgaagctcaaaatggcagaaatgttggatttacttaaagaacacttggtaacaatttattttttcacttatacaactcaacatctgtaattttcaaatgaaacatatctttcttttttaatttagggtggtaaagcaacaccaagtgagggacaatcccttaatgctacccaatccaacaataatctttctcctaaggtaaattatcaaatttattattggttaaagaatttttttgaagttatggatatgaaagctaatagattatatgtaaaatcaatttttgcagagtgttggactaaaaaaggaccataattttacagaagcgatgaatgcttgttacatgcttgattggtcagatacaatagttgctgaaggtcgttggatttctagtgatacaaacatagagatacatggacttccccttggaccagaatttatgcggttacgggttgatgttgctatcgtcccaggtgcttatttatttcgtcctaactatgtgatgcttacgatacaagaagttgttggttccacagttgtatggccttctaaaaaagttattccaagaggtatttaattagttataatatgattttatttatttcttaaaaattagtatttgttctaaataagattaatatttagtttaatacatgttataatttgttttatgatagtattttgataatatttcaactatcatgatggtattgtttgtttaaatatgttgtcatatagtaaaatctcaattttatttatcatataatcatagtacatatttttatcatggaatacatgtgtcatttttccaagatttaatttttcaataaatatagaactatagtttgtgctttgatttactcagagtgttatttttttttagaatattagacttgattttgctgcatcaatgcttgttaattacatattaataccttttcacattttgtgtcttctagtgagttaaattctatattatgggtgatcagaacactgtacaaatatttttttttccctttctttatcaccttattattatctattattgaaaattcaaataatgtttctttctttgccttcattacatatgtatttaaattgatataaaatctcatatgagcttgattaataatagtattagctatgtatgaatgatttcatactttaaagcctaattagtttttcttttgttttacttttcagatgctaaaagtgaaatgcgaatgggcatttaattttgaaggcattttgtggtagttggaagaacctttagaactgttgaaagcttaagactactttcttgaatattttgttgttcgataactagtattgaatggtttaagacttttagattatttattattttatttaatattttttaaggattaattatttaatgttgaatacatatgattttatgaatattttatgaatcatataattagtacttaaatatatatatttatacaatttataatgcactatatgt

SEQ ID NO: 85192 - DNA, 688 bp, Cannabis sativa
aaacaaggattcgattgattggtacttagctatatcctcgtgagaatgatctcacctacgtattacttgttaaaacaatacatatacttatgtgttaaaataccacaacaagtataccaaataattatggaatgatacatctcaattactactagtaagacactaatcagtgtagtacgtatgattataatttgtattattatattaatgtaagaatacttacattgtataataaattgcttaacggatgagatagtcaaaagaggggtttaaaatgcaaccacataattggctatttcgccaagttggctttcaagcccttttactctaactatttcttcattctccttgctttggagtttatcaacctaaacctgaaagaaataaaaagacaaacacacaaaatttaattacttaaatgaataactcagtgtaaaataaaacaaactaaaacccaacaaagaaaatgcaataacttttatgcataagaaataagaagaagatgatggtaaaaataagataataatgagaaagagattacaaattcaataactcaattactaaaatgtgtaaaacaaaacccaacaaataaatattatataaaaaattagattaaaatttgatacaatttattatttagttgtcactatataaaagttatgatttattttatgtatataatttaaaa

SEQ ID NO: 85193 - DNA, 1031 bp, Cannabis sativa
atataaaattaattttttcttggtttggtagggtagatagattagattagtcacaataaaaaaaaaaaatacttttagtatggtacatatttgattttgtttgtgtttaaaaaatttgttattttttttttaaataatttataaaagaaactaaataattacttttgatttcaaatatattcttcggtcacggtaaaaaaataatacttgaggagtagattgcgataatattatttttaaatcaaaataattaactgtgtaattattatttattttttaaattataagaagcaaaagtaaatatagatgcaaaagaaaataataaaaaaacaaaaaaaaattagtcaccataaagaaaaaagaaaatgatggggaaaaaaaagaataaatgtgtcacttaaatctaacactaacgccagaaaatagatagtatatatttgaatatatatgcggtacaattacagcttattgtttcatttaaattattgatggtatatttattaattattttataattaagtatataattaaaaattccctactcttgcacaagggcccacaaacaaagagtaccttagagacactcaagctaaccctgggacttcgactaagacttacaaaggccaaataagttaagatatcctatttgagggccccataaaatttctaagaaactcataaaaatactaaccaactatttggtatcagaacccacacccaagtgtccccaacatagggtttatgggcctgcgcaagagttttcatcctacagacctcaatccaacaacgaaaccaacaaggacttgaccttatttagtcataaaatggctagaatttgaacataaaatcaagatttcacaagaaggctactccataatgcatggctgacatgtgccatgttttgccattaaatgatggcacatgtttctactctcaaaacaccaatgaatagttattcaaatgtggtccctcaacactaatgagtactgaaaaaccgtatttttacaaatgtcagttatatataagaaaat

SEQ ID NO: 85194 - DNA, 564 bp, Cannabis sativa
ataaatttcaattaaaatttgcttaaatcaattaactaattatttttttcaactaattcattaatcattctttttttaaatatttaatttcaatttttattttattatttattaaaatgtaacttatataattaattatttaaaagtattgaaaaattaagtggatatttttcagcctaaatttaactttcaattaaatttatatatataaaaatatgatagaaatttaaatgcattagatttgatattttaattaataatttagtaatagcaacaatgcaattctaataatgcaagtttaaaatataacgtttggatgagaatcataaaaaaaaaaaacaacagttttaaaattagaagcataatttgtagaatttaaaatgaagtaaaaagaatttaaaaatgtgtataaacccttctatacatagaatatgtgctaccctccacctttccttacctctcaaaaacattagaagaaaggaatcaaaaagaacataaaaatttatttatttatttattttaaaaagtcaaaaagaaacaaaaggacactacgaactaccaaat

SEQ ID NO: 85195 - DNA, 1016 bp, Cannabis sativa
  modified_base (27)..(42): a, c, t, g, unknown or other
aggatgttaatgaaacatacatggtannnnnnnnnnnnnnnngtaaaatatttccaacaaaaagttcagctgaaaaatggatctttcctaacatagaaaagagtaataaaaactgaataaataaggtaataaaatcgggtatgaatgcaaatcaatcttaccataaaaaaaatatatattttggtatctaatttgccaaaaaaagactttacatatatgttatatatgtgtgagatatgtaacttatatagttgtgtaataattaatatattatgggtatgttacacatgagatgttgttagtaacatacataatatattatttaacataagattattatttgggagttataattttatgtatgagagttatatattaattttatgttgatatatgcgttatatagtatgatactaatcttaatagtaatataatattgtttattactattgatgtggagatttcttggaattccttttccaatattgattttgagaaaaaaaattgtgacttgtgagaagttacattttgtgagaattaaaagtaataattatctcattttatgagataagaaaagtaaactatatgagagttacacttatgagaattgtcttgttacagcaagaataaatagatcaaaagttgatccaaacttgtgaaatgggtcataaattggaagagcaattttagactcaaataaagtaaatcaatgtggattcaaaaaaaaaattgtggaaagataataaaattggagaagtaattttgaatcttaaataatcaaagtggtgaagaaaattgatgagaattttgttaactttggtgtaatatttgggttaatctcattgagaagaaaacttcaaaataatgggtaaaaataatcacattattttgtaagtggtgatatgagtttgatattttagttttgttgagaaaactaaaaatatcaatggtatttttcaaagtaaccttaaagagtcatttcaagaggaaaatacacaaaagtgatattttatata

SEQ ID NO: 85196 - DNA, 1004 bp, Cannabis sativa
tcctgttctcatcccaaagcctaatggaacttggagaacttgtatcgacttctctgatctgaataaggcgtgtccaaaagattgtttcctacttctcaggatcgaccaggtagtggatgcaactactgggcacaagcttatgtcatttatggacgcatattctggatataaccagataaaaatgtacatcccagatcaggaatatacacacttcgtaaccaacatgggactctattgttataaagtcatgccgtttgggctgaagaacactggggcaacgtatcagcgactggtaaacgaaatgttcgcaaaccaaatagggcaaaacatgaaggtttacgtcgatgatatgttggtaaaatcgataaaaagtaaggatcatacctcagacctcgcggaatgctttaaaatattaaaaaagtataacatgaagctaaacccaaaaaaatattcctttggagtctcccgggaaagtttttaggattcatagttaatgcgaggggtattgaggcaaatcctaaaaaaatcaaggtattaatagacatgccatcaccaacgaagcctaaggaattataggctctgacaggaaggatggatgcacttaacaggttcatttcgaagtcaactgataagtgtgtgccgttcttcaacatattgtgaggcaacaaaaagttcaagtggacaaaagagtgcaaagaggcctttcaaaacataaaaaggcatctagcaacgcctccagtattggcaaaaccaatacttggagagacgttatttctctatttagccatctcggtaaatgcgattagtgcaactatagtgcgagaagagagcaagcaccaacaacctatttattatgtaagtaaaaggttactaggggcagaacctagatattgccctctagaaaaactctcgttgtgcctagtccatgcatctcgtaaactacggccatacttccaggttcaccccataaaagtgttaaccaatcagcccttgagacaagtttt

SEQ ID NO: 85197 - DNA, 505 bp, Cannabis sativa
accaatgaatagagcataggatataatagtataggtatataatgtaataattttttggagtatatcaatgattgattatttggtggtcgattgccattgtaccatatggataagatcaatgtatctataaataaaggatttgatgtatgatgcataatatataattattgtagcaaaacactataccaatatggaaatatgaatctcaccaaccacatcaaatccatactgaatattaggatatatatatatatatgttataggttataaacacacaataccaactaaaaaataggcaggaacaaaaaaaataaaaaagataaacatagctgaaactaaaatattagagcaaaaaattagaaggttatggaaaattctatctcttttgagtgtgttttatgtatgaaaatatgatagtgtgagtgtcctttcatcccttgtctttggtttgattgtgagtagtgaatttgttactgacagtttctaagattgttgtggtacgggt

SEQ ID NO: 85198 - DNA, 2108 bp, Cannabis sativa
ctaaagactctcgattctcctgcgtggaatcaccaacttcttccacaacactctgatgtaccttcctgccatccaattccttatttctctcaacagcttccataaacaaccttgcccactgactaggatcagattttgtagaatcatgtttatcaacaccacaaccacctttgttgttcttggaaacagtgactacaggcacacgagcaccaccacttttagtcttagtagcaacactctgatgaactttgccaccatccaaatccttggccttcttattctcattgcatgatttggagactaaagactctcgattctcctgcgaggcatcaccaccttctttcacaacactctgatgtaccttgctgtcatccaattccttttttctctcaacagcctcccgaaacaaccttaccaactgactaggatcatattctgtagaagcatgtttatcatcaccacaaccacctttgctattcttggaaacagtgactacaggcacacgagcaagactagttttagtcttagtagcgtcagaatcaagtctcaatttatcatcctgataatttagtaccaccccaccagaacaatctctcttacgcaatcctgagctagtggccactgaaatgctagacaaagaactatcccttgcaccaccaccttctgccgcaacactctgatgatctttgctgccgtccaaatccttgaccttcttaaaattggttatgacatctccattcttttgtgtggcatgaccaccttcttccacaacactctggtcaaccctgctgccatctaattccttttgtctctcaacagcttccttaaacaacctcacccactgactaggatcacattttgtagaagaatgtttatcagcaccacgacccactttcttattcttgcaaacagtgactgcaggtacacgagccacacaacctttagttttagaaacatcagagccatgtctcaaatcatcaccctgataattagagatgaaagactctctacttttctgcgaggcatcaccaccttctgctgcaacattctgattaactgtgctgctatccaaatcattggcactcttgatctcttttggaaaattggagatggatgactctctattatcctgtgactgtgaggcgtcattatcgctggatttagatgatgaagaaccacaaggtcccttacccttgtgaagtggcaagcccttctcattatcatctactccaaaatcggtacctttaaataaacagactttcttggcaagttttgaatcctcaatttgaatatcgactttcctaccatacccatctccggattgaagctccgaacctccagaaatcactgaaatacctctcttaagggcgcggttggtcatattacagagtgcagaacgggttttccgaaactcgtgtgtgtcgctcatcctaaaaaaaaatcaccaacgacaaattcaatcaatcaaactcagtatacgaacttcaaaacctaaaagtattcgtcgagttacaaaaacaccgtaaagtgcatgcaatcaaagcaaatctcaactgtttattacaattaagggggggaaataaagcagtgaacgatagaggattaaattggtaagcaaaccctaaaatcagtactgaccttggataaatggttaggaagatgggtcgggaccgggagacatggagaagcagtaatgatgaaagaaaaaccaatttgattaggcgggagaatgaagtgaatcgaagactgacccgcctttctctccttttcaaattcttatgttgtttatttcttttttcttttaattaaaaaaaataagaaattaaaataatttgaataagaagaagggtggtgtctgcgagagaggtcgatccataagcgatattgtcagtcactgaagtcaatccctcggaacgaagatcccacatcaattggatggcctacgtgtatatcatatatgaaacatttttttgaaattttttttttttaaaaaaaaaaaagacaaacccattcacatttttaggtatttttaactaggtgtttactttttttatatttttaatacttattatttttttaaatatttttacaaaattatttttactttt

SEQ ID NO: 85199 - DNA, 502 bp, Cannabis sativa
atgctaggcattgcattggaatgtgtctatctaacttcagaccaaaggctaattgtaagttaagccatttccaccctcatagtacccaaaattaccaaagactaaagagtatgataaatgagatggatactacttgatatttggcaaaaatatgctaaaattagttaaaaagaaaagaaaaatacaggtttagcatacaaaggctcaacttccaagttttccttaactctttagaaaaaattaaccaattaaatcaaactgtaatttattatggttccattatgtacgtgtggtttaaggtttggaattttaaaattagtatatgagtgaataactagagcaatatcaaattagctcaaattctaatccctctaagtggtaagtgcccaagtgagtataccctatggcctggtttttttatgtggacttcaaatgaatggttcccaaattgaaattacaaaagtttgcatgctcaacggcctaggaacgattgcccgacagc

SEQ ID NO: 85200 - DNA, 1316 bp, Cannabis sativa
tattccgccaaacaagtaaaagtaccaaactcccaaggcaaaagccaccgctatcaactcaatatcataattgaaatactatctctcacacttcctcaatctcttagaagcacaagcaataactttcctggactgtatcaaaataccatctaatcctcgtttagaagtatttcatcaaatcacaatttctccttactgactagcaatgttaacactagtacaatggttaacctctgtttaagttctttcgatttgaccccactaagggcgtagacaactcttaacaaacatttcatagcattctgttagttccagaaaacctctaacctccattacacagttgggattagcaaaacttgcgtttcttatatttagtatgaagctttgactacaagattaccacaccatcaaaaaatacctctcaaatgccttcttaagtgggaagaaattgggataccattaataaagtcattcatgaagtcatcagcacggaagaaaagaaataaagaaaaaaaaaactattttaggaatatccccctttcaaatcatcaattggtaataaccagatcgaagaccgatcttagagaagataatccccccccctttgagttgttcaacataatatttatcctcgtcaaaggatacttattcttcacaaataaagttggcatactccagattgaaatactcaaactagcaatttcaagaataacatttcttgcaatggaatcttcaccactttcaattctacaattaccatccaattcagaacttcagatacaagtttctttccgattaccatttcaattcaacatcaatgtcccactttatcactaaccttattgggcattctaaaaaaaacatctagaaacccttggaccacaaaattgtgtctcagtcccactgatgttccttttgcaatatttgtcacactaactgaaaggttaatacatcaatcccatattaaaccttctccttaaatgccatggttaatgaaattcggaatccttaaacctggcccacaaactcgaatgggtcgtcgccttacaattcaagagttaccattttttttctttctcaatcgatgatcgcattaaactttataaatcaatccattcctaatccatccccaggatcctctaatcgcaactcaactaacaccacccagcatttcctttttccctcacgactcaggaagggacttgaatcacttgctggagaataactagttcttcagtaaaagtagggtaccggaactacttgctaatgttgggttttgtgccctaaataaaaccctttacaatctgattagttat

SEQ ID NO: 85201 - DNA, 501 bp, Cannabis sativa
ggacaaagatagataataatggatatatttttttagctaaaggtatgtgtaaaaacaaagaataaaacaacaattcaaagctctagaagagtgggctaggataaaaactaaaagggtggtttgaaaggcacaaacgttctaaaaatattttgcctaaataatttttcaaagcacacatcctcaagaattttacctcaaaggctaagtaatgcaagttctatccaatccaacttatcaatcctctagcaaagcaagcatgtatcacaaagtccaaatagttacatttatcaatcatattcaactttttcaacaaaccccaaagttaagcaccaaaaataatcaaatcaagcacacagtataaacaagttaaatcaaataaataacagtagatggtattttagttcgctaaggtttacttatgatactaacaaaaatttaaagacacacaattaaaacacaaaactaaaaaaaaattaagttaacctcctacccccccccccc

SEQ ID NO: 85202 - DNA, 1046 bp, Cannabis sativa
tctcttggtctaaactttgcaaatcaaaaatagagggaggacttggtttcaggaacaccttgatatgaatgaagcagctcttagaaaatacacttagggtattgtatccaaacaagacaatttgtgggtgcgatgagttcatagcgtatatataaagaatgcaaattggtttggtgggactatcaatcaactacagatggcaactggtattggagacagattgtgaagattaaagagacatataaaagccttcaaaccttgtagcgtcttctgggaggtaattatattatccatcaaacttataagcacctttgtggagatcaaaatagagttaaatgacatagagaagtctggaatagatgcaatataccgaaatacaagtttactatgtggtggctattcaagatagatattgtaagctagaaatagattgatcacatttaaagtttgtcaagatgagtcctgtctattatgtggagctgctatagagacaattgatcacatttattttgaatgttcttttagtagcaggtgcttaaaagaggtgttctcatggatgaaaaaacactgctcagaaaaatttatcgggttaagctctctaagtttaaaaagaaagtgataattgcagagatagcgagcttggtgtatcagatatggataaatcaaaataattacctttggaatgacaagatccaaacaattaaaagttgtgtccatcaagtgaaagaaaatgtaaagcatagaatcaaaagtttggatggaaaaacaatgtcaatagaggaaaaggtgtggtttaattcattgaaagtgattagcttgtaattgattagtttattttcaggtctcaaatagagatgctgtttagtttgtaaatggttggttttgttaaacaatacaagtatttcattcataaataaaaaaattagtttaattttttttcaagtacataatttatttaaaatatattgtaaaattttaaaaaaattaaaataattaaaatatagaaaataatgtttcaaataatcttgaaacttttatcggctggg

SEQ ID NO: 85203 - DNA, 795 bp, Cannabis sativa
caaagtgggctaactgcacagggcccaaaaaaaaaaaataaagggcccaatatattttttctttaatgctcaatagtttttttttaatgaacctaacttttgaaagagctaacaatttgtcattagtcacttctatccaatgcccaaagcccattttcaattctattaatgcttttaagtaaaaaaaatctattactgttatttattatttttttcaaattttttatattctttttttcttatattcttttttttttgttctattggaatcaataataatttttataaatagttggagttttttggtgttttgtaaaatatataactgaatgataatatttaaaaatattatttataaattacattgtttttgtaggagcccaaattttaaattagagcagtgcctccaaaatgtttaagacggccctgatgtcatgtcgacatagtattgaacattttaatatgccaaataacaatactctattaatactagtacaaaaaattattgaacaaaaaaaaaaaaaaaccaaagatgattcaaaatttgaaaaaacagtaaggataattcttaaaaaaaaaaaaaacaaaacaaaaatatcacaaagacaaaataacttggcaaaatcatttatttagtagagagtaattattttatatgtaagcacgtaaatgcatgcatacgtatactatacaaaaccccgtgtagtacatataagggtggtaaaacgggtttcgacacggcagacgaacatgaatacgatatgaattttatgaattagggtcggaaaaattcaa

SEQ ID NO: 85204 - DNA, 732 bp, Cannabis sativa
atattcaaactcttctataaattatatgtaatataataaagtaattataaaaaaatatatatacctccgatgaatcgagattgaaattcccacttgattcaaattctttttaaacacttgcaaaccgccaaagcctataaaaaaaataaacacattttattatacaatacaataattaactttaattaatcaaactacataataaatatataagtacatatataacttgaaacataaattcaagttaataatgattatgtttccaattaccaggagacaatttcaaacttgtgaggacaaactagtgcaaattttatatgcaaacaggagataatttcaaacttgtgaggacaaacttgtaatgttgtgttagatggtcatataattaatttattaattaaaaagactcactactcatcacatgaaatcgtgaacttaattgtcagatttgaagctatgtatattaagctctttctttaacatgaatctgacccgtgaactgatcccattttacttttagttcaacatagtctttatggtaatcagatgtactaagaagtttatgttagaaataaaaatggattgaatctttccgtaccaacattgaaattaaacattcataatttcaatcaacatgaacaaaaattgaatttcactttcaatctaaattaaattatagaataaatctaaaaacggggtagtctcgacaataaaattgaacctttggctgaa

SEQ ID NO: 85205 - DNA, 634 bp, Cannabis sativa
ttggtagaatatttattttaaagtttatatctttgtacgttttattttcattttgaattatattacattatcattttcttattattattgttttaatcttaatgagtacctaatgggttctcatacttaatgggaattttgttttcgagagtggggatagggggcataaatggaaaatgggaacaatgttggtaggtacattatccacttattattcactcaatttttattattaatttagactattataatttacaaagtttttagtcaatctgtatctaaaaatacatgttggaatattttttatttttttttaaaaaaaaaaatttatgactatgttcgtgacaattataacatcttttttgtaaacttttgaataatttatcgtgatgacaataagtttaaaaattttttagcacatgtggtaaattaaaatatttggaactctatttttagtgctgtaactattcggaatttttttaaaatttacatagatgatattgtaacataacgaacgaatcttgttataacaaaaaaaaaaaaaaaatcaccatgtaattttagatatagaaataaactaaaaagttgtaataagagtttaattaccacttctctttatgctataattgagaat

SEQ ID NO: 85206 - DNA, 1647 bp, Cannabis sativa
aaacatgtttctttctttaatttagaaaagattacattaaaatagaattttatttagagcacaaagtccaacaaaccacccaaagcaaactaatattactttaaacacaaagagaatctctgttaaaatttatgtaggaataaatcttgacaacaaattatatctcagatttgattcaatttaaaatttaaattgaattaaaaaataataactaaacattatcaaataatgtaattgaattaattaagatatcagttaaataatctttttatttttaaataacaataaaaatatttcaatacctcaaattatcaccaaaaaatggtaaaattttaaatccatacaaattggtacaaaaatttcaaatgagctcactaaaataaatttaaatagtgaaacgtcaactcataaaatttcaaagagatcattaacctcataaaaatctcaaaatgataattttacctaaaaaaaattaaaaaaatacactaaaattcaaagccataataaattaaatgacattctaaaaagaggtcattcacctcttaattaacaaaacatcacaaaaaattcatattcggaactacgtttgacttgattcctaaaaaggagacgtacgcaacttaattgataagactaagtgtagttgccaataccacaaaattgtacaaaacacaactctcaaaatttcacaaaaggtcattcacctacaaaaatttccaaattttcaaagagcaaagaattcaaaaaagcggtcatctaccgaaattcttatattcaaattttaaaatacctcattctgaactacaagtgacttgattattcacaaagaaagtatgtaggcagctcaattagtcaaaattgttgaattcaaccgcaattccaaattcatcccaattctttcaaagtttacctcaattatttaatatcactgtaattgaaataaaaaaatttctttaaaacaaaaggattgtaattaaaaagttattcttataatcttagatggatcgaacttaaattaactataaaaattttttgacataggtgaaattgtgttttgcatttatttttaatattttaaatgtgaaagttttgcttaacagtagtaataaaaaaaaaccaagtacacaggcgaatctgagtccgacccaaaacctggtcacttgaaaaatcaaacccgaaatccgctcgaaaagtataccaaagttgaacccaacccgcccaaattaaacgggtttctttaaacttttgggttggccgggtcatgtctgggctggttggtcaggtccaggtcaaacccggtaaaaatgttcagccctattaaaaatggtttctttttttttttttctaaaaaaaaaaccctctcaatttactgttttcttgcaacaaaatgaaccacaaactttcagtttgcgattcctatatgttaaatttggggaacgaaactattaccaaatgacaaaacatgttagttgttgtaaaaaataataaaatctagtgcagatggtaattgacaattttgttaatatgatgtgtcatttaaacgttacagtagaacctctatttaagaatactctatctaagaataacctctaatttgttataaaaaaattaagtcccaatttgagccagttataaataagaataacc

SEQ ID NO: 85207 - DNA, 1580 bp, Cannabis sativa
tagttatgcttacattcagttgctcgtgggaaatcatcaaatgtttttgttacaatctttaacaaagactggattattatttattacatgaaagccaaattagtatgaggaaaatatagtttctgagttggccaaaactagtagtgaaacttacgagtacataacctcctggtttgaggggtgattcaattacaattcgagcttttctgtattgatgagcaaaaaattagtattcatcgaacacataataatagtcctaaatcacttatatggaggttgaaattaataatatgtaatacattattctgagtttgtctccttcttgagcacattcgaagaagctgcagcctctggtgaagggtatctgtgactttttccattctataaagccaaatatgtaagcctttatcaagttcacataattgaaaataatgtaataataggacctcttccaagtttacatgatagctatattgtcaatggtaacgggggaaagtacccatgtgccattttgcagctgctatgagttgatcatcttcttgacatacatgttgaacattgaacttaacattttctcccatacttgtgctaagccgtttgaaaaagcggaaaacctcctacaaaagttaactttaagattacatttcgataattgaattgcattgatttaagattaagctaacaaaatttcatccaaatgttatgttttttgatgggattaaactatctcaatataggggattaaaattagattatgggatgagttttttcatccaactttgttaagaagaagaaaaagtttatacctctttgccatcaattggactggggaaagagcattcctcaatgtaacagtcagctgagatgtaatccccaagttttctcatgtttttctcattaatgcatacatagaaatccttgattaggtctgatggagaagtagaggcaggatctgagttgtgatagttgttagtacttctattggaagccataataggataaaatttgttgtgaccattgatgagaagtttgctcaattctgcattttgaagaaatttaaggtgctctcttttcaatctgtcctgatcaaagcgacatgtcgttttgacagcaaatgattcaatggcagtctttggagttggtttgcggccccgtgtattccgtggggcgacaatgcctgaaaaatttgcagcaatggccattaattgatatggaagaagtagttgagaaagaaagttatgatattatattatattgtttgataggttttgtactattagtatgaaagaatctgggaaagcaaagaatactagctaacatttcttgcgacactgtattaaccaaggaataatctataacgaaaagctttggtttctttgtttggctttcaaatttctattgccttgacctgaagtcaaagaatccccagctattcttattgacctaatcaagtttgagacaaccaatcaaatacttttctcattatgcagaacaagaacaagaaattagttataatgagaaatcattatgcaaaactagaaatcattgcataataatgtggctactatataattcatcta

SEQ ID NO: 85208 - DNA, 3793 bp, Cannabis sativa
atagctataacgtacatgaatatcgaaaaaaattagacaaaaaatttttctgaatgccgaaacaagttaagggtgcactagtacatcccttttaagggagtgcattgtagaatcacccaaagttaagttttattctcttataaaaaaatctagatattccatttttgatttcttatttatttattactactactactacttcttcttcttcttcttcttcttcttctgctctgttctgatcaaaatcccaacaatggagtttccctcatatggccacaccactcaccaccaccaccaccgccgtgacgacgaagacgacgatgataatagacaaagaccaaactaccctcctccaggtacacactactcttctttcaaccaacaaccaccaccaccaccacaacctccgacctcccatttcccccatgatcactcaccaccttccgtaacccatctccaccactcaacacccacccaagattatcaaaatccttcctttcctcctcccccaccttcctttgattacggcggctccaccaacgttcttcacgtgggtcatcattttgagccgccacctccaattatggagcctgggtttcatggtggtggtggtgggtttgatcatcatcctcaccactctcgtcctcatcatcaacagacccatgatcagggtatggggggatctctttctgggctatctgggaaacgtactgttaaagtttttactaaagctgagcctaattactcactcaccattagagatggtaatgtcattcttgctaggtctaatccctctgatgagtttcaggtttgattttccaaaacccctctttttctttttcttgtgatttttcagaagttgttaattgtgataattaatttgattggatttggaatttgcagcactggtacaaggatgagaagtacagtacaagggttaaggatgaagaaggttgtccatgttttgctctggttaataaggctactggtcaagctatgaaacactccattggagctactcagcctgtaagatcatcactggaatataataatgttgaactcaatagatcattgatcattatgtgaaattttggtttttgtgttcatgggaattgaactaatctgaagttaatttcgattttagttagcagtgttcataactaagtattatgaaatagcagtgtcacctaagggatagctcaaatggtatgatttgctctacacggtctgaggttcgagtccacatacatagtttctatagttttgttcttttgttttctcgatattagaagagggtgattcgaacttgggaccttagtagcagggtcattagtagcatcaatggctgatttagtagtaccagcttagattgaccccacaaagctcacaaagcacatcatgctgcatctttttttttttttattcatttctttctttacaaatcaccttacaagttctttgtaaccttacaattttgatgggttttcatttttacttgcatattgtctgtaaaaacacacacacatgacacattgaacaattgctatgacactcttttagcatttgggggtgtactttgtttctggtatggatgattatttaaatgccacttgtgatattctagaactatatgtgtcttcttgtcccaaaaaggaacactttatactgaagcaaagtaatcttttcaggaaacattaaatatcatcatagaaacttgctgagatagttttgattactagtttgtcttgtttgaatttgaataatttcggtgactcggctatgttagatgttctcttttccataaatttctagtgttatgcttgcaagcaaccatttgttatgttctttactcttctcaacttctctcatgccttattttgctccactatttcttgtatctttaatggaaccgttaaagaagtgcagtaattgaaaatccttatccacactcaaaatcatatcattaataattttaacaagaaattaaacatgtcataaccttgaaattatgattgcccctgattggattgagagagctttggttcaattatctatgcttataaccgaaaattccatgttagataaactacatcttttacccttctcgatatgcaggtacaactgataccatacaactcaaatgttctcgatgaatccatactttggaccgaaggaagggacctaggcgatggcttcaggcccgttaggatggtcaacaacattcgcctaaacatggatgcttttcatggcgataagctttctggaggcgtacatgatggaaccactatagtgctgtggcaatggaacaaaggagataaccagcgttggcgaatcacaccctattgtaagtttctcttctcccaacaacaagaaatcatattttgtagcaacttactgaaacaagtgctgctcttttttataggaaattcgggatgatgccttggtttggtggtggtggtgctgctagagttgttgcttttatgtgtttgttgtgacttgttagagtgatcttgtggtttgaattttgagtattgcagcttgtatcttactatatctattatctatattgatgagcttatgagtgtatttgtaataatgagatttaatgaagcattgctatattgtcagttgttgcaatggtctagtattttagccaatctatcatgcaagagtattaaacatatgaataagagaagccaccaaggctagcttagtggtgggatggaaaaaaaaagaagttatgagttcgaattcaagacctttaagctataagttattagttgattgtaaaaataccatactcaaaataaacatacgaataagagagatgtctttagaaaattgaaaaatagaaaaagcattacttaggagaattcaaaatgtcgattttgagtctagaatatcaaatgtctatttagataaaaaagaagctccaccaataagtaaacacaacaaaaaatatttaaaattgcccctaaaaataactatgtttaactaatttattacctatgtgcacatttttctaaggaaatattttacaaaaacaacaaaaaaaatattataaaaaatacgttgtatgttatttaaatgtttttatgaatttatttataataaataatgtatttttatgttatactattgttgatttattgttgatttgttatctgtatgttatttcttgttgttattttgatattatttagatattattttttgattacttttatgtagttttcttgttattttcgtattttttttatagaacactataaaaatgtaaaaaaaaaaagtctttgaacgtaaaatgtaaaattcttacaaaaaaaaaaaagaatagtattttatgtaattattaattttttttttattattaagagtattgaaaataaataaataaaataattacctaacacaccaatgggtttataaaaaaagatattttttttttttttaaaaaaagtgaaataatagcaaaaaatagtatcccaatttttatttctttatttattttttgaagtatttattaatgaaaaatactaaaaggtaccactagtagtccttaacatcttttatcttttataggtgtcttacaattgattagtgatatttttttaaaaattatattcttaagtttcacaagatccgatacttatcgaagagagtattagacaccagtaatacttttatttttgtaattcttaatagtaattagcaattttctccctcaaattttgacatatatcaaatcatgcccctgaattttttttgccgttaaaaattccccttgaactat

SEQ ID NO: 85209 - DNA, 1482 bp, Cannabis sativa
acaccctactcttcgagccggtagactattgcaatagtacatagttgattcttacatggcaattgaagaagaaagatttcgctatgtacgaaagtaccaaaataaactaagaactcacctttactctggtttaatggatgctattcatcgaggtgattcagattgtacaatagtcggaaaaacaattatcctgccttcatcacatacaggggaaccacgatatagagcacaaaattatcaagatgcaatggccatttgtaaatgggcaggatatcctgatttgttcttaactttcacttgcaacccaaaatggccagaaataaaggatatgctcaatttaattggacagaaagatgatgagaatcgggttgatatcatatgcagagtctttcagataaagttattccaactaatgcaagacctcaaacaagaacaaccgtttaaaaaataattgcatgttagttttctttgttatcatatccacccaaaataaatttattatacacaatatttattttacaactttcaacaaaatccttaaaaagttattttttttttacaaattatcacaggtgtctacacaattgagttccagaaaagaggtttacctcatgcacacatactacttttcttggatccaacaatgaaaaatccttcggcagcccatattgataaaataataagtgcagaaatcccagatatcaatgtcgatcctgatggctataatgcagtaaaagagtttatgattagtggaccatgtggaaagctcaatgcaaattctccatgtatgatgaaagacaagtgcacgaaacatttccccaaaaaattcaatgatcaaactacaatcgacatagatggctttccaatctacaaaaggagaaatacaggtactcaaaaattataattacaaaatttagaattcacatttagttaattatataccattttaacaattgtgattttaaaaaattcatgaaataacttataatattattattctttggaaatactatacttattttcatcaattcatttaaaaagttcaaattcttttatacaggtattcatgttgaaaagaaacatgtcttattagataatcgttacgtggtcccttatcatagaaacttaatagtcaaattcaatgcacatattaatgtcgagctttgcaattactcaaggtccatcaagtaccttttcaagtatgtccataaagggtctgacagaacaactgcaacgatggaatctatcgacaccaccgaagagatagacgagattaaaacatatcttgactgcagatacatatcggcaactgaagcttgctggagaatcttccaattcgacatacattatcgaaagccatcagttgaaagattaccattccatttacccggagagcatacagtaatattcggagaagataagtgcaccgaagatgtcttggccacacctggagtagataaaacaaagtttactgaatggtta

SEQ ID NO: 85210 - DNA, 675 bp, Cannabis sativa
ttagggcataaaacctaacaagcctaacaacatatgtaataccattgcagcgaatccccccacaaagcccccctctgccagatgtagcaccaacaacccaggttagtgtatatagttgtcaaaatgaacaattttggctctattttgttggcatatttctaatttttaatttgctttttgtttacatgataatcatggttcaacaagttccccagaggtggagatcactggttataaagaggttgaagaatctccaagaacttaaagacttaggcagaggaggaggttgagatttagtgcccaatcacacccccacactgaaccagaacccaacactcaaccggaaccccacattgaaccagaaaccattctccaaccagaaccccacattgaaccagaagccattctcccaacaccccaaaccctatttgaaccccaaccagaaactgaaacccaaccaaaaccacaaccccaccctgaaccagaaactcatagccaatctaaaatccaccctgaacttgaagaatcttcaagaggcaaaagagttaggaaaaggaggaagcttaaggaaccccaatctaaatttgaaaccccaccaagagccgaaagacttaggcagaggaggaactacaaattcccccacactgaaccagaacctatatcacagccccaact

SEQ ID NO: 85211 - DNA, 700 bp, Cannabis sativa
agagaagatacaagtttatttaactataaaagtactgattcataaaaacataatagtattcagttgtcacaatataatggacaaattaagtaatttagttaagtattatataatggtttttaatttataatgggattgaatctataagcaaagcagcaatgctttctttgagcacttttccaacatttgtgtattgatcatcgccctctttgtaaagaagatctactgtttttgtaaaattaagaacacgaactaagataggaaaaggcacaacagttggcctaataaagtcttcattaatttctttccagtgggtgtccactcttttattaagttctttaattgcctcttcctctgataccccatattgtttcatgtaacaatccactgtagatggtatgtgatttctcttttgctcaaactatatacataaaaaaagacacaatattatttcatgtttattattttagaaaatatatagacatgtgagttatcatcatataaaaaatcatttactctaattaaattaaataatagtcattttaaaagatattgatcttgttaggcacgtcgagattggacatacaatctcagtggttaaaacatgtcaagaatttgacctgtctcaactgatttcaaaaggactattgagataggttgggaaatttcaatggacttttttttttgaataaaaaaaaaa

SEQ ID NO: 85212 - DNA, 900 bp, Cannabis sativa
tgtctcatttcatcaatttgtctagtatttgtttattgttgtcgcaaagcaatagcaagagattgatccaaatcttcaaatacttttcaacacgatcttccacatagatatttttatcacttaaactagtgtgagctatccatcaatgctcaaaagagcacaaatagagagagagagagaatgtgggcttcatctttagggttaaagagagaataatagatttttagttttgatgattcaacccttacaaagatttctcttcacccttctatttatgatcttaggtacttgtttattattttctctcatatttttatttaaataaaatacaaaaataaagtgaggaaccccaagcgtagttgaatcactataagtggtgtcatcttggattttttttaaaaaaatttttagttcaattaacttaagttggatctttattttttttttttatcacattttgtttatcaatatttttgaaaattgaagtaaaagaagcttgagctaaagaaaataagattaagaaataaatacaataagatttttacgtggttaggacattaacgagccttagtccacaagtcaatattattaagctctttggctatggagtatttactgcttttttcataccaaaattttctaaccatttgcataaaaggataaaaccatacttataggcgttggctagtgggtcaggcagacttggacctattagggttctatttggtgttcaaagcccaccaatggggtaaatacaatataatattagctattgggctaggtaggtgaggcccaatgtataggcagtcgttgtccatacatggaggtactattgacaattatagcatagcatgaactatcgattgtgaaggaaacgtaagagtagtgggcctcagctag

SEQ ID NO: 85213 - DNA, 747 bp, Cannabis sativa
aaaattacttgatttaagttggtctaaaattaattaaattaattttcaacaattttctataaatatatatatgtggccaaattcgaaatataatgtatttagaaataaataaattttcgaaatttacataaattaaaataaaataaattcagaaaaaattattctaatttatgttagtccaaaattaatcaaaataaattttcaacataaatataattttctatttaattaaatttctaagaaaaatatcaaatatttaagtatcttgaataaaatcaaacataaatattaatattctatttaattatatataactagaaaaataccacaagtatacataaaataactatctagatatttcactatctaattacttattttttttaattaaaatataatatattttagtctattgattttaatcaatcattaatgaaaacttatcttgatttaagttggtctaaaattaattttcaactttaatgtttttttaaaaaaaaaaattcaaaaattcttgtattaaataatgcatttaaaaattaagtgggagaataattaataaaatatattttgaaaattattctaatttaatttgttctaaaattaaaatttccaacttaaatataattttctatcgaattaaatatcccgaaaataactaatctttaagtgtctagaataaaatcaacttaaacatttagttttctatttaattaaatataaattaaatttaagaaacaaataatt

SEQ ID NO: 85214 - DNA, 1545 bp, Cannabis sativa
ccgattttattggagtgtgtaaagtgtcctagtcttgtggagaataagcgttttaagtttgaaaatgcttggcttaaagaaccaatgtgttaccaaattattaatgattgctggaatcgttcggttgagtccgatatttttcagaaaatcagttgttgctctgaacagttggtaggttggggaaaaacaattactggggactttaaacaaaggattgtcatatgtagaagagatcttgatcaattgaagtcaaaaacagatgaggtttcggttcagaggtataaagaagtgaaaggaaaattgcttgtgattttagaccaaagagaggcttattgaaaacaacgtgcgaagcaacattggctaaaaaatggggatcaaaatagcaaatactttcatgcagcggctagtacgagaagaagggcgaatactatccagaaactacttaatgacgaagggatgtgggtggattgggattcgggattgagtgatgtggtcactggttatttcaacaatttgttcacagccggtcgagtaaatgttgaggaggttattgcttgtgttcaaaataaagtttctgtggagatgaatgacaatttacaagcttcagtgagtgcagaggaagtgaagacaaccgtatttgatatgcatcctgataaaagccctgggccagatggaatgactccggctttttatcaaaaatgctggagcatagtggggacagatgtaaccaatatggttcagagattttttcgaactggtatttttgaaaataattgtagccttgcaaatgtggtgcttcttccgaagaagaaacaaccagaacagatgggtgatttaaggccgatggcactttgtaatgtgcttttcaaagttatcacaaaggttatggcgaataggatgaagccttttatggaccaaattgttgctgcgaatcaaagtgcgttcatttccagtcgtctcattactgataacatcttggtatcctttgaaattctgcattatttgaagagaaaacggcatggcaaagatggatacatggcgctcaagcttgatatgagtaaggcctatgacagagttgaatggccttttctgagtgctattctgatcaagatgggttttgcacaaggttgggtggacttggtaatggcttgtgttcgttcggctaagtataatattgttcatgggggacgtgaaatgggaccggtgcttcctagcagaggtattcgataaggggatcctttgtctccatacatttttatcatttgtgcagaaggtttttcagctttgattcaaagatttgaggcaatgggaagaatacatggctgtaaggtggctaatggagcgccaaggatttcacacatgtttttcgctgatgatagctatttgtattctaaagcaacaatgaacgaagcatcttatgtacaacaaatgcttcatatgttcgaaaatgcttcaggtcagcaggttaacttaaggaaatcctctattttctatagtgttaatactgatcatcaagtgaggactcaaattggcagctttctccaa

SEQ ID NO: 85215 - DNA, 804 bp, Cannabis sativa
ttcatcatttatttttcttttattactttgtttgtatggtacctggccatgatctccaattgtagtcagtcagtagattagttatttcttcttgctataccatccatacactcaacttagttataatagttattgttatttgatacctagcataacttggagataattttttgtgattagttactagttagcgatagttaataaaaattattaaggatccaatactaaatttcacaaacaacaatattaacaccttgaaaaatgttaagaccactaatatttttgatctaaaacttgggatgtaatatttgttcactcttccatcacaaaaatattccaatttggaaaactcgttcataagaaatgggcgtggagatatagagttgtaattgtaatctccaaaataaagcaattgatttttatttgaaaaatcctccaaatgacggcatcttcaaggacacagttaatggacttgtaaactatctctgccatatacacccaattgacttgggagtaatagttgcttttaagtactttcatcagtgtactttattttttaaaatatctcataattttatttttcattttaacttaattttttatattttactatcagtttttctttttcttccccatatcaattaactatcatatttttttgaaatgaaattggtattttattcaactaatacgttcatccattataatagaaatcaaaccaaaatgagcattaagctcattaaaaataagcaacccaatcaaaccagaaggagcattaaactcattaactatcatattttaggt

SEQ ID NO: 85216 - DNA, 614 bp, Cannabis sativa
attgatagtgtcaacaacattggccaaggttaggcttcaaaaaaggccaaggaggtgattgcccgtgacttagccaaaatcatcacggaggccgctaaagaggaccagcttctagaagctagttggaggctctgtgacccaaaccctttgtcaaaggttaaggagatccaggagaggtatgctgtagcatactcggatgagggtgacccgggagccagcacttttagaagaggtaatagactcttcagcatattccgtacccccagcctaaattgtgtatctcgaatggatcaagggggatttgacagtggctccttaaatttagaccacactaagtaccccatgagtgacttcatagatagggtagacaagatcattaggagtccaagcaatttagaattgtctccaaatactattaggggggacccctttgcaaccatgtccttccaaaacttcagagaatacaaaagctttgttgattgggaggacatgactttttttgcccgtggggagccttatagctgctcactgaatggctgcacccacattcacactttttaggaatatgttgttgtattctatgtaacacactaactattataggcgtgttagcg

SEQ ID NO: 85217 - DNA, 740 bp, Cannabis sativa
actccctccaaaaatgaaaaatctagtttgaagagttggacaaggttgttttccaaccatggttcaacttcgtactaaacgcatggaagtgcctgctaactgtccaatttgcaatgttgaagatgaatcgataatccatgctcttgttgcttgccctgctgctaaactttgttgggacagagttagaattggcaccttagtgcagtcaaattcatcctttatggactggtgcgtgggcaattttctggtgcttgattcggacaagtaaaaacaattggtagctctttgttgggctatttggaatgcgatgaatgataaggtttggcaaaataaagtggtaagtgtggatagtatagtgttctcggctaaaaattaccttaatcaatggctcattgctcatagttcagatgttgtattctcgggtcctattcttttactaggagacggtgctgagcattggtagccaccacatggagacaacattaaggttaatgtcgacgctgctatattttcgatactaatcaatttggggttggttttgtggtttgaaatgaccaagatttgttgttagaaggtgctaccaaactttttaatggctcggctacaccagagtatgttgaagcgttgggggttaaggaagcttttaagaaggattaagaggaactagccacgccaagctatacttgaaaccgattgcttatttgtcatccaagccttgcgtagttcaattgttatgattt

SEQ ID NO: 85218 - DNA, 1385 bp, Cannabis sativa
  modified_base (1309)..(1315): a, c, t, g, unknown or other
atgtcaaagttcggggggaaaattgctaattagccttaaatatgatatataattcaattcaatacaatacaatacaatacggcgttccaaatgaagcaataatctattattatatgaataaaaattttatatgtcttttataaaaatataaatacaaaaaataaataaaatcttttaatttatattaattaatagagatgaaaaataattattttcaatcattataatgtggttatgtggttatgtggttatgtgtaatttatatgcccttcaaaataaataacaaaaagaaaattatattaattatatagatatttagtttaaaagcaatttgatttacatattattatattaatgcattttaattttactatttatgtattaagctattgaataacaaaaactaccaaaaaagacaaaatgataatagatacaaaaagacaaaataacttaaccaaaaccaaaaagattatatatatgcccttcaaaataaataacaaaaaaaaaaattatattaaaaatagagatatttagtttaaaagcaatttgaattatatattattatattaatgcattttaattttactatatatgcattaagctattgaataacaattaataattatatataatgtggttatgtgtataatttattattaaaagaaaaaataaataataataataaaaaattatattaaaaatagagatatagcaatttgatttacatattattatattaatgcattttaattttactatatatgcattaagctattgaataacaaaccacaaaaaagacaaaatgataatagacacaaaaagacaaaataacttaaccaaaaccaagagtcacacacacaaaaaaaaaataaaagagaaaaaattgaaccacaaaaagagaaaatagttgaaccaaaaccaaaaaattaaaagagaaaaaagaataattgaaccacaaaaagacaaaatagttgaaccaaaaccaaaatattaaaagagaaaaaattgagtcacaaaaagaaaaaaattaaaccacaaaaagataaaataattgaaccaaaaccaaaaaactcatttatctttatatatatgttatagatgttatagattatagatatataagagaggggagaagtgtatataaataaatatatttatatagatatataaaagagagagaggattgggtatatacaatcagtctttatattttgtttaacaataatttgaaacttgttttttttttttaaaaaaaaaaaattagattaatgggaaattactctgtatactaattttttaattttttttnnnnnnnaaatttacgatttgggtttctaaaatggttgcagcgctagttgcaataggagttcctatacgattttttg

SEQ ID NO: 85219 - DNA, 930 bp, Cannabis sativa
tcaaggtaattttttatgtatatataattgtacacgtgttatgttttgattgtttcacataattttaattattataaaaaattaattaaatttttaatacaaactaaaaaaaattataaaaaaataattattatttttcgttttctttttatgtttctctttcttcctcgacccgattataataattttctctttcttctataggttttttcaatttcaggatcaacaaatgatattatactttgtccttgacgtcccatgtacccctaatgcctaaaataaaataagataatctaaaagaaatagatcagcaataagcagaagaattaaccaaagtagaatttaatctaatgtttgtaatatcaatttttaaataatgtcccggcaatggcgccaaaaacatgttatgaaaaatatgaacagctacgcaagtgcacgtaatcaagtagtactcacacaggtgtggtcgatcccacagaaaattgaataccactaaattagacttatttctatttggcaaacaataatttttgctgaagatcaaaacaaagagtaaccagaaaataaaattaagcaataaaaatatatttaatcaaggatgagaaattagggaaaagaatcttgttgatttaattacataattgttaatgctaattattattctctttctcaatgtgaatgacagattataaaaattaacctaactcttttcagatcttttaggtcttaaattacatgttatgtaatcatctctgagatagattaacttataatccacatcaagcaataatctcaatgtcactaagactatgcaaatactttcgtttcacatcaaaatttagtttatcgaattttagcatttccaaatctcacttttcagattttgaattgggatcataaagcatgcaaaatgtgatcaatcttaaacat

SEQ ID NO: 85220 - DNA, 719 bp, Cannabis sativa
aaaatttaaaatttaagtagtttatccacgaatatttctatttttttaataaattaaaaaactaagttaaatgggatcctatagataaattatagttttattaatattagatacttatgttattaaaaaaattattaaatatagagtaaatattattttgaaagttattgatcagattctctattttattatttaataaattaaagaatccaatcggttatttttgcagaataaaaattctaaaatagtatttactcttaaatttatccaacttacaaacaaaaaactttaggttttatgctactaattacccaaatgattaattaacagttttagagttcgtttggaacgtcgcattagatcgtattatattgaattagattatatatcatatttttttatataagactatgttaaactttaatttatactatattatatatttgagtgtctataaatttaataccacatatagttttacataaaaatattacaaaaaaatataattcaatataatactatacaatacaatacactgtaatataccaaactaacccttatatattttaaatttacaaatcatttctcaattgtaaaatatagagattgggaaatgatttgtcttcagattggaaccttttgggaagaaaaaaacatagacaacccaatacacacaagttagtagtgtttattaggtaaaagggaaatttgattttcta

SEQ ID NO: 85221 - DNA, 523 bp, Cannabis sativa
tgcaaaaaaaacataaatatagaaatacgacaacaaatttgggaaagcactacattgaacgacattaattgataaacgacattaattttagaaaacaacaacaaatttagagaatattaaacgagacggattttaagaagtgggaaagaaaaaccaatacgatataaatttaaaatacgactttaaatctttaaaacgacagcaatcttaaaatacaacaataaacgacactaatagtacaaaacgacattgaaatgtaacaatctatttagctgaaaacgacatcaattgaagaaataaaaaggatgtaaattgcataatttaaacacttttgtttacaaacgtaattcatttgaaaatcttgttaaagaacattttcacccaaattcattagaaatagaaaccttttccaactttgtaatattcaaaattattttgctctaagaatcaaaatacatttaggtggcgtttggttggaggtaatgaaatgaaatggaaatatttttattccattcctttgttt

SEQ ID NO: 85222 - DNA, 590 bp, Cannabis sativa
ctctgttcttgtcaatagaaactctatggagatttgggaaagttttagttaccaacacaagtatagaaaaagggagatgttggtttcttcaagggaatcaagtaccaacttttgtagaggaagggttcatctctctttgttgaaagatggcaattttgttcttaatagcataaatttgtcacctgaatttaccaatcataattgatcactacacaagtgataatactaataatgaaatgtttatgttgagtggagcagagaaaacttctattgcagactacttttatagaattttgatggtgtttttagagcatatatatatatatatagtcaccccaagaatccagataatatttcaatgcaaatatttcacagtggttataatacaatatgtaaattgaaggtagataagaggccaggttatataactacttttattgagcatcttcttaaaagactttgggtttaaattctcacagttttgtttaggacatcttcctcaaaaggtctcatatcaatagagatagatatcccatttttatatactaatgattgttcctattcttcaaaggttttgttaatcaaccagt

SEQ ID NO: 85223 - DNA, 694 bp, Cannabis sativa
tcttcttggtgtgtatttcctgtacataaaactcattagcaagaaattttagatcatagttattgtcttgagttagacaactaacagagacaatattatattgaaaggaaggaacatataatacatcctgtaagaccaaatcctttctgatgcgtatattcccacatttgtgaaccaagatatgattattgttagggagaatcaatttagtagcatggacagtatgaacactttgaaaaagctttaaatcagaacaaatatgtctagtggcacccgaatccactatccaagatttttctttaggcaaaaaatcataatttactaacacaatacctgaactacctgaggtgggatttgaatcggtagcaggtggattgacagattgagaagctaagagattcagaagttgttggtactgatttggtgttagttgaggcagcaaagtgttgttgtcattagcatccaaaccaggctcctttgaagtctgaaattgattggcagcagcaccctttgatttctccgatttgttgtatccaggaggatacccgtgaatcttgtagcacttttcaatggtgtgcccgtgcatattgcaatgagtgcaaaaaggcctaccacgtttctgtccttggttcttggtagcttcggatttcccatggtttctttctccttgaaaggcaaaagccatgttggaatt

SEQ ID NO: 85224 - DNA, 632 bp, Cannabis sativa
  modified_base (35)..(35): a, c, t, g, unknown or other
aacttagtataattaaaaatataattttttttaanaaaataaaaattattaaaattgggtgtctttaaaaatttttagggtgtaaataaaattttccaactatataattacaccccaaaaatttaattacatatttgacctattataaaatgaccaaaatagatatctttaattttttttttctttcatttattattttatttcttaataagtgcaccccacaacttctaaaaaaaatgtttgttattctttcaaaaatttaagattttatcattggaggaataaaaatttattatatatatatatatactcttgtaaatagtgttttattgggatttatttttgtttttgactttgttttgtgatgttaaatggatatgcatatctttatttgatacaccaatttatatacaaatgtgcctttacattaatcatacattgaaaaatcgtggatttggtgaatgcagagggatgatttggtgaacgtaaaaaatttagtggtgcgaagtccttccattctttgagggtttttttccaaaaaataaataaataaataaaataaaataaaaactcagaatgagaagttttcgggtgtataaaataatacctaaatagagtgggatggggttata

SEQ ID NO: 85225 - DNA, 706 bp, Cannabis sativa
tttttcgaacactatattagacttggtaagcaagtaattttttttcacttaatgtttgaaaaatttgaagtttttagctattgttaattttaattatgtttaggtatttcttttattagtggtgatatgattcgaggaagttgatcggtagctttattggagtcggtaagttactaaaaattttctcttagtattttataaatcttatatatttatttttagtgaagtaagttctacgattaattttactacggtcagatgtgtagaatataggcatgttagatgagtttgaatatcctaatatccatctatagttatgacagtcagagtcccatgatccggagggggatttggagctaggcaatctcacattacttgggaaaggtcaagtgtgatgattttgagactgtgtaagtaagagactacacatttgaaaacaatttaaatagatgtactacctatatcaaaaaggtgcatattattttcggtagcccattagaactccaaagttaagcatacttgacttgaagtaattttaagatggatgacctcttgagaagttttctcaagaagcttgcgagtgtggagaaagaatgctggcaacactcatattttttgtaggaccagccattattctagaaaacagtcaaagtgacgtatccatgtataagagccataattctgtgggtgtaagggcctaatggag

SEQ ID NO: 85226 - DNA, 927 bp, Cannabis sativa
  modified_base (159)..(169): a, c, t, g, unknown or other
  modified_base (251)..(252): a, c, t, g, unknown or other
ggtgtggtatgtgaaaaaaaaaaatttagggtaatttttaaaataatttgtggcacaatatatctgcaagtacttgactactgattgttaactaaattgtcatatgacaatttttgattagtctttacttcatcaaatttttatttttatttaaaaatnnnnnnnnnnntactaataagaaaatgacacgtagctaatgacttgatatttaatggctaggtacttacggaaattttaaaaatataacttanntattattaccgctaaaaattaaatttaagtatttatctccaaccgagaattaaaattaagtatttacaccataaattactctagttttgatagtatatttcttagaatattcctttttgtacatttttttttatctattttgttatttattagagattttttagtttcaattttaatatatattttctcaaaatcatgtatgttgtaattatttataaatttttaataaattctaaataatttacaataatgaaaatgatattaaaatattttattacatacataactattaagtttgtaaaattttcttgtacaatcttaacatgttctctctaaattaattactattattttttgtgaaaatagctctaatttctgttattaatttatatacttaaggtattcaaagagtgtcacactaagaatgaatcaggaaattgctatgaactttctttggtgggctgtaaatgtattggagcttatgttcgaaacaagaagaaccaaaatcaggtaattatttcaatgatctatttttactattgtgtcagcttttattacgagacatttttaggatcattgttataggatgtaacatgtcatttagatttttaagaatgtccctgattcatatacatcggtcggccaaatgtaattacacataaagtaattatgcat

SEQ ID NO: 85227 - DNA, 2058 bp, Cannabis sativa
tatattttaagtagtatatgtgtatattttgaatatgagatcgagagttatatatgcagctattaaaaaccgatcgatatttacaatgcgtaaggcattaattttggtctgaaaattaggccaaacatgcacactaaataaacataagactattaggctttcctaattattgattacatatagggctggtactctgcaggggccaacaagcaaatttcgtgttagagtactcacatcagcatttctattttattctttaaaatatttcattaaaatttaactttatctattttagctcacacttttatgttatatcatacatccctttttttttatattttcttttacaacattgtaatatcatatcttgatgaagaaaaaaatttgaagaatcctaaaaatttagaaaaatatctctacatgtaaacaaggaaatagtgtttgagctaaaattaagaatgatttagctcacttgatgtagcactattttattattttttagttaaaaatttaaagatgagctatttagttacactaatgtcagtgcttaattagggtccaaggggaaaaactggtgagtttagtaagttatgtagattctaaagaattatgagaatttggagaagcagtagagagtatttagtaaataataataataataataataatatgattaaagtattactaagtattaaacaattaaaataaatattatatttgatttataatatgagaatttggatacttttttatttttgtggtattactgctatactactaaaattatctcgttgtgactgttagccaatttgctgaaattcaatgttggtggttataaattatttgatttatattagaggtatagatgattttagggagttatggtggagatgacatttagacttctttttagattattcatcaaagaataaataagaaaaaaactttgatttaattgggaattctcttccctgggaagtcttggccgatccatatatatgcacacacacacacacatatactttgaaaatttatctcccatctcatcttcaatcccttttcaactcaaggaaaattaagagcaaatcttaggaggaatttcaagctttaatcaagtggagaattgaggttactcttactttacatattaaataggtataagaaaattaggacttgtattagtaattttagtgtgagtttagtgttgacttttaattcttttatttgtgtgttggatgaatttcaaactgttatggagttagaaattgtgagcataatagctaggtattaagtttgaaggaggtgttatagagttttagaacttcaagctaggattttaatggcaattcttgcttctttggattaatttgtgtttcaagcttctagatctgttgaactagtgatattatattgatctgagaagcttgaacaagattgattcagttttgagcaggttgtagaaggaaagaactcgaaattttttgagttgtagtttctctagtagatccggttaaccgattaaccggttggcagtgtgtcaaccagtagatcggttggtaattctgtttaaccaattggtcagtctcgaatttacctagattttcatattttaggagtatttaaagtatttccaccctatttatagataacgtaaaatttcgcttgtatggcacaaaacatttgttatagttgatattatggtggaaaacactcagtttattaactgcaaggttagaatgacatgttaggacaaggaattttgtcttaattactttatacatgggagtaataatgtggttgacatgcaagaattgtggctaaagcttattggattgccaagccagtgttactttgcagtgactttaatttagattttagttatcgagattgcatatgccaactagtggcttactcttggtttggcaggtgaattgaagaggagtgactcatgttatacccgaaattcggctggaggacacgtgttaagataaagggaatgtgaatcggtgcaatagctttttatggaataactcattaattacgtaagtatcagagtat

SEQ ID NO: 85228 - DNA, 651 bp, Cannabis sativa
attaataaaaaatacaataaaattaaatatttactaattaataaatatattcctttaataaataattattttatttttatatgtaattaacatcaatagatatataataaaaaaatatttttattttaatttttcaaaataatatataagatttatgtattcaaccaaacagtgtaatttaattaacaggaatatgattacatattaccttacacagccaaacacagtttacacatttcactataatcatattctctttcataatattccctataatcaaattattttgaacaccttataccaaaacgcacgatatggttgggtaaattttatttatttatttttagaaccccaagtgcctaacaatctagactgtagaggccacaatacggtaatataatcatggtgccaagaattttaatgtttccattctctgattggaatttggaagttgtctgcattgcctttgagtttggttgcagccaagagtgcctgcatttcggtctccctcgctccctcattacgacccaccactcttactgctgcctctatcgtctttgaaagcctcctcattctcctttgtcacttctctatgctcttctttaggaatatagaaatatagagtaggtcttaattttaactttgaatatt

SEQ ID NO: 85229 - DNA, 559 bp, Cannabis sativa
  modified_base (324)..(357): a, c, t, g, unknown or other
ttcttaatttcttaagatgtacaacaacacgttattagccttaaaaaggtacttagtgcaagcaataataatgtggcaatatgtaaataaaaatagccatatattttggtacaagtacatacactaacattgatcatggtatataatgtatatttcaactagaatataattggtagcgtagaataccggcaccattactaaattaattattacaacttttgacctctttttataacttttggaaatattattccttctaataagctaaaattaggctttttttgcgtacatatttggaggactctaataataataataataatnnnnnnnnnnnnnnnnnnnnnnnnnnnnnnnnnnataataataataatattggttaagaaaactgtgggggctccccttttacataaccaactaatttaactatataatagatttgtatatatatatttttttatggtaagtgttgcccctgaatttgcccaaaatacgtggaccagtcgaaatgggacacgtggatcagataacttgtaaatatttgataagtctttgtacgcca

SEQ ID NO: 85230 - DNA, 548 bp, Cannabis sativa
atccaaaatgttctgtattcaatcaggttagtcttaattagttttagtcatatttctttcattcgaaaattcagaacccaccaaacaatgatttgtttgtgagcttgttagagttaaatgttttcgtacaccttgaattttaaggctttacttactatttgagtagttgagtggttggtgaaatgaaattgagatatgtccttatggaaaaccaacttaattttgctaatgaaataccacaaattgagcttccattaccgctcagctgctcaactattgaaattgttgaagatgttgttggcttttaattaaatcggcttgtgagggctagataagttgaactgggtgggttgtttattgtttattgtttacttcaaacaaaaggtgggttgggttgggcaatgccctgtcagtatttgtccccaaaagctttttttagcttttggttatggtaattagaggttaagtttgatcatttagagggtaaaatgttgttccctgtatttattgtgaaggggcttaccactggctttgtaggagaatgaatg

SEQ ID NO: 85231 - DNA, 2012 bp, Cannabis sativa
ccttattcagatcagaaaaatcaatacaatttctccaagttctgttttgttttgggacgagaacaggattggctatccatgagggataaaacaccttgtgtataaagtcattgactaataacttgtccacttcttgttttagtgcgccttgcctctcagaatcatagggtctccttttctgcctcttcgctgggtagtttggatcgacatttaaatgatggtagataatattagggtcaatccctatcgtatctccatggctccaggtgaactgatcctgattcgcccttaagaaacatattagctactgctttaattgctcgtccaggttattcccaatgtaaacacactttgtgggatttcctgggtcgagaacaacttcttccaattcttcaattggttttaataagtttctttcatcttgaacctgagggtcaagatcctcgtacttcttctcgttttcttctgacaagaccgccattaattgatgaccgacttttctatactgtagctctatgcgatagcaatcgcgagctagcatctgatcgcctcgcaccactcccataactttaggtgttgggaatttcaggaataggtgcttgatcgaactaactgcccctattccgatcaaggctggatgacccaacaatatattgtaagccgatggtaaatcgacaactagaaagtcttgcataactgtggtggataggggtgcctcacccaaggttaatgcgagctcaaatgtgccctaactagcgatactgtcgccagtgaagctgcaaagattcaccatgcaaggcctcaattttgcctttcgagccccatcttcctcagtgtttccttgtaaaggatgttcactgagctcatgttatctattaacaccctttttatccttttattggcgagctgaatagtaatcaccaatggatcgatgtgaggatatctcacgttcttctcatcttcctccgaaaatatgattggaggttcttcagtttttaccttcttagaaggttcaggagcaaataccgactgctcattttttatttctttcacatatctcttttgggggttgttgctctcccatgcgatatgcggccctcctgaaataaccaagatatcgtctccttcaataggaagaggttgtaacacctggttgtttgagttgttgggcagactgggctagttgggtccatttccctatctcttcacatactgcttgaagtggcctcgagcaatgagactttttatatcatctttcaacaaacggtattcgtcggttgtgtgcccaaagtccttacggtatttgcaatacctggtaggatctcttttgttcctcgcatgcctaatgggctcgagcttgccgaaggtaaccttctactcatgcgcgaggtaaatatttttccgagtttcattaagctcgatataaatagtatacactggcacatacttatcgtgcttcttctgtttctttttatcctttgacgattccttagaatcgtcctttttttttagccagaggcctctgagttatcaactcttgtcgagatagcacttgctgaaacattgctgggtttgcaacccaagctcgttttcagcaaattcatctttcttaaagcttcctcttttcaaacgaacacctgagccctttcgttgagctcgatgatgttcttcattggacgaccatgtaagttttcccacagttccccccagcggttgatggattagtagagatcccaaccagaagggctgtaaggtgtgtactatcatccagatttttaacccttgtagcagtcgtgctaaaatgacttaagtacgccttaagtgtctctcctggctgttgctttatgttggttaacgaggacacctcgggtcgtctatcccttgcgacctgcaatgtttcttgaagtccttagatagctattcctaaaaagttgtgaaatgatgagtaaatttgttgaaccagctgcttgttgctccaactaacgagatgggaaacaaaatacaacgtaaat

SEQ ID NO: 85232 - DNA, 567 bp, Cannabis sativa
tcaaattcaacaagtaaatatcgatactagtcccataggtaccaaagaacaattctacaaagtcagaatctccataactgttctaattcacgtagccctatacgaaaccaattgtttttaaacttaaaacaaaattaaaccataccttaagttttccctcttcaaggatttgctatcctgctactaccagagcttagatcgctaagtttcggattaaaaacaaaaaaaaaatggatataaagggagaaggttttgtcgaaagagggagagcgagggctcgttcgttctttcgttaaactgtttactgatatatataatatatatatataaactttcaaaaacggtgaaaggtttaatattaataataatataatataataatattgatataatattaatcataatattgataaaaactttattattaatagttatcttattatttgttagccattaagaaatttttatttttagggtatttaaccaacttcgagtactccaaaatacttcgatatttctaaaattaacttatcctaataatctcataaataactcatattatatcca

SEQ ID NO: 85233 - DNA, 1316 bp, Cannabis sativa
  modified_base (1232)..(1251): a, c, t, g, unknown or other
aatatatatataaatatcaatatatatataattacactgctaatataatttcgtggcataatattaaagatgttcaatatatctctctaatatcttgtgtcataatttcttgtcatattattttaagtatttatttagttgcttttaagtttattttgtgttgttattataaatttttgcctaattttttttattttatttataaaaatggcatgttcatcttttttattttttatctttaaatgtactacaaaattatttttcctacaaaaatattttaaataactttaaaaacaaaaacaataaaatttattacaaagttagcaatatttttttttttgaatttataaattcaatatctctaaacatgccttagaactttagaaaaaatgacttttttgttataagaaaaatttcttatttcttcatttgcaacaaattttctcaccccatcttgaagaacttatacttttttttgtttatcaggattttttggtcattcatgattttttttttcttttaccaattcaacatacgcttttgtttataggtaatttaaattaaacatgtgaatgtgatgaattgaaaggtttaatttattaattattatttatttaggtaaaaggtgggaggatttgaaccttaaatctgaatcatgtggttatcaaactgattaagataactacttgcaaataacttatgttaaccaaaaacttttagataatgacccttgtggaagaaccaaaaaaaaaaaaaaaatagaaaatagaattttttacataaatacaaaatgacattttatttataaaaatactttcataagatgtggataatatttatacttttaatgtgcttttaattaccaaaatacctcttatactatcacttacacacattaatacattatcacttacacacgctatatgcatgtcacctcacttgcacaatttttccctttttttttttttccctttttcttatcatttttatttttacttttagtttttaagttagtgttcagtttatctttccatttctttattagtttttcattcaaaacctagttagatcaaaaccaagaagcctcatctctgacgagttcttccataatagtgaaggacgatggaagtttgaggacctcaggcctttggggtttcggggctcgtggaggtcagccatggcctccatcttggttgtggacgaccgatgtcaatgttgggttttgtgccctnnnnnnnnnnnnnnnnnnnntaataagatttactaattaataaagattagaaatcattttatgttgcatggttcatgttgaccga

SEQ ID NO: 85234 - DNA, 562 bp, Cannabis sativa
  modified_base (115)..(120): a, c, t, g, unknown or other
cgtgtgatcttatacctaaatacacaatatatatgagctagcattggtattaggtattggtgcctagtaccttatcgacatgtcgcgttgcgattgactagcgatactctttaannnnnnttatattaaattatgtgggacccgatacgtacgtacttagttctaaacaccactagtgtcctttagcatttctctatatatatattagagaattgttagaaggtactctagtgcctagtactttcatggtataatatcgttattggtgtaattaagtagcatgttctatataatttaataaaataattttttgggaatattactaactaatcgtaaggtgacatttataaaaggtactgagtattactggtgtctaatagcaatgcactctatattaagagcattgttattggacaccagtagtgcctagtatcttttatccatagtatttcataattagttagtggtattttttaaaagctattttcttaaattatataatacttactatttaattatactaataatataatatccaagagagtgctaatgtactttttag

SEQ ID NO: 85235 - DNA, 1134 bp, Cannabis sativa
ccatggctagtgatgtctctatcacaagcaaacacaaatttttacatgattcaactattactctctcctttccttcaaatatatatatatatatattaatcttttattattattattttgtaccttagtgataaaacacattaattagtgacaagtcaacaaaaaattacggattaaaatatatattgtacacttggtctgcttattttatagtaaaaggagtgctactgtcaatttcttattaattacgattttttagttaatattcgtacccaaaaacacatactggtattattttttttaaaattttttttcatgacggtgttcgttttgcttacaacatcatccttataaatttttgaaaaattttaaatagttgatagtgtcgaaaatagatttgaagttttttgaattcacttagtaaatttgaatatcaagatatctacttttaagtattgtaaactattcggaatttttcaaaattttacaagggtgatattataactataaataataccactataaaaaaaatttaaagaactatttcaacatgaaattttctatatgaaatttgatgaaaaaacaataagagattatagttatcactcttattttaatatttaatttttcttttttcaaagaagctgtttaagacatttgattttgttgtacatattagatattttggtaattatatatagggacctctcctttcaaaaataaaaaagaaaaaagtgagtgatctctctatgataaaattataacagaacgcgtaatggtccaggttggacctggtcaactaaaggtacggtgcccattgttttgacttttgtgtagtaagacatgaacatcacgtttaatatccctcatatcctgccttatctagataagtaataatctttttctttttttctttttttttttttctaaaatgagcgtgtattaataataggagttagatctcgtggtgattacaaaataaattagtcggaatagaggagacagggatccctccataccgcttaaaggtaaatgccgacctagccatattctgtgcagcgaaattataagttctactaatattagtcaaaatataactcacaaaaagagaaaaagaacttttacaaaatgagg

SEQ ID NO: 85236 - DNA, 736 bp, Cannabis sativa
agattaacagaaattaaaagagacctgaagctcttggaaaaaaaaaacaattgtatacattaattatttatataaaatatatgtatacaatttataccgatatgtattgattttcaaaaataaaatatactaattattatgatcacttacccactcaagcaattcctctttttacaagcacaactgtcacttctaaccttcttactcattttcctggaaacacaaaaacaatatttataatatgttataattaaaaatataatttaagcattagtagacctactggttgcagacatgttaatcaacagaaagaaaaatactcatattaaaaattgctcacaagtgtctaatatatgcaaatccctcagaggattcatcccatcagtacccccaaacacatagagattatcaccaacagtggtacagctgtggctgtctctgggagttggatgtgtgccttttatcactggctcgctccatttctgagtggctgcaaaatcaggtattcagaattagaccattaacttatgctacaacaatcttcaattgaaatacgatataatcccaatacaagtccaagaaaagttttaataccaaccagtaccttctttggctgtactgtaccatatatttaaaaggggggaataagatataaatgcaagaaaccctttaaagatggaaattaacccatcataatctcaaatatgagattaagcatgaaacccagaaaacaaaa

SEQ ID NO: 85237 - DNA, 534 bp, Cannabis sativa
ttattcgaattttttacccatttagggttaaactcaaatacatggatctacttagcctcgattgaaaaataacgagtgcctgtgggatgttacacaacgtgatggcggagaacaacggtggatgggctggtgtgaaatatcaatcgaaattttctaataattaaacgagtaatttatggggtaaatatttaactttaacaatcggttacacatactaaatacttaagtttaatgtttgaaagtaataacatatttaagttatatttttagaattttcgtagatatctgactattaagtgtcaaatcattatccacatatgattttcttatttggtatgtttaaattaattttaaataataaataaaaaatttaatatcttagatcaatcaagaacttgcacgtggctattgacttaacacttaacgatctgatacatacaaaagtttcagaaatataatttaagtattattattgtcaaaaattaaacttaaatatttatctgtaaaaataagttaacttaggttgcaaattac

SEQ ID NO: 85238 - DNA, 1105 bp, Cannabis sativa
  modified_base (26)..(47): a, c, t, g, unknown or other
gatatttattaataagtaaatctgannnnnnnnnnnnnnnnnnnnnntagggcacaaaacccaacacgagccccctgctatctttggttggcatacattttcccatgccaataatccagctccctatatcatatattgacctttcaaaaggaaagctcgacaaatagcttcaatctcatgaattaccttctttggaagcttaagaatctggcaccagtaagagtgtattgctgttaaaactgagttaatgagaacaacccttcaaccaaaagaaatgttcctagtgctccaagaccgaattcttactttcattttttctatcaaaacagtgcactcctgtctcgatatcttcttggtgcatgtggggataccaaggtatctgaatggtgtttgttgcttaaaaaacatgatgcctccagcactccagtaacatcagaattagccatgttgctgcaataaattgcagactttgttttattgggttgcaatcctgatgtggctcaaaaaagcttcaatccttggagtaaaagaatgatgcttttgtattcacctctgcaaaaaagtagtacatcatctgcaaagctaagatgattgagtttcaaggcttcacatctctcatgaaaagcaaaatcacttttgtttcctacttttttcataattcgggtcaagtattccatgccaatgacaaataatagtggtgataggggatcaccttgtcttaatcctctcttggattcaaagaaaccatgaagggatccattgaaaaaaaaagagagaattttggagttctgacacaattcattacaagagtaatgaacttttcaggaaatagtagcccccttacaacctcttcaatgaaatcccactcaactgtatcataggctttttacaaatcaagtttgatcatgcaattaccctttggtgacctcctcccataatgtctgaccaagacttggtagatcattatgttatgggcaatgaaccttcctttaacaaatctaccctggttttgagccacaatatttggaaggatatccttgagtctagagtgaatcactttagtggctactttatagatcacattgcagcatgcaattggtctata

SEQ ID NO: 85239 - DNA, 1159 bp, Cannabis sativa
  modified_base (1121)..(1124): a, c, t, g, unknown or other
ttattttcatcgttttagaaattcatattaggatgttaaaaacatacttgttagtaaatttagatcttggtaaaagatattccaacattgtgatcattaatttattgtctagattaaattgtctccatataatttaatactttatctaagttaaataaattgtatgcttcataaatttattgtttagttaaaatatttaattattgagcacttcgccttaattaattgtaatagagtgattgaaaatattgactgcttcattgtcttttacgaagttaatagtttaattaggaaactagaataatttttattattattgatcttgaatgattggtgagagtggagactaactcttaactgtctcttaatatcgtataatcaatcttcaatcactttttagtttatgctattaattttgagtttaaaataaatcctctattttaagttttagtgttaattattgaatagtaaattaaacgtagtcatcgtgggttcaacctctacttacagttatactgatataatcaaaaattgagaaaaatatttagtaaatttagtactactcacaacaagcatcaactagagttcttgtattctcttttttccaatcagagaaaaatacataaaaaaaatagtattttcttaaaagatcaaatccttctatgaaatctccattaataaaattaagttaatgctttcgttcatcacatattcattgtagcataattagttttggtgttgacttcgcttttagcaaacaatgagtctttttgataagcgataaacgatatgtcgtaatgaaaatataataaagcaataataagacacatgaattttatagaggttcagccccgagcaattcggtaatagcctaatcctcgttatttgtattgactcaagaacaaggaaaatggttccttttcttagagcacttacaacaatatctctgaatatgaattcttagatataatctttcgaccctttgcccagtgagtatgagtcactatttatagggctataaccttggagaggaagtatttcccttctaattacaattgatataagcagaaatatttcataataaatacagaatacactaatcgtgggatttggacagcttnnnntatctctgtaatctgatcccaaagttatagggatt

SEQ ID NO: 85240 - DNA, 974 bp, Cannabis sativa
tacgcacacatgcaataattgccacttgttcaaaatggaaatacataatctttttacttataagatgatggtacatacaaagtttttgttaaagcttccactcactctttatttattgtaattaaattcttagcttttacagagtttattctagcacaaatactattagcaatacatttaaaagtaaccttccgaatccacttaattaggacttcatggaacttttttttccaactaaaaataccaatccaaaaccacacttaatgaaccatcaaattgttgtaaatacaattataaaagaggtgagaatgactctccactccacttcaacataacaaacacaagaaagagttggtataattaaatcgactaagtctgtctgaggtagacaaatggctcttcaaggctagccaacttatgaacctgtgtttaggagtgcaaaatctatcccaaatgccatcataacgccatctaacaatactttcatgaggcatcttggcgtacatattagctatagaaactgataattattgctaaattctttttgggacaagacttgttttatcttttccttggtttgaactattcttttccaataccaattaccctccaaagggacttaattagtagtcccagtaatcttattttttaagatacacatcgttaaccaattttaaccaaaagttgtccttcttggtagtaataacccacacatatttactaatagcataaagattctataaagctatatctagaagctaaatttgtataatataggcttgtagattcaatttatataagttgcacaacaaagaccaattactgaataatatttatattctgtttattgtgtctatgaaccatttgtccacggattaactttttaaaattattctcttagttttacatgcgtactatggtaccccacaagatagaacccatgcaaagtttgtgaaacttgatgaatagcaagt

SEQ ID NO: 85241 - DNA, 660 bp, Cannabis sativa
  modified_base (302)..(302): a, c, t, g, unknown or other
ttattctcattcccactctcatttccattcttatgttttcattcttcccaaccaaacgccaccataattgaatttagttgaaaattgaacttgttaattcaaaattcaacatcaatatattttaactatttttttaatatcaaccatttatttttcatacaagaatgactcgaatagtaatctatgttcaatacgatggggagtggaaggatgaacaggggtcatataagtgatcgccaaaaaataaggaagttatatctataattgtcgatgattcgagcactacatttgagatgttattngataaattgtataagaagattggagccaatcaaaacgacatcaaattaaaaataagttacttacccataacacttggagaaaatatgccgccacttactttacgaggggatgaatgtcttgcagcttatcttttggactatggagagaacaatcgcagaagtgcactacatgtggagcttataaagaaagacataggtgaaaatgatgttgaaagttgcacaaaagaaattgagcaacccttagtagataactactttgatcgtgaattctactttgaataaaatgtttatgatattgcttctacaccaagtgaaagtggtgttaatctcgattgtgaatttttggatcatcttaaca

SEQ ID NO: 85242 - DNA, 835 bp, Cannabis sativa
ttagttaaattatttgcataataacttgctacttttttatatctttctgattcttgaggaattgggatttgatttattagttttgagcttttttccctctctcttttgtaatctataaatttttatagggatattcctttcattatttttacgtaattttattatttagctctaactaggaagacactgtatgaacaggactacatataaatgtaattatgaatgttgccgctgtcttgttgtgtcaagtgatgatcagtcgagcttggattttactttatgatttttttttatgtaactttttgtgctggcctactatataattctacaatacaagtgaataaattcagtgtctggttttttatttgtctccaggctttctttgctgccaatgcagctgctcaagcttcaagaaaatcttcaactagggtaacaaatgagcatgttaaaaaatcagtaagtctatgttaaatgtgaatagatgtccacttcaacatctcatgttctatagttttgatgtgatcatcttttccttactctggactgcaattctttgcttttaaaggctgctgctttgaagggctctgaccaccgtcgagcaacaaatgtgagtgtcaggctggatgcccagcagaaaaagttgagccttcctgttcttccaactaccacaattggatccttccctcagaccatggatctcagaagagtccgtcgtgaatacaaggctaaaaagtgagctcctggctagctgagtattgctataattgtcctaaaaaatttctaaatgattttgtttgaactaactgaactgttattggtgtatacattagaatct

SEQ ID NO: 85243 - DNA, 553 bp, Cannabis sativa
gaggagagttcaaatgcacaatttcattcatgtcaaattttaggaacacgatttggtacatgttaaatttcaaaaaatatgatttagtataagttgaaattttaaagtacgatttaatacaagataattgtcgcctgttaaaactttaaacgaaattagatggggttcttgaattcaataatattaatagtttggaaagaatttataataatctttcaaatttcaaacccaagggcacatgcatatcaattttcgggaagaaagaaatcataattaacattattattattattgttttgaggtcgagtgttaacatctaaccttcatttctattttcctttttttttttttttttgaaaatatatgttgaagtattttttatttttttcaagtcaatatttgttttagaatgatattgtaattgtatttttttaaaagaaaaaaattataaataatttaaagtagcaaatataatttttaatattacaatttatcacccattttcaaaaagaaaaattttagacttttacctccgtgtgtaataaactaacta

SEQ ID NO: 85244 - DNA, 692 bp, Cannabis sativa
catgtcctaggtcggagtcctataatgttagtagtgtctgttattgattgctacggtatggtagtttcacattctctaatgtattatttgctgaagcacaggattttcattgcctgatacaagaccttgctcgtgtgactaatgaaatgaactttcaaaagtctgatacaaaggttagttatctagtttcattttcattgtttattattatagaaaacttttttgtgattagtaattataatacttgatgtttgttttatcatctattggatatacatgatctcatataaaatgtgaaaagaaacttggagcttagaaatgtatgtgagtaagtctaactagaaatatacatggtactgataattacagtaatttttataattttatagttagtgatatttcttttgaactttctagctcttggattttgtaccacgcaatagtgcatgtgaaggtagttcatatgaaatgattgtagatatgctgtctttattattattattatactattatttctgtactcttttttctgttatccactgctgctcaattaattacaaggtcttgctcattaatacttggtgatcggtactgctttgaacttgtaagtgagatgcataactaaattcgtttgctacagttactgttttttaaactttctaatgttgtaattagttttctgatatttttcc

SEQ ID NO: 85245 - DNA, 589 bp, Cannabis sativa
tgtgcagtgacattggattcaaacgaccatatttttctgattgctttcgcgatagctgacaaggagaatcacgactctttgacctattttatgataaaattaaaaagtttcatagagaatttaagaagataaaagtaatggatgttgctattgcattaaatcttgagggcattaaatttgaaaggtgagctcggtcgtaatttgaaggggattgttacaatgtaatgataagcaactgggctgaaagcttcaacaacacaactaaggactcaagagccttctcgataactgcttttgttgaattctttaggtttaaagttcaagagtggtttgctatgcgaaaggaaatagctaataagtgtacaaagactctatcaccaaaaatggagcaggacatggcattgtagcttgagaaatctaagtatttgaacttcgatacatgtggaccttatacgttcaatgttcactttggaggactggtagagaagggtgttgtagtaaacttgcaggaacgaacaagcacttgcattctgttccaaatcatgaagattcccaattctcatgcatgtgttgcagcccaagaatgaga

SEQ ID NO: 85246 - DNA, 825 bp, Cannabis sativa
  modified_base (26)..(33): a, c, t, g, unknown or other
  modified_base (735)..(741): a, c, t, g, unknown or other
acaacaagtattgtgactaaaaatannnnnnnncacaacaaattgtaatttttatgtctaatacatttaaccatggacttcggtagaattaggactagttactacttagtaatttagttctagttagtaattcagagtaagattagttagtagttagcaacagtgtacagtaattagtattttaatagttaggattaatattatattgttatattgttgagtgataacgatatatattattgagtgctaaggatagatatagtaggctaaaaataatacaaaaaattgtctattgagatctgaacctgtgactaaaaagatatattgataagtccttaccactataccaaaagactacctatttataagaattaaaggaaattaactagtattggacattttattgtagtagaattaacaaatacatgataaacattgattctaatatttaacataagaatcctattagtttattttaagtaaaacagcaaaataaaatacaaataattggtaaaagtggtgcattacataaatttagtatccaaaatatttttttaagagaaaataattggttgtttgggatgtgcagaacaggaaaaatatccaagttaaaaaaaatcaccacctcaaacgaacaacccgcggaccaaaaattattaatgttcaaaatttttaaaaaatttctatgcaaagtttagtcttttctttgcaaagggaagctaaagggtgtgaaannnnnnncctgattcgaaattgacatttagaggcggttttttggtaaaaaccgtaggtatatatatattaataaaccctatcccgtcggtt

SEQ ID NO: 85247 - DNA, 500 bp, Cannabis sativa
gcaaggttggacgatattgagatagtattggatgtgttgaactgattccactaatttctcaaatctattttctcttttgttttattcaacaaatttgttatattatttcctagtctaacgtaggattaaattagtttcattttcttatgtatatttaacttttaaatatattaattgtaatcaatatatatatgcacagatcatgaataataaaaacacaagtttttaatgtatatcatggtatcagtagaataatttctcttattccttcatcatgtttgataataatcaaacctccactactccactattatcctctcacatcaaacaagactcttacgttatccatcattttgatggtcgtgcaacagtccttgttacacctcttttaacaggagataattatggatcatggaggcgcagttagaatggcacttcgtgcaaaaagcaaactagattttgttgatggatccttacccattctcgaagaacaaaacgac

SEQ ID NO: 85248 - DNA, 555 bp, Cannabis sativa
agcatttaatgtatttaataaaaaaatttaaaaaaactatacataaacgtgaaaaacacaacaaatttaataaataaaatttaaaagtattagttaatgacaagtagaacataatgcagtgtttctcatgttttcaaaaattaaactcattagttaacgagtcgcatttctattagatctacaacacccccacctatggagtttttttaagaggtcctataaaagaattgtcttatatttataactctcttgccaacaaagttatgtggcataccaagatttttctaatgtagtttatattttttcttattattttcattttttatatttttaaaaatacttatagtaagagtagtcaaactaaaagtcatctaaagtaatttgtatttaagaataaaaataaaaaaaaattaattttatatgtatttattttagtaaatatataattaaacgtaatttatgtctatttatatatgataataactaatgaaatgtgttattgtctattcattttttttagtttagttttagttttctattcattatcaaaataaa

SEQ ID NO: 85249 - DNA, 657 bp, Cannabis sativa
gaactcaggtgagtcttgggagaaggaacatcggatcgaccaggacctgcttcaacttttacacaaggatcatcctcgtctttgtttttgcccaccttcctctagtgaaggacattctccaaaccctgtacccagccatagaatgatggctcatacgaagaaaacaacaagtttggatgacgcatctgaccctctagtggctcggtacgccactttgctaagtgccgaacaagatcttgccgtccagatggagggggaccatgaagggcacgctgaggttcagcagatcgaggagcaggacgatgtacgtcctggcagttcctgtgaggcaaaggaagaggcagaggttgaaccgccaaactacggggagtacaacgaggctggggagccaatcgatcgtgacggagacatcctggttgagggcgtggattacgtcagtgaggaacttgctactgcaattcctcatagaaggcaaggtgccttgggcgccaggtgggtaagcactccgtccagggttattgaggcgccccttcgtactcttaaccaggacagatacctgggcgaacaggattgctacattcccgcccacaacaatcgtgccacgaaccctgaaaaggggatgtgcgcctggtggggtgcccatggttagcaaggggc

SEQ ID NO: 85250 - DNA, 676 bp, Cannabis sativa
taaaataaattccaacagaaacttgaggaagaagcgaacaaaactaatgatgattcttctaccgtccaggagcaagagaacaatgtctctcaggactcaaccgttgctgctcaggattcatccgctcagcttgaagatccagggaatcctatggagtaaatttttcaaattctttttgtctgttcgacctacaggccttttctttagtataatatggctggccaagcggcttttaatttttgagaaatattttttattttttttaagacgactagctggtcggccagcttttaatctcagacttatcctgctttattatctcaataaaaatatttttctttaacttcaaattgaatttgtttttgctttagcttattttttaccaatggttgtacgggtataggtacccccaagtgaccgagtagacttttgactctttgtcacttgcatttcataagtttaattttgtctttccgactttttgattttaggcaaaccctttgtacacatattaggtaattaaattaacacaatttgaatgataatttatatctttatttatctattaattattgatatgtgttgttaccgtggtaatatacatttattaaattataaaaagctattacatgatctatctgatctttagctaattaagggctcgtttggaataccg

SEQ ID NO: 85251 - DNA, 727 bp, Cannabis sativa
  modified_base (26)..(28): a, c, t, g, unknown or other
  modified_base (630)..(631): a, c, t, g, unknown or other
  modified_base (676)..(686): a, c, t, g, unknown or other
ttactcactaaaacaagaactatgtnnnaccaacaatggagatcgaatgtttctagattaaagctcattatttaacataaatttttatttaatcatttattgtagtctatatattttaataataaaaattacttaatttaagttgatccagaattaattaaaaattaattttcaactttaaattaatttttgaaaatcctttatataaaaaatatatattaatttcgaaaaaatattaaaatataataaaataaatacttaaaaaatatctaatttaagttgttctaaaataacaaaattttcaagttaaattattttccaaaatttaattaaataaaaaattaagtatcttgaactaatcaccttaatttgaaaaatattcaattttatgttgatccaaaattaacaaattttcaacttaaaaaaatatttaaagaatatctgaataactaattttctaaaaaattctacttaattattaatttaaaaaatattcaaatttaagttggtccaaaattagttataataactgattttcgattaaatatatttttatgaaatattaaataagtaagtatctagaagaatccaattaattataactgcttaatttaattaaatacagaaaannacatatagtttatcttgaaaaaatttcattaaactaagtgtgttnnnnnnnnnnnaatttcaaaataatctgatgaaaaattaattttatatattt

SEQ ID NO: 85252 - DNA, 1398 bp, Cannabis sativa
tgttagtaaatctggatcctagtaaaatattcccaacagtacttttgccactttcagggcgacaaattcttgaagaagttgagaaaatagacttcaagtatggaaatggcaagaaaaaaaggctaatggatgttttcaaagaaaattgattttcttcaggccatgttctttgaatttatgagagtaaaaggtcaaaatgagtacgtcagagttcctgttaacccatcctttttaccgactttacatctacataaattccaagagatgtcataaagtggccacccaagatgaacttacgggttcaactatgttatttggactaaagtatctctttaacttttaccaatatatcatatatatattatgttagtggagtttgaatatcttagatattcatttgtagtgaagtagattctaagtttgatggactgtggagatataagaaaaaactttatgtgttgtttattgtattgatatgtacttaaaaaatttcagggaatgttatggagacagaggaaactctgtccattttttttaggactctatttgattttttttctgttttttttttaaacatgtgcatttggaaaattttaaatcaaagacaaaaagagttatacaagctttatgatgttgagcttcttaattataataatgagcaagacaatgtgatagccatcaattaattgtcaatatggttaaacaatatgactcaagtaggaccatatttttccctcaaaaacaaaaggtagggcaatatttttttatactatggaacatagggtaagacccacaccattatttcactttcactataatattttatttttatattaatataacattgttacttttttcaacaagaattggatgttgattatagcaaggacatcgggaagaattatattcttaaactcgcttaaatctaaagtcccgccaatcattgctgagatgataaaaaggtaagtttagaactttaagctattcattctaatataataatcaattactaaatttcaatagcttcacttataattttttttatgtctttaactgctcatacacaaatattagctcaaatactatcgtatttggcgcaaaggaaccgcgaatatatacttttgtttgtccaaaataaccataaaattacgaatgtggttactatgtacaaacttactgataactctatgaaaatagagttatttatatcttttaattttgagcattaaattagctttgttctcaagtattttagtttattttagtatcttttatttggttttatttagttttgcataaatattaattttagtatctttagattaatttttaactaattttgtaatattttatcaattttatttagtttctcattttataagtgttaatctcaatttt

SEQ ID NO: 85253 - DNA, 673 bp, Cannabis sativa
tagaagaaatttatttcacccaatgaaattttagagccacgaatgaacaccaatcttctcaaaaggggaaactaaaaccagacaactcaaaactatacatgaagagttgtgattaaccaaatcattatctatacaattcacaattgtgtttggagaccctttgattcactatacaattaatttgcatgactttacattcccaaagagcttcatttctagttttccaaatgtgataaaccactgctgcaagagcagccacattcagtgggattagcctttcatcctaaccaagacttgattttggtttatacaagcatggctgttaatgcaagagaagaaaagatgattcacatcctctctgtcaagaacacaaatcaagcaattcggggatgttgcaatcccaatcttatgtagcctagcacaagttcaaacttcaaagtattcattttgatcaacttatgatgttgcataaaactaacttaactaactaaccccatttgttcaatttcaaggagaaagtaagtaactttgtgctgcattgtcttccttgattgacaggcgaaatgaagctcgagtaatgtacgaaaagcttcaatcgcacccaactgctcgagtaagcaagaaagcaagggaattcactttcagtttccaggtaataatatgtaaaattcta

SEQ ID NO: 85254 - DNA, 1231 bp, Cannabis sativa
ttttattagcgaatgtttgtgaatttatttggccgacgtatataccaatcccttctctcttgtttttatatacatggatgaaagttttgttttttcttcttgttttttctttgtagttcattaattaagaagtgttgaatttttttttttttgtctctttcactatttccacgtcatctttttctttttctacatctataatatatttttaatattaaaaattatttatctttatctttatcataattttttttttttaaaaaaaaaacattttaaatttaaccggtaattatttagtatcgagagttatataattgtaatctacactttgaagtgatcattttgatatatggtaagcatatatttttcaaccatcactgaaaaatgactaaaaccaaaaataatattttagtttattttatatttagttagcaagtaattcatttttgaacttaaacaaaattcaatagggtcttgtttggcttagttcctataagctcttgtttagtttttaaaattaaaagtccttgtacggttatttggataaaaaaatgaaaagttcttttagaagaagctaagatttgtagcttctcccaaaagaacttttaaaaagttattttaaaaattaaaataatttacataattcttaatttactcacaaaagattttttttttaatgatatccaaacattttaaaacacttttcattaaaataataccttcatataatagttatccaaacggtaaaaaaaagacaaaccttatacttatcttatacttttagctataagcaaaagtaaaaacttagctataatcaatcaactttataggtttgcttttcaaaaaaaaaaaaaaaactttataagttattaaaaaatattttatagttcataaaataacttgtaaggaaaccaaataatatctatgagttacattaaaaaaaaaaaaaaacaaaaacaaattctactaaaaaattaaatataccaaccacatttcatggattactaaaaatttattttgttatttaataaataaaagtaactaaattgtattttaaaataacttataagaaagcaattaaaaaatgattttaactacgctgctagtcatttgagctcaagagtagtattaatacgatctatttttcgagatgatcattttgatttgtagaaagagagatattttcaccattacgtaccgaataaaaatccggaatcaaaagtaactttat

SEQ ID NO: 85255 - DNA, 737 bp, Cannabis sativa
gataatgatgtttttcttgaatttcacaaatcttgttgttttgtcaaggacaaacacacgggggctgtccttctcaaaggaattctcaagaatgacttgtacctgttaggcgatggtcactccaaactgtccaataactcattacaatgcaatcttgtcacttcttttccaaattcaaatacatgtaattgcacttctattgattcttgtaaactgcctactgctactggtttttcatgtactgaagttgcaatcaataacagtgtcttgccttctttacctactgcctatactacaagcttgcatcatgatataaataattggcattgcaagttgggacatcctgcacctgatgttctcagccgtattctaaccaaatccaaaattactcactctctcaaaaatttacatttttgcaagtcatgtcaattaggtaaaagtcatagacttcctttttctttgtctaatagtagagcatcacagccccttgaactgattcataccgatctttggggtccctcccatattgtgtccaaagataactataaatactatatcatttttcttgatgactttagtcgattttcttggatttttcccctcacccttaaatctcaggcttttgaagtgtttattcggttcaaaagtttagtagaaaagcaatttaacttgcctatcaaggctgtgcaaactgatgaaggaggagaatatagaccatttgaaaagtttctcagtga

SEQ ID NO: 85256 - DNA, 611 bp, Cannabis sativa
  modified_base (26)..(43): a, c, t, g, unknown or other
cggatatccgcattttgcggattggnnnnnnnnnnnnnnnnnngattggattggatcggatactttgtgaacacccctgtatgtgggtataaaaaaaaatctttatttttttaaacattacaattcaaatttaaactcattacacatatctcttttatcttttatcttatatcaactgttgtggttatattttttttaataacattataatttaaatttaaattcatttcatgtatctaacatacatatttctattgttatcttttttacctaatccacatatataataaaacatatttttattattgttatattttaaaacaatagaatagaaaaaatatttatcctttttaaaaagactactgttgtgatgttgttacctatgacagttactaaaagctatattatttttattattatttaaaaaataaaaaaagtacgtgatatttctaaagaaaataaaagtattgtaaaattaaaagtattacggttaaataaaaattataataaacaacaaattttaaatattattatgttttttttttttatataaaaagtaattaaattaaagattttttaataaaaaatatgttgtttattgaataacataa

SEQ ID NO: 85257 - DNA, 773 bp, Cannabis sativa
taaccaaacaaaagatttattcccatgataaattcaattctctctttttttttttatgaaaaatgaagttttattaaacattaaaatccaataccaaacaaaattaattcccataataaattcaaatctcttcaaatcaacataaactcaaacttctttctcatcatcatcaatggatggaattgattatatgtcatataaaaacttctcaaatgctttcatgtgttcatgttggagaccaatcgcccactaacaaactcccatcctcattataagatggactagatagcaaataaattaaaccatcaaagagaattgtagtaggtcccacaaaaattggtctaccccacccaaaatcaagatcataaaagggtaatctaatccaacttgttatcccaagattagggcttctaaatgtatgtggccctctactaagagctgataaattaggctgaagttctagataatccagcgctgatctcaaataacagtcatctattcgcttcaaagtactatgaatttggttcacagcataccatatattatcattcgattcgagtaattctcctgctttaactattggcgtggctgagaaaattgcgttaccaagaaaatctgggggaagtggtggttgcagcctcgatcttccatcaacaatagtgtacaatttagtctcttgatcgttactaagtttacgagctttgcatacacatctccaaacatgtcccgccaatatctcatatgttgtatacctaggtttgttcttgtcatcg

SEQ ID NO: 85258 - DNA, 1230 bp, Cannabis sativa
  modified_base (1163)..(1164): a, c, t, g, unknown or other
aataatatataatttaaaaaaattgaaaactagttctcccttttatgtttttctcttcggctcactcacgcacacagacaattgacatcgacaaacaagaagatgaaatcgcaagtcctctaacggtgtcacacctctcttgttcgttattgtagatcatcacagtgtcgcatctatcttattcatcgggtctcaaatgttccttaaagaaggtggaaggttcgaactagtgctggcttcaatgggattaggtttttggggtttgggtacttgatctccgtcatgggatcagatccttcgtcgacaagcgaaggaggtggcggagaaccacacacatagagaagagggtttaaatctaatattttaggtttgtgatgatttgttagatgtggattttttttgtcgtgtgtgtgttttttattctttttttttgggtgataatttggatttgagaaaattgtgcgtgtgtgttgatttggatttgagaaataggttgtgatggtagtggtggtggttgttacagtgatttcaatgcgggtggtatgaaaaaacatgaagcaaaaaataaacaatttggaaaaacaaagtttgtagagaaaaacaatatgtgtttgtgtttgatttaaggtatggtttctttgagttttcggggtcatggtggttttggggtaaagcaccttgaaaaaactagcatcaaaaccatcaggatcgagactttttatttggtttatattattgaatattgcatccttaaactccttcaaaaagggcttgatgagttgaagttgttgttgcaatgtaagttcatttctttgagccaaacaattagaattcaattttttggtggtcgaactcttagcttccatgaagttcctgaaatgatcaaaatagtgagctataacattatcataatcatcagtgactttaccattcaaaataaaggtagtgatcctattttgcaattgtaccccttttctttttttaaaaaaatacaaataatatagggatcttacaaaaataattattttttttttgtcatttttatatttttacttgggaaatttgacattatatacttaaaaaaagcataaagtgtctttatatgcttcttaaacaaatgtaaaaataataccctccaaacatctttaatcccaacaataccnncctcatttcaaacccccactctccctctaactctctcgtttatctctctttctctaactctccaaa

SEQ ID NO: 85259 - DNA, 748 bp, Cannabis sativa
  modified_base (27)..(29): a, c, t, g, unknown or other
atttacttggtcccaagtgtattcttnnntagaggttctactgtatttatatttttattaatttttaatattcctctcattattattactatgattattctaaaatggtattcatctcattattaataatgtatttattatatttattcatatataatatcaaaatataactgttcacattaaaaatagctaacactcgcttgttagattgacgatgaaataagacatgaatagagtaaataaagagacatatataatttatagtagctcactcttcatatcgctataataatgaaactacatctactttgagttttttttttctcacgagaattacaagagagtttactaagtgtgaaagctttaaatttctaaagagagaacttagagggagatgctttgaccttatggaaactagtctgaatgtgaaacatgagctagatgagctctccttttatagggaaagaagtcatattaaaataataacaaatattcaaaaaaaaaatatataaaaaatacatttaagctattttgaccgttagtgatgatctaacggtgaaattgactctagaggtcgttcatcaatttttggagctcgagtcgcgtatgtacatgccgttttggtaagttgtagttaaaatttgtaactctcttgaggacaatattggacttgatatcttcagaatcatgattagagtgtgaaacatgacttgatagagcatgaaatagtttcgaaattcaagttgaa

SEQ ID NO: 85260 - DNA, 1620 bp, Cannabis sativa
ttagacaatgagctatcctggttcgaggaggtgccgccgccgatggtggattgctgctttgttaatcatgtgtgatctggatcaccgcgtcaaaaaaaaaaatattcagtatttagaatatttctattttttttaacaaatattgtatctatatttaatttaacaactttatttggtaggtacacaattcttcttaatatgcaatctgccccagctacccgtagacggtctcggtttagatttgagaaaatgtggcttcatgatcaagacagtgttgacattatctctaattgttggtctcagaattctaggggcgatgttatctccgattttttaggtaaattgaagacttgtgcggatcaattacagacctggcatgttcataaatatggtaaattgaagactgatatttcccaagcccaaaagaaggttcataatcttcattcgccccctgctagacagcagtctcttcaccattctgatatgaatctgcagcacagtccacaaaataatattcaacaggccgaaaatattttggatgatcttcttgctaaggaggagctttattggcaacaacgttcttggattgactggttaaaagagggagatcgcaataccaaatttttccatgctaaagccaaagcgcggaatgttaataataatattacttcgttggtggatgatcatggtcacactgtcacttctagggagggtattgctgatatcatttatacttatttcactaccatttttactgctcaagaggaggatcactgggctctctctcatgtcctctcaactatccccactactgttcaggattctcataatgaatatttgtcaaaggagttcactgaggctgatgttctttcggctttaaaaacaatgggatcggatagaagccctgggatagatggcatgtcagctatattttaccaacaccattggcatatcgtgggtgaatctgtgtcgaaagtggttctacatgttcttaacgaaggaggtaacccagctgcttttaataagacattattaacgctcattcctaaggtcaaaaaaccaagatcgatgaaagactttcggcctatcagcctatgtaatgttatctataaactcatctctaagatgcttgctcttcggcttaaggatatccttccagtggttatctctgaaactcaaagtgccttccttcctggtcggttgatcactgacaatgtcctcgttgcttttgaaatgattcacggtattaaacgtcggaagaaaggtagaaaagggtatggtgctctgaagttagatatgagtaaggccattgatagagtggaatggtcgtttcttgctgctgttatgggtaagatgggctttaatattctctggatttctctcattatgacatgtctccacacgaacaccttcagttttcttcttaatgggactgttacggggtctatatctccacaacgaggcttgcgacaaggggaccccttatcaccttacttgtttttaatttgttctgagggtctctcaaggttgctacaatatgaagaaagcataaggaggttaaagggatttgttgtggctcgccgagctccttctattactcatttattttttgctgatgat

SEQ ID NO: 85261 - DNA, 1166 bp, Cannabis sativa
atggcttttcaataagatgaagtatagtagtgaataatttggaacaatatctttctgattgaccaattattctgcatataaaacaaaattctagaatcctttcatacttaaaatttacccagaaccacaacataccatcatgacgaatcttcatatgtctcttgattgacttctccacattcatagtaacctggactcgtaaataatctctccgcacgccaagaaaattgtttggatcagctcaacaacttctccaatataattaccaaccttactgacgatggtttctgtcatataccctgtctgtaaaacatgtatttgaacccacatgtccattacaatttatcgagaatgttctcggattctccccttccttcaatcgagtaaaaataaatggttatctatcatatgtccatggactacctataatcaccctctgaatattgacttcatgataaaattggaataaaaaaagattagaattcaactctttaacatacattcccatgcccgacttccagagatatgtcatcatattttgaaagacattaaaatctgacactttcccagtcaaaatctttccaaaaaaacactaacgtgtgtcaatggccacatcctctatctcaccccctaaaacgtctaaaactccttctccttcttcttcttctgccaaattaatgtctgtcgtttgttcacaatatcctaaaccaaacagctgctagatgccatccctaaaaaaataaacatgaaaatctcacaacaaaatgaatcacaaacacaacattcacactctaaaatagagagacaacttcacaagtcaaaagacatgaccccctcccactgaattattattatagtcaaagttagaaattttgaagatgtgctaagtacaatctcctattacaatctcttagtcaacttctacgcttgaaattacatcttggaatatgtttttttcatagcaatattcatgactagtttacagttcctgatatttcagtctaccacgcatgttcaaaaaacttcaaacttatttatagcactgtaaaatattcaaaaaaattacaaggataatgttgtaactataacgaacgttgccatttaaaaaaaaatttaaaaaatattctagcatgtattttgttgcataaaaattggctaagaggcta

SEQ ID NO: 85262 - DNA, 567 bp, Cannabis sativa
tgctccaatagtgtgccaaaaaattatgtaaatttagcacataaaatttacaccacaataaatgcactacttttttatttacatttatatatattatttctattaatttattagtatatttaactatcacattaaattatgaaacattaatattattttttttattattttacatattaaaataataataaaattaattatacagttattagatttttttttaaaaaaaacataaattatatattaaattttacatcaaaattttgtaattgtgcacaaagttaaaatttagtgtaaatttaccacaagacgacttttatactaaatatagcacaatgtttacatcttccattagagaattaagcccaaagcatttaatatctatatattttaatttaataatgatctcaaaatgcaattatatagagttggcattttatttggaacaaattaaggtacaataattaataaaatgattttttttacataatttagatagaaatgttttactagttgacaattgccatatatatcttctggtgctgatcgatcatttgtcaatattac

SEQ ID NO: 85263 - DNA, 936 bp, Cannabis sativa
gtcagcaaatttagtagctcataactttgctagagctgctatttcttaccctgatcgtgttttcagtatgggggatgtcccaactgatttgttaccatgtttggtggctgaattggaaagttaataaagtttgattactttcttcaaaaaaaaaaacagaacttaatcattgcttctagtttttttttaaagaaaaaaaaaattataaaacctgagttgaatagtataaaatggttgcatatgcatttaaattaagaataattaataattttgtccttagactttcgataatattgattctgtaccctaaaatatatcacttattaaaaattctccttaaaattttatatttacaagaatttagtctttctattaggccatctctaattcgagatgcaaaagttgatctatatttgagaatagttttgtaatatttttgcatcaatttttattattatgttccaatgcataattgtaaatctttatgcaaaatttaatatatcattcaatgcttatctaataatttattaaaaatataaaataataataatcatacaataataaatataaaatttaataataaaataataataattaagaaagtcatttaatgcaaattagcatgctaacttataaattttaataataaaataataaaaatggcataatgataaatataaaatcatagcatgcaaattttgcatcatgttatattatgatccaaatttggatcaccttttgttatgtgagatatttgcatcacaatttagcacaccattggagtagacttttgacaaagtgagttatattttgcatttgcatctccattggaggggctcttatgttctatcctattattccatttaactttaaatgctgacatgtctttgtaaattaacaactttgcttccgaaactttgacaactatcaaatcgt

SEQ ID NO: 85264 - DNA, 895 bp, Cannabis sativa
  modified_base (862)..(864): a, c, t, g, unknown or other
ttgtctaatgatatttttagacagactttgccagcccgcatgatccccacagaagccttcatgaatttctctgatgatttcatttgcttctgcggagagaacacaccgaacaaggggcattgagtaccctcttctatagtttgccttcgatcatagtgtagcgaggcactgaatacaatagtttttgttcctcgtttttgtcatttggaagttgtccgtcgagtaaataattgataataggagtcatccatgtaggagagctatctatcatctcgacgtcttcagtttcacatatacttggctcgctcaacatctctaccgaaactaaattcaattcatccaagtcattctgcgaggccagttttgctaaggcgtcggcgttggagttttgttctcttggaatttgttcgattttaaagtaatcaaatctttccaagttcttctgaactttctctaaataatttgccatttttaagcctttggcctggtattccctgaggacatggttcacaatcagctgcgaatcactatgacaaatgagatttttgactttcaatgcctctgctatctttaagtcggtgatcaaggcttcatactcagcctcgttattggatgcgtcaaattggaacctcagagtataatgaaacttaaagcctagtgatattaatattacccctacacccaaaccctgttcgttggatgcaccatccacgtataacttctaggtttatgtgtctcactgatcaagtggaatttcttctggagttataccttctatcaagaagtcgactaaagcttggccttgatggatgttcgaggatggtatgttatgtcgaactgccccagttcaatcgaccatttnnncaatcttccagaagcatctggttttgataaa

SEQ ID NO: 85265 - DNA, 635 bp, Cannabis sativa
acctagtaagtcatctttaaaaaattcagttctattgtaatattaatctattgcatactaattataaatattattatgctatgcaaaatgcagtgcagtggagtggtttggttatgttatatggtatggcgccagaatataatatgcttctgacggcatattctcaataaagactgatgtattcagttttggcatattgatcctagaaattgtaagtgggagaaaaagtagatccctttatgatgaaaatagtactctcaatctcgttggatatgtaagttttatatacaaatatacttaattaatgttacattacatcaatagtgaattttttccatttatttatgttatttaatatttgttaggcatggaattcaatgaaggaagggaatgagtttaagcttattgagaagtgcttactaaaaagtccaaatgacaacatggaagaagcattgcgttgcatccacattggccttttgtgtgtgcaacaaatgcctgttgataggccgaatatgtcttctgttgttctaatgttgagtggtgagagattgttgcctcaacccaaaccgccggcctattgcaatagcacatattcttcggatgtagattattcctcctctaatcggccccaatca

SEQ ID NO: 85266 - DNA, 998 bp, Cannabis sativa
tggtgctttcattgagagcctctatgaaaaagcttagaaaaaaaaccctcccttcttttgaagaaaaaccacctccttcatgacttaaaatccagaaaatgttaacaccccacatgaggaaaccaatcatcgttcttggaaagagcccatgggctccagaagatctaccaactcatagtccagaaggaccaccagttcaaggagggctcatcctaagggtggccccagtccacggaccgcacgttctcagagaacccaacccgacgttggtcctagtacgcaaaaacacactcgaggagaactcaacatgggaatggtcagaaccccgggacgagggatgaaaagctcaatcgtggaggtgcccagtccatggggaaggaacttatgaaatagaaaactgcgcttgagacgccgtctggaagaggtgtagcgtagaaatgctgagttacaacatgatgcagcctcggttagggcggcacaggggacgaatgctcaaaatcaacctggacctggagtgagaagaccatggggtagaccttatggctcacgaaccgggagataggaataggcccgggaagaacaacccagggaaaatgagacaccccctaaaaatcagaactaacagccagatgggagacaaccggaaactgatgaatgagaaatccctcatgagggaaatcacctactagaaatcaccaacattcttcccaaacccatagagcgaggactcgtacagaccctaatgagggaaatacgataaaccgctatcgggggaaaagaacagagcgtgaagaagcaagtgtgacttcgaggtggtcaagaacccacaatcgatcaactcaaagaggagaaagtactcaacgagctaatgatggagaaagtatggaaccaataaaatctcgagccactcaaagacaaagtctatgagtagaacgggttgcagtgagtaagatgaggtctgccagcaattactcccaatcggatctgcgagagcactt

SEQ ID NO: 85267 - DNA, 1527 bp, Cannabis sativa
aaaaaaagccagacagggtaaaagggccttgatttcttcctcaacaaactctaggaatatctctaacaacaacctacatatgcggattcgactcctcaacttgagattataggagcttcaaatggattgtaactcccctagaaaagagggatttttatgtatcttttatattttaaaaattttaatgtacttccctacttcctttaaatagtgaacgtattcacaaggaaagggacttaaaattgttatctcaaccctaagagcacttctacaaagaatattatttgtaagcatcttgagagttatagctagaattcacattgtcttccttagtgatatgcacgatattatctatctacactaaaaggggagtatgtcattaccaatatctaagggaccaaatctctataactcctagtgttctttctattacttaatttttctaattatttcttggtgacgaattcatttattagactccgagtcggttggaaaattctttagtcaaaaactactataaattttgtgtctctctaaattatatacttaccttcattatttatctcgccaatctagcgagctggtgttggctacttttcagcgtcaacataaagcataattcacatttttagtccaaaataaaaaaaaaaatacacaaagcatttaaagtacttttttgtatggatttatttaaaaaaattttatagacatttttttcacttatattttttaagaaaacaacattattttcacgttgcgaaaatatagtataatggaaaaacaacagtaaaaacggcatacaaaaattaattcgtaaaaaagttttaaatattgtacatctgtattttacgataattgcaaacttttgaatgctatattgtgttaacttagtactatagtcttatatattttttttaattaatgtgctaatctttgttaattaaaggatttttaaagaaaagtgactttttatgagactcaaagttgaataagcacacttaatttttatgccctcgtgctaactagctttgggctattggatctcgaaatctagttctaaaacatacataacatatacagtataaaaaatttcatccaatgacataaacaaaaaggtgtcaaggatgtatcaaagatcgcaaccctctagacttatgcgacttgatatgtacaattttcgccaagctctgccctcaattcggtttagccttgactttacctttacctacacatagaaacatatatgtgagtcaataaactcaataagaaaagcataacataaaaaatcatatctaacttgtaattgagtgcttatacatcaaattaccgtaagtctactaaccgcattcaatgagtatagactgagattcaaatgttcgtaccaatatcatgattaacaataatactaacataagcttactactctacgtactggtatttgttgggcttggtgccttaaataaaactctatttcaatgtaatcttttatattcaattatcaataaaaaatagatttattttcattac

SEQ ID NO: 85268 - DNA, 509 bp, Cannabis sativa
  modified_base (460)..(476): a, c, t, g, unknown or other
aaaaaataaaaaaattattaggcttttatttaagtaaaattaagtgtattgtaaacaacaaatattcatagcttagttaattaaggtgtatctcatattatacaatgccatggattcgaatcccataatattctttttcaaaaaaaaaattatatatattttgtagggccccaaaatcaaatttgccttaaaccataaattttcagggccgaccctgctccttttatgtgttacaatgtatagaactaaaaaaaataaattaaccaattaaataatcaataaattattaatttgaacaaaattacataaaaaaagctaagactattaagaaaatttaaaagaacagctgaacaatactttatattatatcaaaattttaattacacgttctgtaccaaaatgattttcttcgatcttgtttatctagatcaccatcttggtgttggaattattttaccannnnnnnnnnnnnnnnncaagtatgttattaacatcctaaacatgaactt

SEQ ID NO: 85269 - DNA, 584 bp, Cannabis sativa
tgatcttgatactattaacttgtggaaaaatacgattctcagccccatcacccgcctgaattccaggccatgatgtctctagagtagagttttaagcatgtctccattaatcaagatatcttttcatttaaacttagaaatcagccataaaaatggcaattaactcaagagacaaaagaatcttcttgatagtatgactgggagaaaaacaaaaagtacgcgcaatacaatgtatgaccttgttagcagattgattaacaaaacataacgaaacatgatttaaatagtttagaatagttttactatcagaaacaaccaaaccgaattctgaaggcactcataatcacttgtacacaaaccaaatttctgtatctaaaatcacattgtcccaatgatgatcatcaatttaactgagaggttctttgataccaataatctatggcacttccaatggaatacgactcactttgcccctattaaatacctccaacaacctcctatcactatctcgatctacacattccataccaaaccatccaacctgcttaaaaattgcactaccaacgttaattttgatttgatta

SEQ ID NO: 85270 - DNA, 1632 bp, Cannabis sativa
tttagggcataaatcccaacagttgttatgggcagatctaaaccagttgagtactcaggatccttggatggtattgggtgatttcaacaatattttgttcaaagaagaaagaattgggaagagagtaaaatacaatgcagccaccgattttatagattgtgtggggcattgtcaactagaagatatcaagtatagaggaagttaatatacgtggaacaataaaaggcaggggagtgagagaatttgctcaaagattgaccgagttttggccaatcctcaatggttaagtaatttttctactgctgaagctattttttgtagtggatgaattattcgatcataccccgactatagtcactttgtatcgtgggattctaaattggaagaagccttttaagtactttaaaatgtggacctcccatccaagatacaaagagatagtaaatggggtttggaagcagcaagtaaccagttctaaaatgtttcaagtcatttcaaaattgaagaaactaaaatgggcttttaaggagttgaacatgagatgcttctctaatattcaagaggcgactgaggaagcaaagaaggggctgctagaggcctaagtgaagctacaaggtgagcctctaaaccaggagttgattgaacaagaaggggcagctagacaaaaatatgggcatttgctaaaaggattgaattccttcctgcaccagaaatccaagataagttggattaaggagggagataaaaactcagccatatttcatgctagtatcaaggagaggagaaaactaaatagcattatgtctattgaagaccaatagggtgtgagaacagatgacaaaggaagatttctgatgcctttatttcattttaccaccaattacttggttctaaaatggaatataggaagaaggtcaaccgaaaggttatgaagcttagtcctttggtttccaatacacaagcagaattcttactgaaagagttctccaaagatgaagttaagagggcattgtttgatattctaggaatcaacgctcctaggccagatggttttactagctgtttcttccaagataattgggagttgcttggagatgatataagtgaagcagtcctttcattcttacactcaggacagatgctcagggagatcaacactactgttcttacacttattatcaaatgtaagtttcctaacacagttagtgaattcaggctgattgcttgctgtaatgtattatacaaagtggctactaaacttatctgctccaagcttaaagttttcttacctgatttaatagctcagaatcatggaggatttataactggcaggtttatagtacataatatcatgatttgtcaggatttgataagacattatggaaggaaaaattcaaaacctgggtgtatgattaagttggacctacaaaaagcttatgatactctttacagggactacttggaagaaatcattcaagcttttcaatttcccaaaatttttatcaagctaataatgatctgtgtgcgcactcctatatactctcttatgttcaatggatcattacatgtgtaaagtccttttttggcaagttagttgacaaaatattttttcttttatggtaagattcttgt

SEQ ID NO: 85271 - DNA, 601 bp, Cannabis sativa
aacaataaccattgcaaactcagtatttgggtcagatcctgctattaatcctgatgtgcttgccaaggcttttcaagttgataaaaatgtgattgagaagctccagaagcagttttggtttggcaatgacaactaaactaaacatactaaagaagaagattgaatctaggaatcaataaatatcattatatttactattttttttttctcgtgcattaataataaatagtatgctattttatgtgtattgcatcaatctatttggagaactgctattaaatttaatttatctatttactttactcaaacattaataaaatcatatattattaattaacagtttcattatcatcatttgactcaatttttgtaattatatatgctgtaacatatttcatttaaattagtttaaaatataagtaacatataattatatttgttattgagagtatatatatatatggtgtttttttagtgtacaacacaaactaatatctattaccataataaaagtgacaatattttggacttgactaagtaaattactaaaaagtactttattctcacataatactttttttttttttgagagagagggagc

SEQ ID NO: 85272 - DNA, 558 bp, Cannabis sativa
ccaagtgcatggcaaaggatacaggcgttttatctatcaattgaagaaagattagatgcgctacctgcctagtaactggacatacagagtccaatcttgtgtcgttgacactctgcccgaaggtcgtccaatctcaactgctgagggaacccctgtcactgagtttgctgtaattattgctcggcatacaactaaatgaaagccacttgctagacataaagcaatggcacggacaaaacaaacaatgaggaaaactccaaagaacaacccttattttcgccactctgttcactatagctagaatggcacaagcctgaccgtagtcgaggaagaaaatgctactgagggggacgttgaggtcctggaagttgaggacaaggggaaggttcgtcctgctactccatccgaggccgaagaagcagagcatgaagagggctcaagaaatactcaaacttcccttggacactcataatatttctcttttggttactgaggctaattttatcaagtataagctctatccgacagacaatggacaaggtgttaactcaaactttt

SEQ ID NO: 85273 - DNA, 645 bp, Cannabis sativa
  modified_base (312)..(319): a, c, t, g, unknown or other
gcctaatccttgtaattgacgttttgaatgaaggaatttgttttcaaaaaaaaaaataaaaaatagataggcttgtaggatacctttcgtttagtttaatgctagtattttttttagtgtagcataatatactactgaaaaaagttattttttagtcctaacataatattttagtgattaaatgtgacttttattcacaacaaaaagttacttgtgactaaaacatagaatttaaatacaagttgtcactaatttagttttagtcaaaacaaagtatatattgtgagtaaaaacatatttagtcacaacaannnnnnnnttttgtgactaatacttttaatcataaactttttactagtcacaacataaaaattataattatttataattagtcacaactttttaatttttaatcacaaattttgctgccacttaaagtaaatttttttataatatactattatatatcaattaataatttaggagttttcaattcgaattcatgccctctttctttttttacccctccctttctagttactactaagctaatcttagtagctttagtttaatgttaattgatactcaagctcttactttagtacttccatttaacattattttttagttgacaatcaaggaaaa

SEQ ID NO: 85274 - DNA, 678 bp, Cannabis sativa
gcttcactggtcttgctaaaattgaagtaacaaaagcgttatactctggtctgagtccatccaagagataagtgagatgttcttgtgaggatattggctctccaactgatgcgagtgtatttcaaagtgtcttgagcttttgcaggtaggccgaagcagtgaggccatctttcttgaggttttgcaaggctgttctgaaatcggagcttcgtgcaaatgaagctgcagagtacgtccgtttcaagagagacccaaatttctgctgcagtggtgaagccgacgatttgaccaagcatggagtcggagagggaagcgtatagccagctcatgagaagccgattatacctgtgccaagtagtgaaggctggatcaacttgatttgaagtgggatctgaaaattgtaatggacaaactacagtgccatcaatgtatccttcaaggccatttgcaatgataatgttatgcatttgcatcctccaaacaaggtagttagagtcatttaattttactgatatggtttggttgaatgaaggaaagtttgggggtaaagaaagagaagtagcagctgtcgaaaaatgcagaggagaagaagaggttggttgggcggcggtgatgttaaggttttgtgtattggtgatactagggttttgaagagggttttgggtattttcatcttcc

SEQ ID NO: 85275 - DNA, 873 bp, Cannabis sativa
tccatcaaagtactccgagggttagaaaatggtgctagcgaggggaggctcaagtgtctcatgggaataagccacatccttctaagagaaaagaattttatagcttaaattgggaaaaacaagcttatgagtacgttttttacctcttcgaaatgaaacaatttggtccaagatataagaagccaaattgatggatgcccctgaggtgatgcaatgaagaatatttgccaagtcttgagacaccacagttttgttggagtttggaagccaattgctaagagcaatctgcatgagagaagcatggccataagtgagatgagtgatgcgaagactttggctaggtttccattcaactcgtgcaccagtgagatcagtaatcatgaggtgacaattcatagtcactatagcatttgtcacacctttgggaaattacaaagccttgataatatcattctcagtaaaggaaaaccaatgtcctcgaacatacactttacgaaagaattcatatttctcatcaagaaaatcatcagacaagttagcgaaaaattctttgataattcaatcaatatatccttcaaaaccagtaagagtattttcccaatgatgatattgaacaaacttcacaataccatagacacgatgagcatgcaaatcataatttctgccactctcaaacttacgggtagcatataagttccaatcacgctggttatcatgataataaaatctggaatttacagcttgcgagggagagatattaccaagaatggagctcttcatgggttgtttacccttggctgctgcagtaactttggctacagaagcagaacgagaaggggctattgcagattttggcaagggtggctcaggctc

SEQ ID NO: 85276 - DNA, 2315 bp, Cannabis sativa
cgctcttccgatctctaaaattagactatgtctagtttatgaattttcactaagctggggcttaattgtgaagaaaagagattctagggtttatttgtgaatgctaaaccgtagcattgatgctatcattatttttttaataaaaaattaaaactaaaaaattattgttgctaaaaaatgaaataataatgtgtaagatcataattatagtatttttaaagagtgttataccattgtagtgattttagaagagtgccaaaaatgatgtagaagagagataaaataaaatattatatttttagattattaggagatttttagtatccttaaagaatgctatcagcatctctaatggtagcatagcatcttctaaagatgctaaaaatttacacatcatctaaaaatataatattatttatctctcttctaaatcatatttgcagtcttcttttaaaaacactccaatgtatagcactctttaaactataattatgatctcacacattattatttaatatatattctaatttctagctacaataactttttagcttcaattttttattaaaaaaaaataaatagcatcaatgtcacaacatagcatccatgtaaatttttagaatgacatccttttctcttcaatagtataacatctcaatattttgccacataatatgtccacctcaccaagcatcctttagaggccatttggtatgcagttttccttactcagaaatgggaatatgaagtccaaccaatgtttggtattgctttttaacttttttagctgaggtgttcattttactatgggctcaagttgactttacacagaggtaatatccacctctccaaaatagttgagttttatttgccaaggaaagctcactcttaacatatcaactctcatcctcttcatttcttttctgactcaaggtatctctctctcaatctctgtctctcctctctctatgtatatatatattaacattcttatatatatatgtatattttattttttataattatttattattattaattttttataaaattatataaaatataataaataaaaatgattttgaacacttaaaacgattttttttttaaattattagtattttacaaaaaataaataatcattattgtaaaaaaaatacttattattgtaaaaaaaataatcattattgtaaaaacacacaaaaacaattagtaaagcatgcaattaatgaagaaatgcaataagaaagacaaatagcaattatcaccaagagagtcacactccctaaccgaccttttctttgaaggcccaggcacagtgcttttgttatggtcgtcaaggccggcctcggaggtcccaagggtcgcaggatttctcgtactccagtagaaggggtaataacaaagttgaacctaaaatcgtctaacacccgggaagaggttaggatgctgatatccttcttgaagttaggcagttgggctaacacaagggccctctcgtacatggcagcagtgggcaaaggcctagaaaactagttcacccaatggaatttggtgtgtttagacccaatgtccttaaccaagaagtagagatttctgaagtcactctcctttgacaccctatctacgccatgaaggaatttaacattcatatgcgcatgctaaaactcgaaatagcctgattactgcttgatgttgttcgatctcagatcaaagtgatagtgtatctcatggcccgtcgaccacttccatctcatcaacttgtataaaataaagatggcagtaagaatgcgtatgaacatgggggagaactgccctggactaatgccaaaatagtcggccacatctttgaaaaaattattgagggggagtgccccccataagtgatatggttacgggaccatgcgcacagtccctctccagggtcgtgtgccaactggtctggggaggagagtatcaactggcagtccttgccgttcacagtcagttcctccacattttggaattcggcctctctaagactactaggagtggccacaaagggagtcttggtggttttgcaacgggtagtgcgaacctccttaagcactctcggggcgaactctttcactttgagagtgacttgcttggaaccctcagcttgttccttctcactggcatctttatggaaggtattcttggcttcctcttccgcccacttctcaaatgctctcactatttcctccatggcttcatcgtctaatccagtctcaagatcgtccgacaccctcctcttcgtaatgacctcctccatatgaggactactggaagagcta

SEQ ID NO: 85277 - DNA, 1062 bp, Cannabis sativa
tttttgattcaagcgtttatatattacatcatgttttacacccagtacctccaatactcacacactcacctatggccacttgagctagccccaattggttaattaaatattaattcataacaataagttttaatctaaccgatagtaaaagaaaaaacagattttgtgtttaaatttattattcaattaatttttttaaactacatcaaaaatatgttatatgtaatatctttcttaaactcattttttttacttctttcttggttcgatagaaccaattaaattatctttaaattatctcatgcaaaattaaatttttttttttttttttgacgtggaatgatttcttttaactagatagtaaaattaaacataaaaatttaaattttcttaagtggtgtttgatttggtggaatggaatggtaattataatggtaatagtaatgtaatggaataggaattgattactttgtttgatttgttgggatgattattggaatagatagtcaattgataaaattattcctactttaataagaaaaaaagggtaagatagttattttaagtaattataatgatcattcatgaggtggagtgtaatcacttttcataagtgatctaatagtgattataatggaatgtcattgctagagtttaaaggtaagccaaacactggaattgtaatcctaattctattacaatgtcgattttaacaaaccaaacatgccaaattaaattgctcatattgcacgaattgtttgaattatgccacgctacataaaaaaaatgcaatttaaaattttttgcggtgcagttttagttttgaatttagtaattatggttcaaattgcaccacattatatattataaagttgttaatagggctggggataaaatccaaaaaattaaaaaattcgtttaaattgacctaccgaacactgttggaactgaaattgacggaattgaaaactgaaaaaactgttaacggttaaaactgacattgaacagtcgattttttttggtaataaatcgactgagcaaacaaaaatcaacctttatata

SEQ ID NO: 85278 - DNA, 1574 bp, Cannabis sativa
tagcacctacaaaataaagagaaaaattaatacttaaaaaatattaaataaaatatggaatttctcttaaaaaataaaataaaatatgaaattttatataaatagtcacatagaattctctgatgtaaatactagaacttatttattctcatcttcattgctgacggtaaatacactacatttgatgtgttattattagaccaaactgaccttacaaaataaaactaatcatataataactttataaaacaaaaaactatctatgttagtcttacaaaactaaaacaagtcatactggccttaatcacaaaattaaaactagtcatactggacttacaaaaccaaaaaaaactagccatactagccttacaaaatcaaaactagccatactagccttacaaaagaaaactagctacattggccgtacaaaagaaaactagccacattggtcgtacaaaagaaaactagccacattggccatacaaaaaaactagccacattgaccttacaaaatcaaaaaacaagtcacttagaaaactagacatattgccttacaaaatcaaaaccataaaaactaaaaaaactaaaatgccatattagtcataattagaataatttttttttaaaaaaaaactatttaaaataaatttatttaatatagaattactatatataagaacatatacaaccaataataaatgaaaataaatactgagatcagtcatacttcaaaaaagcctcaaataataatattagatacagtattaaaatacaaataaaattaatatctcaaatataactattagtgtatataataaaaataattacatgaaaaatattgcactaaaattattaaatgtaaattatttcagcaaaggtgaaataaaaataataaacaaaattcatataaaaattattaaattgggaaataatttttaaacaatataacataaaataaatttaatttgaatagcagatataatagagtaaattaatactaacatatattacccgaaaacatgtgtttataataactcaaaattaaaagtataaattttactttgatgtcactataattaaggaaaaggaaataatgtaaaaatatgatctatatataatttaaaatgtcatttaatgaaaatgattaaaaacttttaacttaattagagagtcatttaaaacaaattaatttataaaaaactatattcaaataataaatacacacgatttgtgaaaaaaaatgtatatatgtagtaaaaactgcacttaattaagattttaaaagatgtaaattataacttaacgtttatatatatgaaaacaactcacacctattaacgcaaaaataaattcatttacaaaatttctaaactatcataaatataaattgacttataaaataaataacaattttaataagaaattaatgataataaatacattactaaaaaatagcctaaatatagaaactgattatattttaataatagaaatagtttaaaataccataactcacgcccataaatacaaatcacgccattaatagctcaatctcgcaagtcatagttgactag

SEQ ID NO: 85279 - DNA, 550 bp, Cannabis sativa
caaatgctttaaaggaatttcttgaaattgttaatgtgtctgctaatgaaccttgctagggaagggaaagaagaatgggtgccatttgattttagtccatactcctcaacatcatcatatgatgctgcttcccctatattccatgagattgtggctgctctcgattcgttgaatattccagtggaacaggtgcatatgttatgattctttaattcctccatgccttcatttactaaggctatggttaaagctttaccaacatgtttctttatctcatttggtatttccctttttgtaggtacatgcagaatctgggaagggccaatttgaggtggttctgggctatggaccttgtaccctttctgctgataacctaatttttgcacgtgaaactatcagggccattgcaaggaaacatggattattggcaacttttttgcccaagtacgttttgtcttgcaatcttacagattgttgatatatgtatagcaacatgtaggactgtaaagcaactcaaagagatatgttcccctgaaaataagttggactt

SEQ ID NO: 85280 - DNA, 688 bp, Cannabis sativa
agggagaggacagtataaatgtaaattctgccgtgtggcagtaaaattgaaaagtattaccccaaatccagtatttttgtaaaatgcccttttttttttcttttaattgttcaaacaaaattgggccttaaaccattaaatggtccaagcccaacaataataggcggacccaacactaatttgattttaatgaaagttaattttgcaatatatatatatttgaaaagaaaagataaaatcaaaattattttattttacttacaagtctagaaaagataataaaatgttaaaatatgtaattattttttaggaatttttttcttttcacactttaaaatatttttttttttttacatttttatggaattccatatagaaacttccatagacactaacagagcaaccaaaattacagccaaaatccacatagcaacccacatagaatcaccggaacaactcaaatattaaatttgaaaaaacaattaaaaaataatatataaagtaatttctctattttttattcatagttaggtatatttgtatttttattttcaattaataaaataaaataagtaaaaaaaatgtaaagtattctttataaaaataagagcaatttgcggcgaaacccccttatgttttgatttttatacacttaacccccttatctttattttttgtggcaaaaccc

SEQ ID NO: 85281 - DNA, 1220 bp, Cannabis sativa
cctttatctaaagccgacttgacatggttagcccagaccggtggttatcccaggtcaatttgtctccttggatgggcagagaaataagcccccgggtattcaccagattggagattataggaataaattggtctctaccctttgaaccctctcgctcagagctactaaggacaaaattagtgtcacccaatataagccacggaccaccataccgatcccctatcttcattagtttctcccagaacgctttttttgcatgaaagtacggaggaccataaacacaggataggagccaagggtacgagggggggtccgagaacactaaaccagatatatgattacgggagcactcaatacattcaaactcaaacccaagtttccacgctaacaaaatacctcccgcattacccacagctggaacagtaatattaaagtaaaaatgaagggattttagcatacgtaccaaagaagaagcatccacttttagttcggtcagaaaaatgacatccggcgagcgcgaccgaatcagggacttcagctcacgaactgtagaggtctgccctaaccctctacagttccaagcaatgcctctcatggctcctgtggaggagtagaattctcctccacaggggtatgagagtgagccgacccaaaagaaccagagtcttcaatcacaaaagtgccctccattggtcttgatgaaatcacattcttgccttttgtcttccactcgtccgggcccgtaaaatcattattagagagggaagcctcttctgagggctcctctttcgactccatagtatcattagcgcaatcctttgaatcccagggaaaatcacggatagcccaaggatgaggacgaaggagcttccaaggacgagaacaaagcgaagcggtagtctcatcaaactttctctttttgaagggagtagttctttcattaacctccgaggtagtaggaaccccaatgtcgcctccaatagatttaatctcatataagtccaaattcccaaatttcttaagttcttgaagagtagtgccttgggcttgaaaaaaattagtcaaagctaattgttcatcatgatggaagttaacttcttggccacaaatagaactttcaattgaattggacaaggccggcccaatattctcattaccttcaattaatgcatgtgaaagctctaaatgcccagttaatccagtcggcccaccacctttta

SEQ ID NO: 85282 - DNA, 827 bp, Cannabis sativa
tgcttctggtcaaaggaggctgcaaaagagaattgctaaattgcctaatatgcttatcgctaactaattgtgagacgctattataaaagatattggacaccactattgcctaattatattgctctaaaataaataatatttttacttttaaaacaaatttattttattatagaattattacatgaaaaataaaaattggacactttatttacaaaattacttgcataaggtgtggataatatttatactttatatgtgcttataattatcaaaatatctcttacactattacttacacaatcagacgatagttgctgggtggttgatcgaaggttgcatcagacgaaggttattgggtggttggccaaaggttgcatcagacgaaaattttaatcagacgaaagttgctgggtggttggcctaggttgcatcagacgaaataactgttagcaaaatatttatgcaactgatatgaaacattaaaaatcagaacattgtttctacatacgtaactctatctacatgtcttttcatgatttaatatgaacaaattcactattagaaatttaaaaaacaataaaagtacactagaataaacattttactatagtattaatgtaatttttttagattcatatttgagttgaattgtggagatgacaaaagtgtcatactcactaggcaagcctttgaaaatggcagccacatgatctaaaacactaagggccagtttggcacagctgtgctgtggggaaaagcagctgtagctgtgctgtgggaaaaagcagctgtagcagaactgtggaaaaaagctgagctgagtgttt

SEQ ID NO: 85283 - DNA, 745 bp, Cannabis sativa
tgatagcttctattaacatcatctaatcaaaaatatattctacataaacatcatctattagatattaattaatattgggaataattctttacatgtaggggtcaagcaggatcagaaaaaagtaaaaaagaactttgaactacataaattggatgggaaatgacctccaaccaaattgacctaaagcatttgcaatttcattcaacatgaggaaccttagggaattgggaattggacaaggtgaataacatatcagctattaaatatgtgatgttaaccagcaactattactgtaggcttgttacttgcattacaaactaaagtggatatatgatattgcgctacgtaccatgaaataaggctttggcttccatctcatgtggtgatcatagcatccatataaagatttttatctatatagcagcatcagtgttcaactttaagtgatcaaaggtggaacctaagaaaaaggagaagcagaatgaccatttatctggaggaattttcttcttctgcaccctgtgaaattggtccaaatataagctaggcagcaaaagcaaacgtacaatacaaagaatactgttatgtatagctcagccactgagttttttataaggctgaggtggacttggaacttgaagttagttaagttagtttgcttgtctaagtgcaactctaaatgtagctgtcagaaaaataggactcattctcagaaaaaaaattgacttttcaaatataaacattt

SEQ ID NO: 85284 - DNA, 624 bp, Cannabis sativa
ctctccgattactttcgccgcctctttaaccaccctctccgtcatgaacgctgaagttaagccatgaatttgcacccacatatccaatctattcaaaggaacagatttcggatctcctccttgcggcactcttccaaacaaaaataatagacgattgaacgtccacgggctgccattgatgacacgtttaatatcgatttcatgatagaactgaaaaagatagagatttggtcccaattccttcacaaacaatccttttccaggcttccacaaccccgccagagtatgtcgcatagcatcaaaatccaccgatcgagcgttcaagaatctgcctactagacagaaccgatcgtcaaagatcaccccgtcctccgaatcaagagcatcaatctccactccctcctcttccccttcaatatcaatgcatgcatatctctcttctacttcctctagagatctgctactagaagccattacatagaccaagcaaaataggaacccagaaaaaaactacgttgtatggtgaatagaaacccagaaaaaatgaacccagaaaaagaatagacccagaaaagacaaaaaagactttagagagaaagactaacacatgccagctggcaagac

SEQ ID NO: 85285 - DNA, 2719 bp, Cannabis sativa
tataaccatatggcgtcggttatttaagaataacaaatggcataacctacaagtgtcaaaaataaatgacacatatgtcgtcagttaatttcaaataaccgacgccatatgggattttttacagtttattatttttaattaaaaaccgcctctaaatggttttaacaaatgttatagccatagtttttataaaataattgtctataaatgtcaattttcaacaagcagatattttaaaattgtaaaaaaaaatagcctctaaaagattgttttatagtagtaagaacacaaatttcttggagcacattctctaaccaaatttcaactagtattggagatagttatatcatctcaggaaggtgtttcatcatcttaatattgttgcacctggagcccttggatttaaggctgctaagctttataacaatctgctgaagtaaaatttggttcttttaacaaagtggtttggtgcaagcttaacttgtctgagcatcgatttatgctttgggaggtgatgaattctctccttctaaccaatgtcaatcttaggctatttaatgtgcttcttgattctttgctttatctagtgtgtggtctgatctttagtttgatgggatttcaggcttggcctttaaatttttattgttggattggctagtgcagtgataaaagaaaagagatgataagtctggttactaatgctgtaatggaagctactgtttacatcatcttgatcaacaagaacaattgcatttttaaaggtttctgtgttacactataaaataatgtaagggcttattagtaatttataaagggtgtgaaagactataaatatgacattatgaggctattgttggatatagatgagaaaatagagcattggttcaattggagtttggcactgattcgaagagtgtattttaggagatttatcttgtctcgaagaggactattatctatcattggtggtttcattgagagaaattacactgagagattcgttgtattaactctcatccatggaagatgaagagattgttcaactctttaaagttatggagttgcgtacggagcaaggttttgatgctgagataaaggatatgaaactatatctcggagagcttctcgatgattaattggagaactagatgccaagtttcaaagctatctcacattgatggagacatcttcggttcagacatctcaggtgtcacctacttagccgaaggttgaggactacatggatggccctgttgaactagtgataaacaatcagccattgaaaaagcctcatgatctcgttaaaagcaacatttctaatgcatttgatccaggtagatcccaatcgattctagtctgatcaacgaagatgacggtaggaagcataacactaaagtcggggaagatttccatggcttcttcaggtagtgcggatcctagatctacaacaacgaaaggttcttaaacaacaccatagttggagcagataaagatggcatcggatcttcatggcgctttgggtgttctagtggacgtttctggggctgacgatgcgacacctcaagaataattctaaaggcaagcactattaatatttactatatgggtctttgatctagggcgacaagtaaagctcaacgacactggataggacagggtgactattggcacgtgaaggaaggtgatcattggcggaccaagggtagcatgatctcgccaaattacagaaacaaattggagaagtgagttgtcgaaaatcttactctgcatttattcacttgcaaaacaatatatatgtttactgctgcatgaagaatatgcatacaatacatatattttggttgttcacacattgaaaaggaagaagatggcctcagggagaagaaggagcacgcgacgagtatgacagctgcttcaagttaaaaaaaaaatagtgcatagctaaaaagatacaattttgtctgaaccctcaaatcatattaggcctggcttaccatattcataagattgatgggttttaacaagtgggttgaagtttgcttttatttttatttttctttcattttgaatgttatttttagtttctttgtaatttttaccaccttgaggacaatgagattttgaagggtggaaatgtgttacacttggaattagagtaggggcttattagtaatttataaaggtcgggaaggactataaatatgtaattgtgaggctattgttggatatggaatgagaaataatacttgggtttaattggagtttgacattgactcaaagagcgcattttaggagatttgtgttggcttaattggagcagcaataatagataatagtcctcttcaaaacaggacaaatttcctaaaatacatttttcgatttagtgccaaacactaattgaactaaagttgtattttctattctatatctaacaatagcttcgacaattacatatttatagtccttcacactctttacaaattattaataagcccctaaaatatttcatagtatgatattctctcacaatgaaatgcacttagttaaagatatcaagagtattatttagtatagaatttatattgttagtcataaaacctttaatgcacaggaacaacaatttatacatagagtgatgaatttgtaatgggtatttcttctgggatttgctactgttagcttctcttgttggttttgtttgtaatttgcttgttgatta

SEQ ID NO: 85286 - DNA, 788 bp, Cannabis sativa
aatcaaaattaacaataatcacaccgtttaatttcattttttgaatctaaatttaggcatattcttgccagcaatcaaaaggatccttcattaaaaaaaagctagggttcctattgggaatctaaaattgagctgggagcatgaagaaatgatgaatgttgagagctaaacacactattggaaaaaggaaagtggtggatcagatagaactcacctcagaaacaatgttgggtctcattttgagtgagtgtgtttgagcgagactgagacttggttttgaaatttgtttgccttatgaagttggcaccactaccaaccgctatattctcgaattctcctccgccatctcgcccaagtttccaacttccaacgatactgatcccattcggatctttctaaattgggttgacccgaagactttatgcccgatagagatatgagctcaaaaacttttgggccccgtaaactaaaagagaacttacaaaaatactatgtggaaagtttacaaaatattaggatatggagttttttttgaccaatttcttatttttctaaaaaaaaaaaaaaacatttactaacttagttaccaaatttatgattattttacatctcagtccttaagaaaaaatatatttgtatagacctcataatttattatgagattatttattatgttctggttggttattttgttatttctttttattctaaattaaataataaagttgttattaaccaagttttattaaaacatctttaactaatagttattaatatgtgtaatttgt

SEQ ID NO: 85287 - DNA, 1417 bp, Cannabis sativa
  modified_base (1327)..(1328): a, c, t, g, unknown or other
aaaaagaaagataagatataataataataataaataaaataattacttgtacgtgatatttaaaataatatttcaattgttttttaccatgtttaaattttttattaaaaaatattaattaattttcaacaaaatcctactttatcttttttgaaataataactttaatatcaagtattatataattattattaaagagcattgctattaagcatcagtggtgcccaacacctttcatagatggcactctacgattggttagcgatattccttaaattttattttttttaagttatatgggacctgctacttgattaccgatagtggtatgataccaaggagggttgtcttttagcaattctcaaaactaaagtatcacattttttttaatatcttttttttaattatattaaaaaataataatcacttttttaaaacatatcaattaataataacagaacaaataaattttttccaatgtcttaaacatgttaaaaaactatttaaattttgaggtgaaatttaagattaaaatagagatttggaaaatataatagtaacgactacaagtgaactacaataatgacaagagatgagatacaataatgacaacgagtgatatacggtgatgaaaataagtgagatacaataagacaacaagtgagatacaataataacaataattttgaatgatcgagatatgaaaataagtcattatatatggagaacactgtaattttttttttctataccactctatttatttatttttataaaataattttcttaacaaaataatttaaaatactacatataataaattttaaacttcttaaaaaataatttcaaataataattaataaaattgtgtatttaatttttaataaataaaattattaataataatataaaataatataaaaaatttataatttataattaataaaattgtatttattttgtcttattcaactaaccatgatagtttaagttaaaataaaataagtccaccttaacctttaaaatttatcataaattacgtttgagctttaacgtttctaattctaaaatcatagtgaaagacatatattacttgtaagacttcatataaaaattcaaatgtatcctgattttaaacaaataattaataaagatttttaatacaaagctcaatacaatttaactataatcttgcttttcaaatatagtaacagaattcaatatgaaaagaaaaaaagtttgagtatagatgggtaaatagcggcataagtacccaaagttttaagtttataagcgacatacactcaatgtttatttttagcggcannagtacccaatgtttgtaaaactgtgattcttcttcaattttgtcagtacagactccgttttaaatttattaaaagaatatttggaagta

SEQ ID NO: 85288 - DNA, 519 bp, Cannabis sativa
  modified_base (329)..(343): a, c, t, g, unknown or other
aggtagtgggccccaagaaacactagaattcttgttttctctccttcctcataagagaaatagtgtattcttggaagatcataaccttctgtgcaatctccaataatgactttagagaaatagtgtattcttagaatatcataaccttctatgcaatctccaacaatggcttcaggttagtgcttctactcatcttattatcaatatcttcttcttagattagcaaaggtcccgtgtaaggtgatgcgatattttccactgaccccttgtttaaaaagaatgtacagctcaaggcatacaatgaaagagatgatatggcatcatactgnnnnnnnnnnnnnnnttggggttatgcgtcaccctgtggatgggtctgcatggaaggagtttgacgctagatatcccaattttgcaagagaccctagaaatgtacgttcgggattagctgccgatggatttaattcttttggaaatttgagtcaattctacaacatgtggctgttggatattattttacca

SEQ ID NO: 85289 - DNA, 500 bp, Cannabis sativa
tgtgagttgagctcatctctagctacatatctacggtctttagtgaaaactggctctgataccaaaattgtaaaattcgctcttcaaaactacttgttttagactttaaccatacaaaaccatatataaacatacatatatatataattttacaagtcgggatcccgagttaaaaccacttttgcaaaacaccacatatatatatatatattttataggtcacagagtgacagcaaaagttaacccaaaatacaataagatcgaaaccctccaagttgtactgccttgatatgtacaatctgttttattattattaaataatataatatatagatcaaatatgtgtaataaactaataatatgtaacgtatgacaatttatattatttttcattatttcgtaacatataggagagttacttgttactatgagtaacctccaccgttattaccaacattaagagtgtaaaaggtgttacacatcttaatttgaaattctta

SEQ ID NO: 85290 - DNA, 835 bp, Cannabis sativa
ttattcttgggttttttataaaagtgtcttatatgttttattttgaaatgtattggtttaagaataaaatattagaatttttaaagtataatttttctaatttcccaattaaaatgcctaatatttgagtacacatctgcagcttataaaatattaataatgccattgacatataaacttatacaaaaatcatatacagatgtaagaagcatgaatctgtatcattttatctaccgacagcaagaatatttgatcactgaatattaatttgtttcactaattataaaacaataaactaagtcaaacactatgctgattatggccatttaactgcttcgatttttttcaaatttaatttcttacgaattataagtatttcttttttatatatatatacttgctattctttatttattttacagattgctttacttgttgcaattagtcaacatatcaaaatatatagggtattaatcctaaaaggcaaatataagtctggaaatttcaactaataccatcttgaataatatagtacaaatatatatgtcatatgggttaccaaaataagaaaatggaaatatatatgtcagtatttgaatcgattttttaataaagtaaatgcataaataacaattatatatatttataatataaatgtacaattattgacttagttgatacgtactacaaattgatgcggattgagttcttttcttttttccttctcaaattggttttgttattatatgtaattacgtatgatgtaactaatgagctggcccagtaataaatataatgtttcatttttaaattttgcggactacttagtctactg

SEQ ID NO: 85291 - DNA, 553 bp, Cannabis sativa
aagccttaatcttcacacaaagaactcttaaaataacaaagaataatctaagaaaatgaaagtaagagataggttttccaagagcttgaggacgtatttaccacacaataataatacacaagtacaaaaccatttatggaaacatttagagggagtcaagaatagattaaaaacagaattcttaacagcctctagccaatgacagcaccattataatttcataaacactttcatgttttccacgtcttctttggatgctggtttgctttgtggtttcaaaatcttccataatccaactggttgttggcttttgacttcaacatcttctgaatacctcccgaaaaacttcagacactccggataaggcttcacataaaggttgtagaacttcagtctactaggcttgatcagtgctcgtaaaccaattggagaaccaagcccgtcttttgatcttaaatactcaattacattgaaccgaggaactatctgcttatcgaaattcacaccaacatactctggaacttcaagcaagcaacgaatgttgaatttcatc

SEQ ID NO: 85292 - DNA, 648 bp, Cannabis sativa
ttgaaaaaaaaaaaaaaaaaggttaaaaaacagtatatggggtaattctcctcatttttattattctgtattattaatttattttttaaatttgtgtttccttcctatttttgctacttaaatggattttattttgttttcttattttttattacttttttcattttgattttcatgtaattaattacgtgacatttatgattttatttttgatcaataatttacgtgtttttaagtgtgtttaaatgttctcaatgttttgtgatttttatatctattgcttttaaatatttattgttattaatagggtttaactctttctaacctaattatattgcttttttagtgtaagttatttgaatttcctttcatactttatttatatgttattataatattattattattattattaatatttacttctatttgcattcttacatttttttgatagcttatttttattaatatgtattaatttagcaggttttatttgatatagtcaaatattttgattatttacgttctatatttatattatatttggctagtttgtgtcatatttttagctagttggagccattttgtttcggatattttgtactatatttttttactagtatgttgttgactcgtttgcgcatggag

SEQ ID NO: 85293 - DNA, 512 bp, Cannabis sativa
cacttcacccgctaatggatagaacagaaccaacacttgagccatgctcttcttcaaactaccaataaaatcgcacggcactactagaactcggtggggagcccttcatgcatggtgggatttttgtagcataagatactcacgtagttggtttctggtatcatgagaagatcaaaaagttgaacattgcactacaacaaatttaatttttaggggcgacaattttgaggcgacaaaatatcacctctaatagtaagactattagaggcgacaaatcatgatcgcccctaaagaaagaggtttttttttatatatattttttttaaaatctggagacctttagaggcgacatatgtcgcccctaaaacattttgtagggaaaagtaacgttcttggtttagtggcgaagagcatatagtggtaccaccacctctttgttcattattgacacaattaatgaattcgaatggtttagctttttcatcttctaaagccatttttctctttgttgt

SEQ ID NO: 85294 - DNA, 514 bp, Cannabis sativa
gatgactcaattcaattggattggatcgaatgggtccaaatccattagatgtgatccaataaacagccttacaaattactatttggattcaattttatgaacttcagctaaaaaataaatgtataccacacttatcactctattgaagatactgttacttccatcgaaaacgaatctttgcacttttttttgacgtcaaattacatagaaattaagttggttgatatgaaattaaattaattatgaacagtttgaggaatcacaatgagctcatgttgtggattgcttttattttgtgacccttgcgataatgtaggggcaacatgtaagaaaggaccccattaaaattcacaaaaaagacaaaatactaataatttagtaaaagtagagccaccaatataatagaaaggtgacttttgcctaataataaataaataagtaattttaaaccaattgaggctagttcaagtggccatagatggatgtgtgagtgttggaggtcctagattcgagt

SEQ ID NO: 85295 - DNA, 711 bp, Cannabis sativa
actcttatacaccatgagatgattgttattaggtaaaatcaattttgttggatttataggatgaatattttgaaaaagattcaaattagaacaaatgtgcctagtggcacccgaatctataatccaagaattggttttaggtaaaagattgtaattggtcaagacaataccttgactacctgttgaagtgctaggatcacaaggcggctggttactggtttgagcagcgagaaggttgagtaactgctggtattggcttggtgtcaattggggcagcattgtgctgttgtcactagggctggaaccggtttcatttgttgaatgaaattggtttgctgctgcatctttggacttccctgacttgttgtaacacgacggatagccatgtatcttatagcatttttcaatcgtgtgcccgtgcatattgcagtgagtgcaaaaaggcctcccacattttggttgctgagtcttggattgatcaggttttcccgtggatctctctccttggaaagcaaaggccatgttggcattcggttcaacagtggtattctttcctcccctttgattttcttcctatgaaactaggtgaaaaactctatttatttcattcaaaggatccatgacaagtatattacatctcacttgagcataaaggtcagacaatcccatgagaaaggacatgatgtactccatgttgtgatgttcttgcaa

SEQ ID NO: 85296 - DNA, 830 bp, Cannabis sativa
gttcaagtctaggtcccgccccgggttcgagtcttgaatctcggttttgggtttgagtcttgaattaagtttttatatatattgaatcctaatcagatcagattcgatccgaaaaaattagacgtgtggaacagatttgatccgagatccaataagtatctggatatttcggatcaaaaatgatccgtcagatcagactctaacccgatccaactaaatagatctttttgacatgcctagattagagcctaaaaaatgaaatctaaaatagatattaatagataacacatctttttaatggtaatttcattattaaaaggtaaatcatcaggatcagatcaccactaacaccacagacccaggggcacctccacgagccatcagaaatcgaccataaacgggctcaaaggagaccgaaactctcaacctaaatctccaccttgaatctcgacggatatctaaccttcacctacccttgtcactaccaaaccaatcttacgaaaatgacaacaaaccccacaccagccacaagccaaaccaatttccaggcaaaagaaaacacacccacgtcgacagatcccttcagctcacatcaacaccctccccatggaaccacccccacactaggaccggtcgatcctgatccccccaattacgaaattgaaccccccaaaaccaaagatgaatgacctcgatcctctcccaaaaccaatcttcaaacggtgacccccgaaccatggacacgactagacccacattaggtttggcaagccatggagaaaaagcagacctatagcagcaacactcacaaaccttatatagaaaaccta

SEQ ID NO: 85297 - DNA, 524 bp, Cannabis sativa
gaatacataatttgctttctaatgaaaaatatgatttgtacctaaaggaaatgaccttatacacctctgttttatggatataacagcttttaattcaagtctttattaacatagccaaaacagtgaccaagagacaaaatccttctctgactgtcccctttggccagggatttttctacacacaactcattatacaaaagacattgaccccaaaaacaaacaaaagctcataaataaagttcatataattcagaaatgacacatgttttggcttggctgtaactactacattgcatattcagtatgtagttttagtagtagtagtagtagtggtagtgtaccacataagcacaaataaagctgaattagttcacagaaacccactttggagttacaatacaaagcttaaattaaaaagagtttggtgataacttgaatatgagttccaactatacaaaatgactcaagtctccaagttcatttctaacatcactctcaatgagaatagaacctagatacacaaa

SEQ ID NO: 85298 - DNA, 2589 bp, Cannabis sativa
ccacagccccaccacacaccaccacgccaccacgataatctatgtctctcagcttatttttttttatttttaataaaattattttctgttaaataatataaattaaatatatttttatatataactttttattaaaaaattatatatattatataaaataattaatattcaaaaaaatataataattttttaataatataaaatttttattttaattaattgttatttttattagttttgaataaaaaattaattttttttaaagagttgaccgagtcaacccgccaacccagtcaacccggccaaccgaaacccgccaacttgccaacccatgccatattcaggtccgggttcggtttcatttttttgaacccgaaacccatgaaccaaaaacccgcgaacccgaaacccggtaaatccgcccgatgttcagccctatatgtaggtgcccatgtgtgcatagggtggtggcatccaccaagtccacaggcaatgaaaactatggcttgcatgtccacatagaatttgtatggatgaaaaccaaaagttaaactcaagaaaacaaaaaaaaaataaaacaaaataaagccaaactttgtcaagaaaatcttctacatggtctgtaggcgcccatgtgtgcgtagggtcgtggcatccaccgagtctatcggcaatggaaaattgggacttgcatggccacatatgatttgtttggatgaaaaaacaaagttaaactcaagaaaacaagaaaacaaaacaaaaaaaaaaagccaaacttggtcaaaaaaaatctttttgcatggtctgtaggcacccatgtgtgtgtagggtcgtggcatccaccgaatccacaggcaacgaaaaattgggacttgcatggccatataagaattgtttggatgaaaaacaaaagttaaactccagaaaataaaaaacaacacaaagcaaagccaaacttggtcaaaaaagatattttgcatggactgctggcgcccatgtgttcatagagtcgtggtatccaccgagtccacaagcaacgaaaaatcgtggcttgcatggccacatagaatttgtttggatgaaaaccaaaaggtaaactcaataaaataagaaaacaaaaccaaacttggtccaaaaaaatcttttgcatggtctgtaagcggctaagcgcccacgtgtgcatgttctgcacgcgcccatgtgtgcatagggttgtggcattgacctagtccacaagcaatggaaaaatgtggcttgcatgaccacatagtatttatttggatgaaaactaaaagttaaactcaagaaaaaaagaaaaaaaaaacaaaataaagccaaacttggccaaaagaaatcttcttcatggtctgcaggcgcccatgtccatgtgtgcatagggtcgtggcatccaccgagtcacaaggaccagaaaaccgtagctagcatggccacataggatttgttggattaaaactaaaagataaacacgagaaaataagaaaacaaagccaaacttggccaaaaaaaatcttcttcatgttccgcacgcgcccatgtgtgcataaggtcgtggcattgaccgagtccacaagcaacgaaaaactatggcttgcatggccacatatgatttgtatggatgaaaaccaaaagtttaactcaagaaaacaagaaaacaaattaaacaaagccaaaatttgtaaaaaaaatcttttgcatgttccgcacgcgcccatgtgtgcataaggtcgtggctttgatcgagtccacaagtaacgaaaaactgtggcttgcatggccacataggatttgtttgaatgaaaaccaaaagttaaacacgagaaaataagaaaacaaagccaaagttggccaaaaaaaatcttcttcacggtccataagagcccatgtgtgcataggatcgtggcatcaaccgagtccacaggcaatagaaaatcgtggcttgcatggccacatgggatttgtttggatgaaaatctaaagttaaactcaagaaaacaaacaaaataaagccaaacatggtcaaaaaagatcttctgcatggaccgctggtgcccatgtgtacatagggtcgtgacatctactgagtccacatgcaacggaaaaccgtggcttccatggccatataggatttgtatggatgaaaaccaaaagttaaactcaagaaaacaagaaaataatacacaacaaagccaaactttgtcaaaaaaatctttttcatggtctgcaggcgcccatgtgtgcatagggtcgtggcatcaactgagtccacaagcaacggaaaaccgtggcttgcatgagcacataagatttgtatggatgaaaaccaaaagtttaactcaagaaaacaagaaaacaaaacaaaaaaaagccaaactttgtcaaaaaaaaatgttatgcatgttcagcacgcgcccatgtgtgcatagggttgtggcattgactgagtccacaagcaatggaaaactgtggcttgcatgaccatatagcatttatttggatgaaaaataaaagttaaactcaagaaaaaaagaaaaaaaaaaacaaaacaaagccaaacttggccaaaaaaaa

SEQ ID NO: 85299 - DNA, 630 bp, Cannabis sativa
ttttctctctaacaaaatacaaataagctcgatatgcttggttttggcatgaagaactgggttaacagttaaaagcacagtgattaggttgtcacaccacaaaacttgtggccttggaagagtagcatgtagttcagataagagagagtgaagccatgttagttcagcaaccacattggcgagggatctaaattcagcttcagtactagaccttcagacaatatgttttttttttggaagaccaagctacaaggtttgtacgaaagtaaatagcatagccagaagtagaccttttgtcatcaacatttgctgcccagtcagcatcacagaaggcaaccatttcattgtgtggagatttggtgagatctaggccatagttcatggtaccactgagatatctcagaattctcttgacattaacccagtgaacttgcaagggattatgcataaattggcaaattttgctgacactaaaagagatttcaagtctggttattgtgaggtattggagaactccaacaactgatatgtacagttgagcatttccactggatcacttccataggctgagagtttgagaccactgttaggctatttttagcctatgttttggatctaatttatgtgcgt

SEQ ID NO: 85300 - DNA, 1236 bp, Cannabis sativa
  modified_base (912)..(912): a, c, t, g, unknown or other
actgcaagtccgcctgatgcaactcctctaaggacttcaacttggtagccatctcgtccatagcctccttggcctcccgaagctcgaatctggccctggctgcggcctcgccctccaccttcaatgcctcctgatgcctcgcctccgcctcagcctcactttgcttggcctcctctcggaacttcacctctgtaagggcctccctttgttgagcctcctcttggaatgcccgcctttcggtagacaaatcccgcaggatcttcacggcctcgtctatgcccccgaattcggacatgacgaaggcatggtcgatcaaggtcttggaaaggtgactggtctcggcagtaatctaataaaagaaacaggaatgaggttagatgccttagacaaaatatcaaaggaaggaataaattacaagtactcaccgcggccatggcagagctaatgtcttggacctggtaaactaagttcaaagaggcacaagccgcatatcttttggctaggaactgagtcaggtgggagacaaactggctggtcatctctgaggcgaaaggagctaaggtgggcccaacaaagcggttgaaccaatccgtcagagggtccatgttcaggtcccacagatttcagaaggcgtcctcgtgaagagtgttctgctgctcctcctgcagaatcttctttaaggcctccacctcagcgtgcccccgactgtactcgtccagagcgtagttgtgcttggcgactcagagattttgcctctcctcatccgcgggaaccagggtcagcatgatgccgtgcggcaccgtgtactcctccgcctcggaaagaatcccagagtcgttgctcaccgccggagtgtcccccctccgggtccgcttggaaggttcaacctcaaccatcttgccctttcgcttncgctcaagggcggccgcatcctccaccttgccttccttgacttccccctcctcgtatatcaagacgattgtgtctaaaggggcactggaggaggacctcccgggggtcaccgattgagagggagtcggaggcaaagaggcattaggactgtaggcctcagcaagagtagccaggagatcttccataggcctgactgttgcatcaaagaaataagctaagtgttaggatattcatgagaaaggcatgggcccaacaaaaaagcaataaaactagtcctaccctgactctctaattcagccttagcaaagtctcgaatcataatgc

SEQ ID NO: 85301 - DNA, 723 bp, Cannabis sativa
aaagatccttctttctcaatcacacctttcacttctattgcacttggaaaatatgatggcacgttgtaattatccaggcattttgcttcaattatactctgaaataatagaggtcatgatatgtatgcatattcatttaattaaatttaataattttacaaattacaattaatatatataatgtttagttaatatgtgtagatatattcagtgtttggtagattggcactaaaacaataaattaatgaaagtcactacaagaaatgtatgtatattcattttatatgttactacaagaaatgtcactttcagcacttcgttttgtgtttgcaaaagtttcaatatcaacatggatttgccaatcctttttgtctgtgcaaaaatatgctggcaaaagtaaaatttattttgccagcacaatactcaacttttgccaacataaaaatattgttgtagcaaaaatcttatttcttataatgtgtgtttatgtgtgtaaaaacatagtttttttttttcaaaatagttgtgttatggataacattataaaaaaaaaaaaatatgtgaaaaatagtataaagtaaaccgattttcatagaatgtaacaggttatactattaacaatttttcctatatatattttaattttttttaataagatattaatttaaattactaaataaataaatctaagaatacatgtattacctctttgaccatgtcatt

SEQ ID NO: 85302 - DNA, 1067 bp, Cannabis sativa
tatttttctgttactttgtaattatatatatttttttatagttgtttgttaagttgttctaaggttgttttttagttatttttgaattattttttttttattttacagaaacataatatttttttaattttgaaattttaaacacaatatttttgtaaagtttgtactgtaaaaatataaaaaacgctgtgtcacaatatttttgtaaatttttttccattttatagtatttttgtaaattctcctatacaatattcaactaattataaaagacttaaataaagaataaattcacttcagcgtcgtactaaagtgatttcacttaaaataaataaataaataaaagcagacaaaataagcgggctaaatttaaaagagtgtgtatatatagaacacttctcaatggttattacctattgatggttactaaataaatttaaatataaatattaattttaaaaatataaaactattagattttgatccaatcgctaataataagagagaaatttaaaattttaggcttaatttagctactaaattaaaaaatatattaaaagaatatctctttttacaatatatcaaaaatatgtttatgtacaaaatactcaagtcaaactcaatctttttcttatctttttttgttgatttttttttttcttaattttttttctatcgatggaacaacctcaatccatataatgcaaaaatatgatattttaattagatagaaattaatcataaaaacttaattttcttaatactacccattcatgggtaatacccattaggtacaaccagtattcaaccacaatgctctagcaaaatggtgagcaatacgattagcagatcacttaacaaaaattaaaaagacaatattcaaactagaaagaactcgtctgcactaagagatgcaaaacccaaaaacagaaggcatatccattgaactttgggaagcttggatcgtgatcaaactgtccaactccaccaccacatcttcatgacatgtctatttgaacaagcttaaaacctctttaactctgatagcctcgtcaataacagggtca

SEQ ID NO: 85303 - DNA, 725 bp, Cannabis sativa
tgagatatatcctccctagaattatatctccaaaccaagcggcgtttgttcaaggaaggcacattgctgaaaacacaatgattgcaagagaagtggtccactctatgaacaagaggaggggaaagaggggatgcatgctcctgaaactagacttggaaaaggcctatgacaaacttcattgggattttatcatcttcgtactccatcagatcggatttggtagtcctttcactgactgggtcaaggcatgtatttctatagccgatatcaaattgctactgaatggctctatcgttggaaaatttaatccggagagaggtctccgacaaggggatccgttatcaccatctctttacataatggcagctgaagccctttctcgtcttctcattcggaaggaaaatgaaggtggtctcaaaggatttaaactgcccagaaatggaactccgataacccatctaatgttcgctgacgacatcattttgtttggtgaggctaccattcgagaggctagatcattcctacactaccttacggattactgcaatagcttgggtcaaaaaattaacttcctcaagtcctctgtttactcctccaaaggagtgtcgggtagaaaagctcaacaaattgcagagactttgggtgtaaaaaggatgaagagatcgacctcatacttggggctgcctctttttcattctctaaaaaggacagaggacaccaatcat

SEQ ID NO: 85304 - DNA, 830 bp, Cannabis sativa
gtattggacgactcctatgacacttagataatgcatgacaagttcaaaagcttcactatcttgaaggtagagagtattgtgttgaagtattgaagttggacaaggtgtagcattgatcatgttggtatgtggtggtttttatggtactaaatcaggtacgcagtgaaagagtttcgtattatctgattatcattgtaccatagcccaatgaatctttatatatgtgtacattaaataaaaatataaaatataagtttagaataaatacctcttgaagactatcaaggtatcctcaaaacttctcgtatgttgtatcctttaatccacatgatgaggatgatgtaattgaactcacaccagtatctttcaaattgatccaccacacacaaggaatagtgtgggctattaggataaagtgtataatatgttcttgttgagttctcaacaaatgagcaagaataattttaagagagaaaattattttctttttctctcctgtatttcaaaaatagatgttatttgatttctcaactcatgcttctatttatagtagttaaatctatttaattaaatcatatttaaatatttgaataaataaatatctttaactgaatttgattattgatatttatgagggaatctctcaactatttgagagaatatctctacaactttgaaatatatttaaccacgtttcaaattaaaatatttatctaattgaattaattaaataattgattaaccccaaaagacaaactcatgcgcctacaatgtcttgtttaggacaatgatggtgtcttttttttctaacaacttttgtctcaacaaat

SEQ ID NO: 85305 - DNA, 1267 bp, Cannabis sativa
atctcatcgcacaccagcaccacctttgtccctcctgactctcaccgattcttgatccctctcgctactcttcttcttaatgggtgttaatgacttcggtgttgatagatgtaggtaatttagtttttggatctgtaattttttattttattttttatgtgggtttgtttgtttaatgagatttgagtatgagatatgggggttggtgtttggttgtttgtgtttatgagatatgggtttgtgtttgattttttaagtattttttagatctggtttttgtttgtaaattttcaaatctatatttatggtgattgtgtttacagtagtgatggtaatttcggtggttgacgattttgatggtggtgggtaatggttgtggtggtgattttgatggtgagggatatggccggatagtggacaagaagaggaagaagaagaagaagaagacaataaagaaaaagaataaaagaaaataaaatgataatattgtttgtaattttaaaattatttttttatttactttgtaaaatatttttatattttttaaataattaattacatgtactagtaaaatcgtactacacaggtggatgatccaacatgacacttataacacgtaaaatggatggaaacaacaaagtgttaatagaacataagtttttggggttttactgtcaaaaaagaattttgaaggttaattgcttgcgaagtaaaaattttggaaattttgtcacacagtttactctttatttttatcactcattcacattatttttgactctaaaaataatctaatagtataacacttttaaaaaatattataattataatcatacatattattatttattatatatcttaatttttagcatcaataatttttaaactttaattttttattttaaaaaaataatgactatataaatttttctctcttcaataatatagtatctcaatattttaggatagcaaatatcctcttaatttttaccattacatgtgcttttagatggcagcttttcagatttctcaaacaataattaggatgtcatacttagaagcatggtacgtagttaggtaggaaaatagtaatggttaattagaaagattttattctttctctttaaagagttggtggtacatggttaggtttttttatatatactctcaaatctttcctataaatatatgagactatcacaaagccagtgataaactagctccaacaaaacaaagaacatacagttataatatatatatatatata

SEQ ID NO: 85306 - DNA, 761 bp, Cannabis sativa
tatatttatacgtacaagtgtgtgatgatgtgatgaagagtgatccaccaattaagttggtggaattcattgactctgcaattaattaataaataaataaataaaataattattcaactaaatctaataattaattaattaagatttaagattattctgtaattggttacataattctaaacacaggaattaaagaaaaagccatgacgtccagcaacagagcatctctctctacattaatccatatatataataataataataataataataatagtactattattactatatatataatatattacatgttgatcagatgcatgtatatgtactactatccatatatatatatatttatatgtgtgtgtgaagaataataacaaattacagatcgaattttcactatatcaaactttggtaatatgttttattattaataatatatacaagttttgttaactcgggttactatcttatggttatagttagaatgtctcgtttataagttaattatatatttttgagtctaatctttttgatattgctcacattgttgaggctgagttaggctagttaaataaaatttataattaaaaataataataatatatatacgtttttaaattgggaatattaaagatcgagtacttgaattttttcctcgatcaaggaaagaagaattttttttattgataggattttcgtaattaaataaaaattatatctattctaattaaatatattaataaagaaattac

SEQ ID NO: 85307 - DNA, 647 bp, Cannabis sativa
aacaagatatagattttgcaaattttaaaacaaacagtatgtaacaaaaattaaaaaaatgtgcgattttaaaatagaagaaaaaattattaaaaaaagtcttaataaatgaaatataattagaaatactaaaaggagtatagtaaaatttcctaatcttccattggttcagctgcttgaatggggaattgattatactttagactcatcattcgttttggatctacatacaactgaattctccattttttgaccgataatttctccgtaatttttttggataacggtgacctaacaataatggaaggaaatgtgatattgtatgtaaatgatgcaatattcttattctaataaaccaagctccatggggttgtctagacagtaagtatctaatgtttacaggtaagtaaaaagataaaaaatgctcaggccttggctcactctcttatagttttaaaaattttaaaagaatagaaatatataaacctggaaatcttttaagctcattaaataaagcaagacagagagtagttttatcatgtccacatatctggataggttatacatgcctttggaatattatactgcaatatgtaattcaacaacattccctcgaaatcatttgtaggtaagaggaaaaatttatt

SEQ ID NO: 85308 - DNA, 811 bp, Cannabis sativa
aatagaatcatatcaaagaaagtaaaacatatttttatgtataatttttttttttttaaaaaaaatagtaaatctatgcaaaaaattctactgaatttttttaaaaaataaacatcatacaatttcttacattaaaaaaatacacacacaaaaatatcttctaaacaattattatcacagtatctcttttagtcactattagtattatatttaaagttgattaccatatcttacttgtagttttgaacatataaattaaacaataatcgataaatatttatttttatacataagtgaattatattctattataaattaattaagtgaatcattagttatcatatacgatcgattatatagtttattttttttaattaataatatttaatttttttgacaaaattaatgatatataattaaataaagtagaataaaatttaattattgatctcttagaataaaaaaaataaaaataaaaagagaaagaatttaaagtagaataaaaaacttagaaaaataagaaaattaaagagagaataaatagaagtatttaaaacacactatcatgtcaatatatagatagataaatatttaccataattttttaaaaaataaataaatcttttaaaattatatatgtgaactatattttaataaacaataaaataaagaatataattatttagatagtttaagaaaaataattaatgaattttttaaaaataataattaaatgatgtaacgctgttaattttaacggtaaactttaacagataaacaatataataaaaaattattttttccctccaaa

SEQ ID NO: 85309 - DNA, 1564 bp, Cannabis sativa
atgaaatggcttatgagatacttaaaaggtacatctaagttgggattggtctatcagggtcaccaaacacatcagaacattgaagggttcacagatggagattatgcgggagacagggacactagaagatctacttcggcctactttttcttaatagggggaaattgtattagttggaaagtacaattacaaccagtagtggcgttgtccactactgaatctgaatatatagctattactgaagctattaaagaggccttatggttaaaaggacttatggaggagctgaagttgatggaaaaggctcctataatctactccaatagtcagagcagcatctatttgcgtaaaaacccagtttttcatgataggacaaaacacattgaaataaaatatcactttatcagagataaagtttcaaaaggacagatcgggatagacaaagtgcctactgaagtgaatccagcaaacatgggcacaaaggttgtgtccctcaataagtttaagctttggttaagcttattggggattgacacaggttggtaaaacccttaatgggtttgagctaagaccctcagttacactcaacaacaacaaagattacagtgcacagttcacaagggagtttaggtggaaattgttggtataaaccccgtcattccatgttcactgtaaaaaccagaattttaaaagagattacagacagtaaaaaaatatttcctaggtggccttcggcctctaatatacctaggcagaacacttttttaaccactttgtaactaactctcatgtttttctgcattcctctataatacatataaataccagatcagtacaacaacagagataagatcagatcagtacaacaacagagataagatcagatcagtacactagaaaaatacagcaacaaaatcagaactgaacaacaaaaccaagggctgtttttcagagagaaaatacagacagagactgagttgaaggaggtttacagtgggtatccttggaatcctgggacttgggttcggatattcaactcagtggagggttgttcatgcaagaaaaagaagcacaatagttagtactaaaattagagaaaaacagagagaaagagagagtttcaaacactgtaaaattattagggattaccaaaataatacctgtgtgttttggaatcccaccattgtaatctcttgatcattgaagatccatagtggaacaaggcgagctcgaagaggatgtacccatcacatattttggggaacctctataaaaatctggggttttcttctccttttcttttcttatttttctattgtgtttatgctattttcggtttggtattttctaggtattgaatcggtttagaaagggggtgttgctgggttttgttcttcgggttgggaaatttctgggttgatgatgttcttcatgttcttcaaagaagaacattgaaggaagaaggttgctgggttttcttaggttttctctgagttttcatttgtagctgtttatgtgtgcaacaaataaaagataatatatatatatatgagtgtgatatgtt

SEQ ID NO: 85310 - DNA, 903 bp, Cannabis sativa
  modified_base (195)..(198): a, c, t, g, unknown or other
aaccacgcagcaacccaatgcaacggaaaaaaaattcaacaagaaagagaaccaccattaattccagcgatttcatctgagaagacgaccagaatcaatcaaaacaggggctgtttcgaattcatgaaaaaaaaagtgtagaaaaggtaatacaaaactaaaattcaactagaaatccagtttaatttgcataannnnaatgtcctgacttcaattttcagattcatgaaagacagatcttaaaaagttgaattggagttcctaaataatccaactcaagtataatccaaaaaaattacatcaatactatagtaaaatgttaatcttggtgtattttcgttgttttctaaatttctaatggttaatttgtttatattaaatcataaagagacatgtagatagagttacgtacgtgaaaacactgttttgatttttaatgtttcatagcagttgcaatacaatcgcataaacattttgctaatagttatttggtctgattgaaactttcgtctaatgcaaccttcgaccaaccacccagaaacttttgtcagattgaaaccttcgtctgatgcaaccttcggccaaccacccagcaaccaccatgcaaccattgtttgatgcaatcaccacccaaccacgcaacaactaccctgcaaccatcgtttgattgtgtaagtgatagtgtaagaggtattttggtaattaaaatcacataaaaagtataaatgttgtcctcaccttatgaatgtatttttgtaaatatagtgtcaattaaaaaattagtgtgtgaaaaaaataagaaaagagagagaattggagaagaaaaaaattaaaaaggtaaaaagagatagacgcatgactttcttgcctaatttaacggaaaagagagaaagaattcttgct

SEQ ID NO: 85311 - DNA, 925 bp, Cannabis sativa
tacaattagcgaggataaggattatctataaaattttagaaaatttatgataatataggatgcgagaattcttgtatatatatttatatgcaagtgtaattagtggtagactcaaaatttaaagtgaataagggtaattttttaagacaaatagacaaaaataaactttttttaaaaaatatattcttagaattttgagtccaccctcttaagtggcgtttgtttggaggtaatgaaatagaaagaaaattacttatcaaaaaaaaaaaaaagaaatggaaagaaaataattttcattctatttctttctttgattgcattttaaagtattagaatgacattcgaatggaatgttctttcaccattttggtggaatcactattcattccattttaaaaaagaaaaaaagaccattccaatataataaaagaaaaaatttaataatttttttatcaagtattttaaattttattccattttaatcttattcctattctattcttatattttcatttcttccaaccaaacactatctaagtgtaatacacgatttgaatgcagtcactaagaaaattttcattcttattttgtatttatcattctaaattcttaaaaattttcaaaaacagtatacactattacgaagaaaaaagtataattattaattattatttatttatgtaacaaaaatatataaaaaattataaagtattcataaatatgattttataaaattaaatcaattttaattattcataagaaatacaaatttaattttaataaaaaaatgaaataataaaaaattaatattaaaataagttattgtgtcagatacactagttacaatttattaattaaagagtattattatagggtaccaaaatgataacttttataatttgttaacggttcctaataaaaaaaa

SEQ ID NO: 85312 - DNA, 799 bp, Cannabis sativa
ttattattattattattatagaatcttaacaactcacaacacattaaaatttataatttacggaacactaagttcaactttttttctacagttctgctacagttattttttcctacaacacaattataattatttaatttttcccatagcacagctgtaacaaaatgccctaaatcatttggattctttttctaaaaaggaaaagggagttgtttcaaaaaaaaaaaaatgggagcttttactgcatattttaatcgataattctttttttttaaaaaaaaaatggtgccgatttgtatgaaggaacaaaaatatggaatttaaattgtcaacagaatcacaatatgtcactttttcacgattataatatcatatgtaatggcattgaatactatagaaacacaaatgatagcatttaattaatgaaatatggtaaattttgtcaatttgggtgtgtatatatatatatatagatttaggcattatgaaaatttctatatttacgttaaaattgaaacaattagctgtctcaattgactgctttctaacatactagaatggtgggtggccggtaaacatataatggccaactttcatgcaaatttaaaacgacaaaggtcctttttatatacacattaattcatcttcataattacattcatatataaaaatgtatatataaaaatcaaagttagagcaagtttggctagtttttaacaagtagttaataatctattctctcacaattgaaaagtgccttcaccaaatttaaattttgtctatacttttgtccaaatac

SEQ ID NO: 85313 - DNA, 1421 bp, Cannabis sativa
cctactctacttttagttgtattataccgagggaatgactatccagatcgctataggtgggatctgctatagtatccttaagattacaatgtatgaatcaatgcccgacaaaactcaaatattggaaagcctagggtgttggacagtctagggtgttggacatcctagggtgttggacagccttagataggcttgtgggagagaataagggagagagagagagagtacgtcagacacttagagagtttaagattaagtttctagcttagagacaacttaggcaacttaggttttcagtcagagtttaaggcctttatataagaagctttaaaccataggtttacaattcaaatcccttaacaatcgtatagttagttcgatatttaaaaaggaccaaaataccattgattctaggtattattcagccattctgttgggcttttggggcccaatttgtagcccattacccttggccacgtctaagagtgtccagtgaggcgtgtagagcactccttggctagccaggcccctgtggtggcaaagttggccagccaaggtgttttccctgggttggccgataatagggcgggcaggggtggccgaccagctcttgagagggagctggtctatcacttgattcccatttgagtgccggggtctttgtttgctcgggtgctgacttggccttccttgtggtgagctgtactgccatgaggacaaaaattggaataatattggacaaataaaaatttataatgggaaaaaagtggtaaatggtagcttttatgagtatttatactcaaaatggttatctacgtgaagaaaaatatactcatttaataattttttttctagccagcatatatttgaagattgactaaaaccatgggtttgctataagttgcgatgatcgtattgccttttatttgtgttatttttcagctaattttcgatttagttgaaggacgtgttgtattttattggtgttatttcacagctagtttcaaagggatctactaagaagcacactagtttttgtgatgtggtatctttatgttatttttcttttaattatagtcaatttctgacttattgtgtgttatttatttttactgattttgttgttgaactaaatctattttaattataaccgattttggagttattgtgtgttatttgttattacacattttgttatggaaccaattctattttaatttgtcttagtattttggagttgattccctgtttttaattataatcggtttttgagttattatgtgttagtttttttttactcattttgttgtagatttggctgtattttaatttatgtcttagtgtttttagaactaaatccctcttgttatatatatttaataattttaaccggttcttaatactttttgtattgtgtttat

SEQ ID NO: 85314 - DNA, 593 bp, Cannabis sativa
caatcccacatcgcctggggaaggtcaagtgtgatgattcggagactgtgtaggtatgggacgttacaaaatctataaaaaattatttgaaaatgaatcaatattctggagatattacatctctttcagaagatcaaaagaaggcactggaagataatcaacaaaaagattctcatgtattatactgtttgtagcaagctatggcagcaaacaatcttttttcgcggattatgggtgcagcaacgacaaaagaagcatgagacatgctgcaggaagagttccaaagaatagttaaggtacacatagttagactacaaaagcttagagattttgaaatcttaaaataaaagataatgaaattacaaaagattactattctagagttaaggaaatagtaaatcctgttataaagcctattacaataagggttatcctaactattgttgtaacaaagggttggtccatcaggcagctagatgtcaataatgccttcatgaatagagacctacaagaagagatatacatgcaacgacctcttggttttgtcagtactgaacaatcagactatattgcaaacttaacaaggcattata

SEQ ID NO: 85315 - DNA, 621 bp, Cannabis sativa
  modified_base (556)..(568): a, c, t, g, unknown or other
acaaattttgggggaaagttttgtttatattttcggttgaggatgcaccaatttgaaatggagtgatgacatgtcacctcttggctggaaatgcatgatattggtgataagtactaaaaacatgtgttttagagtgtcagtgcttgcatacaatgtcacatggggtgtgagagtgttctcatacaaccctcacttaaccacattactcaatttctgagtaaaatgaaccactacgcgttgtaggtcactttttgatccgataacttcggaattgagctatggttgtgacacttagatccgtcttgaaataatcttttaaatgcatgttgaaccaagttatttggataaaaattgagagagttatgcccatattactggaggtagtttattcagtcttgtaccagatgcgagcaatgacatggtcaaatggcagtgctcgaccacgcatgttctcgacccctcacgatgtgttttgactttttttttatggtgagtcgtattttgagggtcttgagacccaaaaactgttggatatttattttacaaggatcttagnnnnnnnnnnnnntatgttgtttaaacaccctaaataagaactttctaaaacgataaagtaaacac

SEQ ID NO: 85316 - DNA, 657 bp, Cannabis sativa
aaatccgggaatgtgcaacacagccaactagttaatttatacattatacagatacaccttttatttgtctttcagtgagaagtatttcattgttaccaaatatgtttagtggccactgttttccttattcatgcagagggtgaaagtttctcacttacacttaaagtggtatgcttgataagataggaccacatcttcttaattcccctgtttttgtaattgtttaagtgatgtccattaatttatttttctttctttccatgaatcaaatatcatcatccaatatattattatacaaaaaatagaagttagtttgtaattgacgttctcatcctaaatataatataccagtcaacaaaaaggtaactgaataagaataaaacccgcgttagcatcacaatgattcaatatcatcactgtctgcaatagtcacagggagtcataccactacagctaaattcctttttttttttttccttttttgctgggtacctaaatcctaattagtgacatttctaaatgccactataaaggaaattagattgtaccattttacttgttttaatttttatttctattttcatattcttaaagatataactacttttatagaagatatcttcgttacatcctttaggttaatgtaaattatatgct

SEQ ID NO: 85317 - DNA, 594 bp, Cannabis sativa
ttgaagttttcaattttttgtgttttcggtgtcagaatttttaaacattaatattataaataattaatttcatacacattagaacatattttgtacatccaaaagtcatctatatcaagagttaaaaaatgtcactatattatagaaacaaaaccaacgtttctatcgtaaaattattttatttatatatatgtgtgtaattttttaatagataatttataccaagttatcttcttctaatattcattttttttttaaaatttgtgatttaatttaattttctatattattctaatataattataataattagtccgtgttcggtaagaaattgtactttataaagtataatatataatattctatttttctttaaaagaaaatgtaattgctccaattaatcaattaaacctaaattttaatgttaatgctaatatttaaattgtggaattattcattgaagaaaaaagtttaaaaagcatgcactaattaatcatctttataatttaattgttgataataagaaatatatgaatgtattaatattgtagataaaaaaattcaaaagacatgtatacatatatataaaattta

SEQ ID NO: 85318 - DNA, 616 bp, Cannabis sativa
tattatttatttctgttaaaaacagtgaaaaaaatatagagaacaggataaaaaaaataaaataaaattcttcatttgcagtatttatatgctggagatgcaacacagccaataaatcttgccaagtttctctaagtgcatcacttacttgaatagcaacaagtttcctctgtgttttgtaatattcttctaatgtcttgctctacagaaaagaaaacaataaataagacaatgaaagaaaacaccatttgaaaacaccagatgtatgtttatatacatatatatatacttgttttgcatagttaatgaacttctctttccaaagtatttcagaatcagtaaaagtaaagatttattgtctattttgagagtacaatttagatttttataattggcattgttgctctttctcatgtatttttgacattttcctaaattattctctccaagtgctcttgctcttgaaattcacaactaaatcaatatccgcaattcgattaagaatctcctatgggaaattaaaaggaattcaatttacaaatccgtgtttgcagcaaaaattaacagaggcaaacaattaaacattatatacaaacacaaacaagataattataaa

SEQ ID NO: 85319 - DNA, 558 bp, Cannabis sativa
attattaaaattattaacaaaaaagtaatacaatctataaacaaaattttaaactgaaattacaaattatatgagccttaatacaaactcatataagtttctattaaaaaatacaaagacacaaaaaaaaaaaaaaaaaaatcaaatctgtttcaaagtatcataatgtacacttattaataaaataaacctaaacaacaaaaaaaaaaaattcagatccaaagccactgtcaaccagaacttcgaacaccgagctatcgaacacgaagcccgtcgaaccgaagcccttcgaacacgaacgtcgatcgtgcacccagacccacgacgaccttcaaatgccgtccagctgcatagaccagagacacagagagagagggagagaaaaataatcagatgaaaaaaaataaatgtaccgattatgccagcgttttgggtgcgtttgggtggcggagacgtcaaccgtggacctatggcgatggaatagagggagacgacttggggttcaaactatatttcgaagtcctgtgaggcaatcaatgggcttgaagtttggaagta

SEQ ID NO: 85320 - DNA, 1147 bp, Cannabis sativa
ttctacacaatctttcacactatcttgagtactgccttaaattgtctgggcaattactcaatcactatagggcacaaaattttgagaagagaagaataaggattcaaatattatggtggttcacattttatgtaatttgtttatttttctcaacatctggtaagtatgatttgtatttgggatactaaattcttatcatctttgaaagaataacatggttatttgtccattttataaaacttggaaagatgcatgcattagaataacttaatttttgtataaaatattttagtttcttgtctcttttttatttgaaaaaaaaggagtcgtgtgacttgacttatgggctaagaaaaattagtcatttgtctttcttttgttaagtatcaacatgtgctttaattggtaaatttttgatgagtttcctcttaaaatttgatttcttattctttgtattttgtttaattgttgatcataattgattttttcagatcttaattttttttttttttgggaaatcttgattttttttttgtcttcggtccttatagataaacaaaaagggagagtatttagggttttaatattttaattgtatactcaattgtccagggggagttgaggtttgtgtttgtgttcaactttggtcaaagttagcttttttattttggtttattattgtgcttcttagggggagtttatatggttattttgctaacattgttttgcaggttcttgtttattaaaatattttgattatctaaagtgacaaagggggagattgttaggtcttttattagcaatttagttgtcaaaatatttttaattgatgtgcatttttatttagcatttaaattacttttattacattaattttgtgcctctaattactcttttcttctaaggaaagactcattctcagctggtctcttttagtttaggaaacttcttgtaagacaagaaattctcttatggaaagttatctaactttgagaaacttgactttcgtgatcttgatccattttggaaagtttattttccgatcttgatctgctactgcagagcccgattctgatgttggaaatcaggaaattttttaagaaagttttgtatagttgtgaaatcgtttttgtggcggtctctaggg

SEQ ID NO: 85321 - DNA, 3047 bp, Cannabis sativa
cttaaagttatctggcgagatcagtatcacccttgcacccgagccattttcattagatgctccatccacgtacaatttccaagtttatacgtctcgctggataagtggattttcatctggaattatcccttttattaggaaatctgccaaagcccagcccttgatggatgttcttgggtgataagttatgtcgaactgccacagtttgataaaccattttatcaaccttccagacgcatctagttttgacaaaactttccttaatggttgatcgattaacacctttttgggatgtgcttggaagtaaggccttagtttgtgagatgcatggattaagcatagggaaagtttttcaagagggggatatctcgactatgcccctagtaaccttttactaacatagtaaataggttgatggtgccttccctcttctcgcaccaatgctgcactgatcgcattatccaagacagctaagtagaggtataaagtctctccaactattggtttggccaaatctggaggtgttgataaatttttctttatgcccctaaaggccttttcgcactcatctgtccattcaaactttttgttgcctctcaacacattgaagaatggtaggcatttgtcagttgatttcgagatgaatttgtttagtgctaccattctccctgttaaggcttggacttccttcagctttgtggccgatggcatctctatcaaacccttaattttttcaggattcgcttcaatgcccctcgcgttaactatgaatcctaaaaacttccgcgaggagactccaaaggaacacttctttgggttgagtttcatgttgtactttttgagtatttcaaagcactccacgaggtcttttgtacgatcttcgcactttatcgactttaccaacatatcatcgatgtagacttccatgttcctccctatttgttttttgaacgttccatttactagtcgatgatatgttgccccaacattcttcaaaccaaatggcataactttacagaaataaagtcccatgttggttacaaaacttgtatgctcttgatcatggacatgcatcttgatctggttatatccagaatatgcatccatgaatgtcattagctcgtgtccagcagtcgtatccaccaactagtcgatccttggtagtggaaaataatccttttgacatgctttatttagatctaaaaagtcgatacaagttctccaagtaccatttggcttcgggacaaggacagggttcgatatccacgagggatagaatgcctcgcgtataaagtccttggttaataacttgtccacttcttcctttagtgcccccttgtctttcagaatccaagggtcgcttttttgtctcttaactaggtaattagggtcgataatcaaatggtgacaaatcactttagggtcgatccctatcatatctaaatggctccaggaaaactgatcctagtttgccttcaaaaaaatttattagttgctattttagtttttcatccagatttttcccaataaacacacatttagtgggatttcctggatctaaaacaacttcttctagttcctcgattggtttcaattggtttttttcttcttgaattcgaggatctagatcttcttcttgcttctccccttcctccgttatgactaccattgattgatggttggcccttctattctgcgttctacatgatagcattcgcgagccaatagttggtcacctcgcactacacctacacctaccgatgtttaaaactttaacgatatgtgtttgattgagctaactgcccctagtccaatcagtgtagggcgacccatcagtatgttataaattgatggtaggtcaacaactagaaaatcttgcatcaatgttgcggataatggtggctcggctacggttaatgggagttcgataatgccttgactggcgacactatctccagtaaatccgccattaaattcaccataccaattttaattttgcattttgcaatcccattttcctcagtgtatccttgtaaaggatattgactgagcttctgttgtccaccaacaccctttttactcttttgttggcgagctgaaatgacgagaggatcgacatgcgaataccatttttctgtttattcttatctttggctgattctctagagtcatcttttctcttggtgttagagccacctggattgtcagcctttgtcaagacgatgcttgctgagacagtactaggtttacctcccgagccagtctttaataatttcatctcattcctcgcttcctcttttcgtacgaacacttgagctctttcattgaactcactgatgttcctcactaagcgaccttgtaaatcatcccaaagctcacctccaactgttgagaggttagtcgtaatccttgcttgaagagtagtaagttgaatattgtcgttcaagtttctaactttagcagcagcaatactgaaacgacttaggtaagccttaagcgactcgcctggttgatgctttacgttagtaagggaggatgcttcaggtcgtctatctcttgctgcctgaaattatttcttgaaatccttagacagttgttctcaagaagtgattgaatgatgggtaaacttattgaaccagctactcgctaccccagccagcgaggtggggaataaaataccgtgtaagttatttgaaacattactggctcgcattatggtattaaaattgttgaggtgagcgactgggtccgaagtcccatcatacggcgagacgtgagggtttttaaatccctagggaaatttagagttcataatgtttggatggaaaggctcaggttcttcgtccgagtcataactaggtagtttcccatattccccatcttggtatctcctgaatttatcttccaactcaatgattcgcaattggattggatccacttactttcaattagcattgagttgttggcgtaaattaggtgcattctaatttaagcgcttgcgtaaatcaggttgtctttgattctgatgttcacgaagaattggctgt

SEQ ID NO: 85322 - DNA, 813 bp, Cannabis sativa
  modified_base (766)..(772): a, c, t, g, unknown or other
tacatgttaacataaaccacttctaatctctgaaattgataactaatcagcttgtaatgggttttatttagggcacaaaacccaacacttttatcgttttgttattatatatcttattcggtcaaaaggccttttctaagacatcatgatcgcccaagcggtgtttaaacttagaattatttttcattttagacacaacaggctgaccgggtagcttttaatcctggtattacgtgcttttgttctctttaatgaatttcattctctgtttataatcatcgtgcagttgtgattgttttatttttaccaaatgctttgtaaaggtataggtgccacccaagtgaccaagcagacttatgactcttggtcacttgttttttacaagtatgagttttatatgtttggtgttttgggtttgaccaaaccttttgtacgcactggatggtaaattagaaacatgctgataatttcgaatcaatttgaattttgaaataactatctttattcatttattgatcgaaaaatgtgtttgttaccgtagtaacttacatcagagctatttgatctaatttgatcttttagcttaacatgaaataaaacaaattggagaaatagaaattgtactttaaatggtggtcacctgacctgagtacttttttccttttgtcgaaacctttgagcgtagtctgcctaggaggccattcacttaatagtaaagtttgctcagtacttagtgtggttgtccgacctggtactttattggtannnnnnncttaaatgttccccattccaatatcgtggtactagaacgag

SEQ ID NO: 85323 - DNA, 729 bp, Cannabis sativa
ggcgggcaggtgcggatccaacccgaaactcggtgaccattaaaactcaaccctagaacccgcccaatggtataccaggttgtcccgacccactcgaatatgatgagttttttaaaattttcaggttgagtgggtcaggtccgggcgggttggccgtgttcgggtcaaactcggtcaaaatgttcagtcctactcccaagtacttaagaggaaatctcccttcctcaaactaaatattttctaagatgataatctttaactcaagagaaacccctccaagaaaaacttcagttttatcttgattagtagtaataaggcatgtagtttcactaaaatcaatcaggccttctttagaataccaccagctttgactcatacctttacaaaataaaatgaggtcgtctgcaaaacacaaactagtaagacccaacctcttacacaaaggatggaacttgaagtctttctcttttgcagcaagttggagccttctactgagatattccataatgagaataaaaagcaaagggaatattggattccctttcctaagccctttctcgcctttaaaacttctttgaatacgaccacttagcatcaaaacataggtagtttccctaagacaagccataatccactcaatgaactgggagggaaaacaaagctccttcaacagattttgaagaaatttccaattaactgtgttgtaagctttactcaaatctatcttga

SEQ ID NO: 85324 - DNA, 1132 bp, Cannabis sativa
tcgtaagactaacataagaaaacaaaattaaaggagaattaacttattctcaaatacaagaagcaagtttaatgaagatttatgcgaatagagggctaacatacaaaaacataattgaacccaaaaactaaagatgccaacttagtaaaaataaataaataaaaataattgaacccaaaactaaaaatgtcaacttaagaaaaaaattgtttaatatataagaccagaagtcactcatttgatactcttgatcaaaagaacagtttcagggccttgaattctgaattctacaacaataaaacgaaaagaatagtaattaccttgaaatattctccaaaacttcaacaacctctcatcgatcaaaggagacctacaaaaatggttagagcaaagacgacctaagaattggaaaattcatgaaaatggtacagaaaaagggaaaaaacatacatgtataaaataatgcacacctctttctggtttgagcaagaaaaagagacaaacaatacagctccaacaaaaagttgttgcctttctctgactcagatcacaaattcctccaatttaatttcatttatttttatattgacaatagactaacccattaattaataataagaaatattaatagccttacaaaaatgaattgttgtctctaaacccaactgccaattgttaaaccacaataattatagttatttatttttcaattgaatttcaagaagaacataaattcaaccctttcatattcagttaaaaaaaaaagtccaaatcatttacacaactttcttcccaagcaagtaaaattgaaagcaatgaagaaagaaaacaataaagaaaaaaaattaagaaagatagaactactcacagcttcaatgtcgattttgtaaactaaaagctttcgtctttctctgcagctagttctataagccacaattatacgacccacagcaaaaatcagtgagcataagaaaagggctatttcagctactctcataatgatctacccttcttgatcaacactcgaaaccccaaatacataagaagctttaaacgaaacaaacacaagagaaagcagagaacacactgttgtaatccccaaatatggtcctctcgataactttggtccatc

SEQ ID NO: 85325 - DNA, 1127 bp, Cannabis sativa
tagaggatgttatgaagaattattttgagaacttatttgaatcggctaatacgaattgcatggaagtagttgattgtgtctatccaattgtttcggctgagatgaatactgaattagaccgacctattgaagaagaggaagtgaagaaggcgttgttccaaatgcatccggataagagtccgggaccggatggcatgactccggctttttatcagagatgttgggatacggtgaggcaagatgtggtggcaggtgtcagttctttgttcaacgatgctagtttggaggatagttttggtgaagcaaatgtggtactcattccaaaaaagaaaaaccccgaagctatgacggatcttaggcctattgcactttgcaatgttatgtataagataattacaaaggtcatggtcaacagaatgaagccattcattgtttctattgtgtccgaaaaccagagtgctttcatcccgggtcgcttaatttctgacaatgtccttgtatcttttgaagttttgcattatctaaaaaggaagcgtacaggaaaagaaggatacatggcccttaagcttgacatgagcaaagcgtatgaccgtgtggaatgagctttattagaagcaatgctaaggagattaggcttcgcagagaaatgggttcatttgattctgaaatgtgtgacgtctgctcgttacaacattatccatggcagccacgaagttggcccaatcattccttcaagaggaatccggcaaggggaccctctatcaccttacctttttatcttatgtgcagaagggctctcagcattgttgagacgatatgaaagaagaggttggcttcatggttgtaaagtagctaatggcgcgccaagaatttcccacatgctgtttgccgacgatagctatttatactgtaaagccaccgaagatgaggcaaaccgagtgaaagaagctctgcacaagtttgaattagcatcgggtcagaaggtgaatttctctaagtcttctattttctttagtagtaacactcctgaaattttgagaaatcgcctttgtggcggcttgggaatggaaccagccttggaagggagcctttatttggggttgcctagttccatgggaagaaacaag

SEQ ID NO: 85326 - DNA, 696 bp, Cannabis sativa
ttaattatttatactgcaaattactcaaaaaaaaatattaaaaaatttagtgtaaatttacttataaatgactttcgtaatatgcaagagagatgttatatatttgtattttaatcataaattaataatatattttgaaatatttgtcacttaaatatatacacaatttggccccccttaatttttcatcctggctccgcccctgtcggtgtcgccgatcaaataagctaatatgtacatttaccagaaaaaacctctaactcatggctgatctagcttggttctttctaacctgcactataaagtacccgtgattcataaagactcagcaataaaattgaaaacataaacagtatacatccaggtacagatttaatcacactgtcgcttaacgaggcagtctaatatcactatcgttgtctaatgcgacaaccgataagtatgaaacctaacaacgttttaattagagtattaacctcatttaaattgtaccattatcctttggcattgcaaggcctatctgggttgaaggacgtctaagcctagaggcgttggccgtcttctgcgcctgagaaggtctgttagcttgattcgtggttttttaaggaggttcaggggcacgagagttttttgggtcacacccatttttgcctccctttgtcttgtacaagagcataggttccaatgccagcgggg

SEQ ID NO: 85327 - DNA, 1265 bp, Cannabis sativa
atttttgtaaaagttaactcaaattcaagtatttttgtaaatttccctaaaaataagtgggaaaaagaggtttggtaaaaatgtctgctatgttgtttttggtggttacatgtattagcttcaatgtgccttcgtggaccttctctcggacaacatgataatcaatctcgatatgcttagttctttcatggaatacgggatattcggagatgtgaatggcgactgtattgtcacaataaagaatggtgggatatttgtgctgaatgtcgaagtcctgaagaagagctaacaaccaggtgatctcatctaatggttccccaatatcggatgagagccgaatattaggttccattggtgtagaagcaggagaagctcctaaataacctgtgttagttaatagttgtacggtgaatggtctctgggatacaaaaattccagagggagatcgacccatttccaagcccaagaaaaaatgtaaagggccaagatccttaagttgaaacacagaattaagttgctgtttaaagaaaagaacaacaacatcactattcaaagtaaccacaatgtcatcaacatatattaaaagagcaagaaaaatgtctttgtgatttttaatgataatgtgggatctgaaagggattgagtaaatccagtggataaaagataattgttgagtttggtagaccattgtctagaggcttgtttcaagccatagagacttttgtttagtttacatacaacatttggagaaatatctcctttaggtttatatcccttggggagtatcatgtacacagttttatgtaaatcgccatgaagaaagacgttattgatatcaagtttgtacaaagaccaattgttaatggctgcaatagcaagcagtaattttaatgcattaaactttgcaacaagggcaaaggtgtgaaagtaatcaataccttctttttgattgtagccttcaactactaagcgagctttgagtctttcaacagtgccatcaacattggatttgattctgtatatccatttgcaaccaatggcatgatgtttgttaggaagtgtgacaacaatccatgtgttgttggcttcgagagtatcagtttctgtgtccatggctttttgccattttgggtctttagctgccattttgtagctggtgggttcaacaatagaatgtgcaacaaggattgttgtacgaaagtattttgttaacctattataagataaatatttattaatagggtaagtagtggacggagtggcag

SEQ ID NO: 85328 - DNA, 811 bp, Cannabis sativa
aggtaacatccttggattttctcctaatttcaatctctgaataatcaaagggattttattaaaagtccatggtgtaccatcaagcacccgagtaatatccagttcatgaaaaaattgaaacagaaatcgattaaactccaattctttaacaaacatgccttttacttgacgccagagtgaagccattacatttcgaactgtatcaaaatcggacgcacgatcttagagtaatctccccactaggcaccatcttgcatcaacctcatcctccaactccgtatgttatcaaacaatactcctctttcttcttcctcatcaatctgcaactcatcccaacgtgcctctaactcctctgcatctctgcttgacgaaacttttttccaaacaaacaataccgattaaacaacacttaccatgtcaatcgacaagacgtttagattttgattttgataaggaaggaattaattagggttggtttatttatagtttatgaaagtttaaatttttgtataagggtcacgagaatatgagaatataatagtgaaataaaaaagagattaaagaaagaaaaagtgaataagttaaaagaaaagtaaatcctatttatacttatgtttaatattttaatttgggtatataagatgcataaaaaattaaatttctcaaattattttgaatactaaaatagatagggatgtatgaatttatcactgtgtattataaaattttccaaaaactcggcagagtgctctattaacgcgtataagagaaaaaagaaaagagaaaaaagaaaagaggaagaggaaggaaa

SEQ ID NO: 85329 - DNA, 1110 bp, Cannabis sativa
gctttgtacactgcctgttacttaattaatagaagtccaaataggaagattgagctgaaaacccctgaagaactatggacaggtaaacccccatcaatgtctcacctaaaaatttttggttgtactgcttatgcacactctgtggaagacaaacttggtaaaagatccattaaatgtattttcttgggatatccaaatggtgttaagggctacagactttactctcttgaaacaaataaaattgtaacaagtagggatgtaatttttaatgaaaatgattttccttttaaaagaaatgagaaaggtattgtttctgatttttcaggtcagcaaaaccatgataaagtaagcactcaaatcgagttggaaaaggtggctgttgatcaagaaacaacaccagaagacacagatgaaactgaagcagacacagacaatggtagtgaaaacttagaagattaccagctggccagagatcgaattagaagggaaatcagacctcctgctaagtatgctgaagctgatatcattgcctttgctctctctatgaccatggaatcacaagacaaagtgccaaagtcatatatggaagcaattaacagtaagcaagccaagaaatggaatgctgcaatgaattctgaaatggtgtctctcaagaaaaataaaacttgggttgttgttcctaaacctgaaggacagaaagtgattggttgtaaatggattttcagacacaaggagggtataacagatgatgaaccagtactttacaaagcaaggttggtagctcaaggttttactcaagttgaaggggttgattactcagaaatattctccccagtagtaaaaatgaagaccattcgaatgatgttggctcttgctgtgcaatttgattggaacatagagcaaatggatgttaaaactgcatttttaaatggtagacttgaagagactatctacatgagacagcctgatggattcaaggtggaatccaaagatggtgaacttgtctgtttactgaagagatctttgtatggtttgaagcaatctcctcgacaatggtacaagaaatttgactcagtattgacaaaagttggttacacaagatcaaattat

SEQ ID NO: 85330 - DNA, 752 bp, Cannabis sativa
ttagaggtacactagtgtgtccaatattcgaaaatataattagtgacaggtgttaaatgaaagatttttgtggtagggcttactgtaggggatcaaaacttagtgaaattggggtgcacctatagaacttctaaattattatttgattgacccacgtaactcaaagtgcacagttccctctccctttctcccccagctccgacaccaccggcgactccctctccctcagccccagactagcgggagattccctttccatcagaagtaacgtggatggcacaagaagagattggaagccaaagaacgagaaacttgagagaattctccattgattccttgtctgaatcctcagagctagtggactagaatttgagaaattgcatttcctttttccaatctctgaatcctccttgagattatggtagcccagaaattgactttactgttcattagaaattttttgtgagattccgacgacgagatgaacactgagaaatggtgtggtaagattctgatcttctgacatagaatcgattgaaacttcttacaatcgaggtcaggataaacaaagacgtctatattcataagtattttgtaaataaataaacaaataattttttaaaaaattaatgaataaatattcaatgtgtaacaatccactaaaataccatgtgtctcaatattataaccaatcactattcaagattttaagagtgcatggatatgaccaatattagggtgtctactgtaga

SEQ ID NO: 85331 - DNA, 589 bp, Cannabis sativa
  modified_base (51)..(51): a, c, t, g, unknown or other
ctttattgatatagaataatctggatcacattgaaacagagttttatttanggcataaaacccaacataaagtccctccgtccctattcttctggacgtgctaggtcatcgagtggttgaaaaggtcactagttgttccttgttagtaccatttaaacacaagttttttctctatgaaagctttctacagctctcaatgaaagtaccaaaattttgaccgagatttttggtaactccttaatcaaatattagaagaattaattataagtgtatgaagatatttttatgtggttccaatgttaataccgtagtccacaattcacttttatttgaggtgagataattctcaagtctagagaatattctttttataatatattgagttcactgtgtttgtgaatcctaaagtccctttttcacttatattctttaagtatttatagggaaaaattgagttgcggaaaaaagggtttcatctccccttttcttctaggtgctatctagccaccataataagagtttgatgagataagatttgtcttgtatgcggctgatgggatagcagaagattagttgttactttatcttc

SEQ ID NO: 85332 - DNA, 1033 bp, Cannabis sativa
aagaagagagtggggggggaagcttgcgccttatctctcctctccggccaagaagtctagaggcggtgagacaacttcgtccagagagaggacactagccaaagaagttattgatcttttcgaggagccaaccgtcgtagacccttctgctttgaaaataactaagtccaaagactcttgaggagggagctcagacaggcccgagcagtcaaagggcagatccgagctggtcaagagcggatctaagcagatccgggctcctgccccacctctagtactgcatccagagactaagagaggcaaagatatgctcacccattacatgactcggtcggtccttgaggtgaatgagcaactgactagagctgacaatgacctatctctggagctggtgatgggaggagtcttgaaggagtttatgagggtaagtctttcctgatagtttccttttatccttctttactaggcttagattttaatgttttttctttgtgaaaaccggtctgaagatggcttatgcttattcccgagctaagttgggtgcgtccaagaacgctgccatgtctaacaccatgagggcggaagtagacttggctagaaaggatgctgataaagccagggttcagcttggagctgtctgaatggagctgggtgaagtcaacaaaaaacttcttgccgccgaaaagaaggtggctgagctgactaaagacctccaggcttctgatcaacttgaagctgccattgcctccttgtcaaaagaagtgaacagtctccaagaagaaagggaggttcttcgaattgttttttccaggttggaagcagagaagaagtctaaggaggaggagcttgtagctgaagttgagaagcacaacgttgaggccgaacaacagagagccgaggttgagaggcacatggcagaggccgaacaacagagagctgaggtggcgaggctcggagggaaggtaaatgccttagagacagcaggtcttgagattttttatgacttctggaaagctaatcccaaggcaaactt

SEQ ID NO: 85333 - DNA, 1849 bp, Cannabis sativa
taacgacctaatacgacattctaaactagcccttaatatccacaatgataattcatcaaaatataatatccaaaataattaatcttatcttattaatttgttaatagtttttttagaagaaatttgttactaacttattctccccatctttaacaagattatatcatacatagatgtggatacaatatagatccagactcttcttcttctccctctcgacatgcatagtctgaacagacctcctccttcgttcccaatgagttcacatttatctcctacgcgttcccactcagtggaacctttaccaagccccagatctctcgatctaggtggctccgattcttcctccatccacactcagaacatctcgactcgcccaagccgtctcagctgcatcgaaatgatccgtcccaaccactccagtcgtttcaaccataactccggccagtctcccagacgctcgaaccgtacaagcattaatcatcctcttacaggtattaactcctttgatcatcttttcctattcactgtcaaatctcatcagagaaatgggtatttcttagggtattttagatacaaatttggtttgcccattaaattatctttgtataccagataccagaaagggattttgggtaaagaaaatgattttatattaatttccagaaatgttttaattccttttgcccaaatttttcaacttttagcattaatattagtctgcaattgtgatctacctggtacaattcaaaatcctcttgtgcagcaaccctgttcgaaagtaaatgcttcagaagtgatagttaccaaatcagttcataaccttttcataatgtttttcctatataagggcagaccctccctttggtctcgcacctacatccttataattcctaagctttattctctgcaaaaaagtcctaatattagctatttctacttagatatatattttattcactgtagtagcccaacgtttcccccaaagtctctctctcactgcacacacccgagtctagttctgcatttagttttaagtgtctctctctacgacctctcaagctttctgttctggtgttgcactgtcgttaagcttatctatttgttgcaatcttcaggtcattacagttccacatttagttggtcattagctcaaactccccctgtttttagtttaacgtgtactatcggtcagatacattatttatcctctctatcttggactcatcttcctcttctcagggacatatttcagactctttatagtatcctttttatcccgctcccactgtcctaccacatttatattgtcgttttcgaattaagtcactatctgttcacttgcatcatggatgagctaaccaattcattatctgttgctctcaacctcacagagaccgaatgcaccattcaaacccttcatgagcctattcccacaaacactcctgactctgagattcaacctatccctttattccttgtggtcaaggttcgcacggttaaatcatttaaccgcaagaatttcatagaaaaaatgaccaaagattggaataatatctcccgcaatcccgtgaccataactgatcgatccaatggtctcttccttgttgagtttggctgtgacggagatagacgtcgggttttgctgcagcaaccttggacttatctcaaccaagcaatccttatcgacatcccaaactctttggatgtcctcaatggggatagcttactaaaaattccccgatgggttcaagtgttcaatactcctttcctcaaacgctccgaagagttggcggggcttgtctcatcctcccttggtcacctcttggaaatttaccggccttcgctt

SEQ ID NO: 85334 - DNA, 816 bp, Cannabis sativa
aaaaaaaaaaaaaaaaaataccgcgtgatagtatttttgtaaaaagaatagcaaaaattagtataccatttaaatttctcaataaaaacgaaaaactcggggttaagcccaattccccatcactcctattagatacgagatcatagcacttgatttcatttaatttcacaatatttatatgttgggaaccaagttgtctttaactatttttgtttatgggtatgacatttttggagacagagaccatccattggtactttggtaaatattaaagaggtttatataaatggatttttgtaatcaatcacatatttcaagagtgaggtgtgagttttttctaagaaagaaaaaagagtggggtgaacttaaatatataaaaatagaatgaggttgttgctatcctccaaatatatgacactatacttgtccttttggaccacttagtcaactacctaccactcatattctgaaccacacataactcatcatcatttgtactatttcaaattttgacatataatatattttcaaagaatgttagttgacacttgacatgactcaccattcagaccaacaatatttataatatataaaacaccaagaactttgatgaatacacattacaattaatatttaagctctattattcagctacaatagattttatagttaaaacattttttaattaactttgtaattatttaacaacaaagtggacattagttaactagctactaatttgcatttgtattataatactttatacacatttttcgataacgaatgtttttacacataacttgctatatttggtaa

SEQ ID NO: 85335 - DNA, 853 bp, Cannabis sativa
  modified_base (181)..(184): a, c, t, g, unknown or other
gtactaggtcccggtcctagttcagtttcccaggtccctatcctgattctgggtccaagtcgcggttattgtgtgggtttgggtcccggtataggtttgggttccagtcctagtctcgttctgggtttttatctgggttcgggtttgggttttggtcttggtccttgtcctagtcctagtnnnnttctagttccatttgcgattccgagttcgagtttgggtttgagttcgggtcgaagttcgagttttggtctgagtttgggttcgtgtttggatttcagtctaggcccagattaggctccgggtgtgggttcacgtcctgggtcttggtctaggttttgtccgagtcccaagtttgaatcccgatctgagtctggattcagttctgtgtctaaggcctttgttctgatactggtctgggttcgggttgggttcgggtacgggtctagctttcgatctgattcaaggtgtgcgtgtttgagttcgagtttgagtctgtgtttgggtttgagtccaggtttggaccccgatatggatctaggttcgggtctaggtccaagttcgggtctcgagtgcgggtccatgttttggtctgggttaggatctcggtctagatctaggtcctgaccctggttctgtgtcctgagtctagttccatgtttgggtctaagttcaggttcgggttcgggtcccgagtccaggtttgggttgggatctgggtctggctcacaattcgggtttaggtatgattcggagttcgaatcatggtccggttatggttctggatctatgtccaatttcagttatggttctagatttatatcaaattttagttatgattccaagtccaagt

SEQ ID NO: 85336 - DNA, 635 bp, Cannabis sativa
aaagatgattggatcattgattcaagttgtacatttcatatgactaacaataagtcttatttgtttgattacagggaatctagagggggcaaagtcattcttgggaatgactagacatgcaacattgaaggttcagtatctataaattttaaaatgtttgatggtattattagaaccttaactaatataagatatgaacctgatttatctaaaaatttaatatctattagtgtacttgatgatatgggtattgttagcaagattgaggcaggtacattcaaattggctaagggttctatgacaatcattaaaggacagaaaaatggtggcctatactacttgcaatgaagcctcgtagcttgctgccacaacaccaaagaacatgtcacagaagacactaaggttgttatatggcacatgagattgggacacattagtgaaagtggattgcaactgatgagtgaacaaaagctgcttggtaagaacaaggtaactaaagtggatttttgtgaattttgtgtgctagcaaaacaccataggcttaaatttcaaacaggcacacacaaatcacaaggcatcttacattatgttcattcagatttatggggtcctgagaaaaccctaacttttggggg

SEQ ID NO: 85337 - DNA, 947 bp, Cannabis sativa
  modified_base (167)..(171): a, c, t, g, unknown or other
tttttttttatataatcaacatataaccatcactacgtaaaaatcctacttttagtgacaaccttttagttataatacaatttttttgtgactaaatttgacttttagtcacaacaaaaaattacctgtgactaaaacatactatttagatacaagttgtcactaannnnnttttagtcacaacaagtattgtaactaaaaacacatttagtcacaataaattgtgacttttgtaactaatcatttagctacagactttttaatcacaccataaaaataataatttataattagtcataacttttttacttataatcacaaattttattttgactaaaagtaaaaaaaaatttgtagcccgtgtttactttaatggtatattttgttgtaatcgtatcaacataaacacgacaccataacaaaaattattatatacatatcaagggatgagactctccttttctttcttttttattttttattcatgtatagaaactagaaagaatatgttttgttcatgcataatgcttataataatattataccataacattagttacgtacatgcccctaacacagtgtgttgctcaattaatattgggtccattaattatattataagagttgttgaatatatgagaacgatcataatgaggccaactactcttatcttaattaataattattcactcactctctctaagtcttaacaactttctcagttcaccaagattgaaaatggcagatctagcttacaacttagctagaaatgtgttggacaagttgggctcctttgcttacaagggtatttttccttttctcagttcctcttttatttttattttaagtaaaaagtagaaagaaaaaattcttctttttacttttgtttgtccaaattaaaacacaaaaaaaaaaaaaaaaaagaaaaaatgtctactgctctcttg

SEQ ID NO: 85338 - DNA, 1163 bp, Cannabis sativa
tactctttgaatttttttatttactaaaatacattttcagtaaaaataataaattatttttttgttgttttataattaatgtgagattgatttctggattttttttagttcttttcttactttttattgagcaaaatatatttttgtaattttaaaactttaaaagtgtatttttgtatataaaaattttaggttgtaaaattgtaaataaaacataaaaaaaattaaaaattaaaagtttcccaacaatatttatgtcttattttctcaattgttattatttttcttcatccccaaccaacaatttactaagctcaaagaaaaaaaatgtaaaatcatcaaataaaaaaaactcaaatttgtaattaaacatattaattagtaataaattgtatctttaatgtataaaatggaataatcatgtctcacaagtcacaacaacaatatggcttcattgctttccctttccttatgagactttttcttttcttttttcttaaagacagtttacagttacaaactacaaagtaggcactagcaaaaatgataagaagagaagagattacagaaaattttgattttttttttaacttctgttattctttgtcttcattcttagaacatcttgatctgcaatagaagagttatgtatcgattatcgaacatggaaaaaccgaagatggatttttactcttgtatgaaacatatttcaccaaacgtgtattagcagaattgataaaacacatgttcataagtattcaaagttttgagtttgtaagcagcataaatcgaataatattttttaacggaataagtactgaatgttagtagaattgtaactttcatctagtttcatccgtacagacttttttagtgtcttaaattgtctgtgaaagaagacttggaagtaactaatattatacattatacaattctgaacatatgtttagaatctgggccacacatttgtcttgtttaaagaactaacgaagtctgtattgatgaaactggaggaaaattacagttttactaacattgaattgagtacttattttgctaaacaaatcattgaatttatgcagtctacaaacttaaaactttgagtacttatgctgcaaatctactagaagttagaacagaatattgtgtttcattcaaatatt

SEQ ID NO: 85339 - DNA, 598 bp, Cannabis sativa
agttgtgcagttattcctttctacatgcatctcaacattcaagcacttacgagtgtttgatttgtcaggattatcttttgaggtgttgcctaattctgttgggaccatgaagttgagatatcttaacttggggcggtaatagaaatatgaagagactacctgattcaatttgcaagttgcaaagtttgcaaactttgattcttagtagatgtgtggagcttgaggaaatacccaaggatatagggaatttggtaagcctaaggactcttacgttcacaacaaaacagagctttttggcagaaggtggaattggatgcttgaagtctcttcgtttattggttattggtgggtgtaaaaatttgagatccttgccgcatgacttgataaattgcaatacattacgttctctcataataggtggttgtgatcaactcaacttagcaagtgaatttattaataaagatgttcagttgagcctccacgcatttcttatttatggattaccagagacaacagaattgccccaatggctccaacaagctgctaagaccctacaaaagttacatattggaagttgtcccaaattatcgagattgcc

SEQ ID NO: 85340 - DNA, 557 bp, Cannabis sativa
taattttttttatttatttggcaaccggttgttgtaggtttgtttaccgattgtcaatttgattttttaattgaaaaataaaaaagtacaatcaagttactgtttgtgttagttaagatacaaaaaggtacaactgagttactgttcgtggcagttaacagtacaaaattgctgcagacagtgggtccatgttgtcggagtgatgttattttggtattttcattccttcatatcatctatgtatttgtgcaatggtagttgagtacattatatcgcgcagtgtgtacatttattgtttttgcatgatgtttagtaaaattagtgtacaaaatatcacgtaccgagtataaaatatcacgtaccgagtacgttcatttatgtttcgtagtatattggtaagaaaaatttgttataactcatgaaattatgtgttattatatattgagttttacgttggtgtatttattttattttaattattttttatattaaaaattaccatagaaatattttttttttcacctcataagattattttttttacctaaaataattta

SEQ ID NO: 85341 - DNA, 756 bp, Cannabis sativa
gagtaatgtcaacttggagaagaaagatgggactgtggagacctattgtaactctgctcaaggctctggatatgggactattcacccttcagctgattgcctcagcactcatgataacaagaacattcaaccgataatcgatcacaatcatgatatagtccacactgaactctgataatattggcttgcttattatacaacataaataattgattgttatgacacacacacacacaaatatatatagcacatgccaaatagggtaaagaaacagtagagtgatgtgatctctagtaaggtttcttggatgaggtttgaggtgttcaagctaaattttaatgggatattacagaggtagtttatacatatatatatactgaaatttaaatgtgtctaaattatagaaaaattgaaagcaagtgtatcagaattcagaacatattgttgactttaatgaaatggcttggtatattttcatctagccttattgattgtgttgtgttgtgttgtgttgactagtgtagtatatatatatatatatatatatatatatatatatgccatgcaaaagttgacattttgacataactgactgattcagtacataatttggatatttgggcttgaagagctacttttaataatcaacccagataaaagtgcctgcttaaagatcttgcctctaaatttgaaccaattttgtttcaatcaaataatgtcaccagtttccaaagaacaccataaaggattcaacac

SEQ ID NO: 85342 - DNA, 958 bp, Cannabis sativa
catacgttgttattctttctgcaccgacctcttatacatttttttaccagcctctcttataatgttctatgcaattttcaacataatttgtggccaccgtatctgaattttcaacgtcatcatttggtattgttctacttaattcgaaaccaggtattatttttctactaatattgatctaaatattggaatgtaattattgtgttacatatatgaaagataaaatgaaatatcatgcaaaaaattctcaatatattttacctttattttatacttaactaattttttgtaaactacatcaaactaaaccagtaagcatgtaattattattttccctaatgcatcccatcttttatggattagcattcgagtttcctccctattataataatcattcaacaatatatctttgatcacattatcaatatataatagtactatttaacatttcttaaattggtcgataacctgcaaaaattgtcgagcatatcaatatccttaaattggtgggtaaccttcaaacgagcaagttctccaataatttttttaccaatattctatttttattttatttataccaagataatggtattttatcaatttttttttgataaaaaaaattacttttattttgttttaatttagacctggtaacgcagtttggagcgtacgttatcagcatcaccaataattttctgcttattttgatgaaagtaactacttattagatatttcaaagggatggagcatctattctttgtttatctttcttattggggatcattattcttgaatgagtatatatgctatattattttattgtcagctttttctcatattttttggctggttttcaacacaatttgtggccactgttgctgaattctaaccatcaactggtattgtgctactcatttggaaatcaagtatttttttactcctcacattaatttatatt

SEQ ID NO: 85343 - DNA, 1486 bp, Cannabis sativa
  modified_base (903)..(906): a, c, t, g, unknown or other
agtttctcggctagttacaacccgtcttcaaatggtcaagcagaagcatttaacaaagtgttatgcaaaatcatgaagaagacaacgacaaagaataaaagggattggcgtgagcgcctcctagaacctttatgggcttatagaaccacgataaggaccgcgactggttgcacaccttataacttggtgtttgggtctgaagcagttttacctttacaggttcaaatatcttcattaagaattgctactcaatcaacatacccagatgaaaatgtgcaagtccgtctagttgagattgaaacattagatgaaaagcagcttgctattcaacaaaagctcgaaatttaccgagcccaggtagttggggcatacaacaagaaagttaaatttcgatctttttcagttggagatctagtgcttagtgtaaaaagaccaattgtcataactagaaggatgaaaggtaaatctgaggcaaaatggaaaggaccttatgttgttactaaggtcttcctaagaggggtgtatgaactttcaaattcagaaggctgacgcatttattcgtgtgttaatgggaagttcatcaaaaagttctacacttaaacaaaaaggtatttacccatggtgtagacagcgcacttaaaaaagacgagtgtgtaatgaactatggaaggcttaattccactccaggtacataggcaatctagtttacaactaggcccaaccacataaaataaaaattcgatctcctaaaaaaataattgcataaaaaatgcaaagaactacgaatggcttgatcccttaaaagggtacgttggcaatctgaacaaaattggatgcagccacaaaatataaaaaaaaatatatatattcctcctaacaaaggagtcaaaattctaaaaggtnnnnatgacaaaatactatattagtcctcaaggctaataaacataaaaaagctaacaaaaactaaaacttaaactaaaatgttttaaaagcaaaatcataagatcttcagtccatctggagaaataaagtcaaagcgtcgagtcttctctggatttcttcttcttgaaacttgagtgttgctttcgctctctcagcttcatggaatttttctacactagcttggtcctttgaccgacttatctcctcaacgagatgttgttgctacttcaagaaatcattgagactagaaagatctacctcaaacgatgcttttttggcttcgaacttagctcgttgttgttgtatggctacttctgctgcagtaatctctgcttcctctgccttaaaatcttcaaaatcctttgtcttgttagtgacaatatggacaaacgatctataactatcgaattatcctcatcacgacgaagaaggttcgtgataagatattcatcaagactaaggtcattctcaacaatttgagtagaagcaagagacttttcttgagctttgagcaaatcattgacagagtcagtgaaccatgcaa

SEQ ID NO: 85344 - DNA, 595 bp, Cannabis sativa
aatttagtattttagtatattgggtcagtttatttagacattgggaatgtcgggattagtcggaaatttagaatttccccaaaatacccttaatacctctcttgtgcaatttttgtgtggaggggcaaaatggtcattttgctccaattatgttttgtcctttagtgagcttattatttggtgatattatgttttatgttatgttaagttggctgatattaatttaaataaaatgaaataaaaggattcatttactttttacaaaatcaaagaaaaaaaaacaattttttttttcttaaactctctctccctttcgaccctctttgagcagcaagaagctgggtaattctctttggtaatccaagctttttctcaagatttagtgatctctaatccttggtaagattttggtaacttgttcttggtattttcttgagttttatgacaaaaataatagtttgcatgcttagttttggttcttgttgctgctgtaattatgggttttttttttcagaagtttaattatgtttaatggagtgaaatagaataggttttgatgcatgttgagttgattttaagcaagtttgaagttttg

SEQ ID NO: 85345 - DNA, 1064 bp, Cannabis sativa
aaataaaatggatatacaatgtaatttcctctaattttttatcatcttcaaaaaacgacaactaacattaaaataagtttttcgtttcttttttttttattatttttataacatttcaacaacaaaatcataaaactttaaacttaataaaattcaacaaatcaggtacattataaattactataaaatctttcgttctattattttaaaagttacaatatgatatactaatataaaatttaattgataaaacaattttaatatgttaatatagaattttataaaactatcaaatagtatcttatagataatattagtaacataataaaaattattatatatactaacttttctaataagctatatatggtaattatataatttatatccataattttttgaagataataaaaatattgctaataaaatagtatcttaaatcatttaaaaaaatatatatatcttaaacaaaacacatatagtgtagccaaaattaagttttcttatatgtatattgtattcataattttaattttttaagttaaagatagtagttaaatatttaaaaaataataaatagataaataagaataaaaagtacaaagagtgctgaaagatcagaggtagacaattttttttaaagaaaaaaaaatagatgaatacaagtaagagagagaatataataataataaaagaatgaagaataaataattagaattataggaaagaattataaaaaaaaaaaaaaaaaaaacattgacaggatagacaaattaaaaaaaataaataaataacttaaattgtcagattgatttgggcggcgacaagcggtattttataaggaggatactggcggctgtaattgttatatattgtattattaaccaaaaaatataacaataaaagtattttattttataattttatttgaaaaaaaatgttaaagggtactattagtgtttagcatctttttatatgtcaatattattattgatctaactaagtatcgggtcctatataatttaatataatagcttttagaaaatatcgctaaccaatcacaa

SEQ ID NO: 85346 - DNA, 595 bp, Cannabis sativa
aacaaatatcatagattcccaccaccacatcataccatcaaagatcaaatcaatattacttgtttttctctttccttttttttttccattggattttaatttcctaatttatattctgtatctaatagaacgaaatgtagttcacatttcacactacccgtaccaaaacaaacaagttaaactgaaaaagtaaattttaaagaatctttttcattgctcttttttgctttatttcacttgattggaatttattgcttattattacttatcaagtcttgcatcaattactcaaagttggaaagccccatacaggttgccatagagtcccacaagccactgaactgaacaacacttggaaagctcataacttattagtcattcaattaatccttcatagaaaaatgcaaggcatgtggggaagttacacctcaaaaccagaattccattgacacaaaataatattccatagaagattgtgagcaataaatcactgccataaattttctcagtactaattttaacaacagttgcaattggcttttaatgtatgcatgtgcactcactactctattgtaggaaacctttttgcctaatt

SEQ ID NO: 85347 - DNA, 1326 bp, Cannabis sativa
acttattttaatttgataaaagttatacagaattgataattaattataagatgtcatgttatattagtgttacgtactttagtgtcccataacaatgctcaataaattatagagtattagtacacaccacaatagggcaatgtgtctggcagcattggctagagattacttgggaagagttttgtggattgttatggacaagttaaccttctttgatgcttttattggcaaaattgtggctcgtcttttagccattgagccggtaatttttttgaaacaccattttgtgataattgagagttattcttagacaattattaaaactttaaagaggactcatttcgtttggagtattggtatgtgactacatgcattaatgtaatagactctctaatttatttttaggttttaattcttcttttatctatagactttgtaattttgcaatacataatatggccaattcgacttttgctcataacttaattggtattgttcactaggaaaatagtcaactgactcggagtcaaataatcactgattaatcaccaataaggagttaaaataataaataaaaagaataaacaagaattatagaggttcaacacttttgtatatggataatgacctacttcccttttagttgtattgattgtgagataatgacacgcaaatcactaaggttgacagagtgaattctagctacagctctcaaagtgtttatagagaatatcttttagtaaaatgctcttaaatgcgagaatatgatcttaggttccctccccttgtgaattcatttactatttatagggaaagggttattacaattagctttgtaaaaggagtgatcaaaaggtaaatattctgatattcgaaggtgcagttatgatatattgaagcttctactatctccggtaaatcaatcagatctgtatttgtaggattcaatttgagatatttatggaagtttgttgaagaagaattcaaggctcatgtagccttgtttgatattcctgccattgtttctttctaattggcatattgaccacccagctaggccctccttgagacttgtctttttcgatgaggttacttatgaaacaatcctggaaggtacattgatctacccttctttgggcaacataatgatggcctggccagctgctgcctaggaggtaatccacagtccataagtgttggaatttatgcccaaaataaaacctatttcaatataatcagatttgctaattaataaaatatcaaaaatcattttatgttgcatggttcacatgatttcttttctaattatatgtttaatgtataaat

SEQ ID NO: 85348 - DNA, 601 bp, Cannabis sativa
ttacaaaaaatggtgccttatgtaattattcctaaaaaaatttgcattggtggtagatcgttaagggtggtggtgttactccaggcaaaggggtttacggtgagcggagggaggcggggaagggctgaggaaggtgggtagaggaggaatttttgagagagaagagaaagaaagtgaaggaagttgaggtataaatgaatctaatagtattttttatatacgatattattaacgatggactattccgttggtaataataggattccgcagctaataataaaattgtcagattttttattattagcggtgggtgtccgccgctaataacaataaaagtccgctgctaaaaagttttgaaaatatttgagtgggaaatttcccgcactttttctattctagtattagcggcgggggctaatacatttccatacaaaaaaaaaataaataacatttaatagcagaagtctgccggtattagtcccattagtagcggtggatttgcttcgctgctaataaccaaaattcttgtagtgtctttataattatttattgttaattttttttataaaattatataaaaaataataaattaaaattattt

SEQ ID NO: 85349 - DNA, 626 bp, Cannabis sativa
tcagtacctcgaaaaagatgaccaagttaacttctgacctaggacagaaggaagagatgaagatgaacctcttcgccatgccgggggtctcaagggcatgttacccagtaccacaaggatggaagagtccatgtgtatgggcagaaaaggaattataaccagaaaccctgataaggtccaacaagatctcaggagaaggaagtgaagaatcacgccttaatggaaatgacgataaagtcaaaagttgcccccgtcatgacaaccgacagcaaaggcgtcactactacaaaatgagcttttcccaacggttaataagagggtcaattatgaaaaccgttggaaaaaagtaagtataactttttcccaacgatttagaaatgaagcaaaaaaaccgttgggaaaaatcaatgccaacggtggagaaccgtggacaatactaaataattttttttgtaaaaaaagaatgaatcccaacagttataaactgttgggaatactaagtatttcccacagttataaactattgggtattgttagtattcccaacagttattaaatgttgggaaagattctttttaaaatgtaaagagttattattattattattatcatcatcatcattatta

SEQ ID NO: 85350 - DNA, 901 bp, Cannabis sativa
attttataaaaattaaacttcaacctcttcttgttcagattatcaagaatacatgttcaagatctataaccaataacaattaataaatttcaaattttcaattgtacatatttaagatcaataattaataacaattattaacttttaaattttttcaataacacttattcaagatcaataatcgataacattaataactttcaaactgttcaataatctatattcaagatcaataaccaataataattcataattttcaaactttcgcaattttttcttttctatgattttactcagagcaattgatatatgtacaatatatttagaaatgtaaagaaggaagaataaagcaacttcatgtctctaagaatatagattgctaccaagttgcttaggaactaggacggatcttcccctgccagaggaaggacatacctttacttaaaggtcaaacagcaagaacagtcagatcccgacagctagcggcatggggcccggccagggatccctggctcaacagcaacccccactgtacaaccactggccgaccagccatcaacaggagaacccatggccggtcagggtacatcacttcctccactaggggagtgaggtgcatagagatcgatctttgatcgacgaggaccgagagtgggtggaaacactgaaaatggagattcaagaaatgcaaccaatcacatcgggcatctagatccacaaaactctagcaactagtgtgatctaccccaatcaacacacagttgacaccattcgatcgaggagtcatgggcggccagaccctgcccaatgtaggtctcgccggccatggaggtgcaatgggggcaagaccctgtcctttccaagtctgcccagccaaggaggagtactgggtggctagacc

SEQ ID NO: 85351 - DNA, 888 bp, Cannabis sativa
agatagttagggtgttacagataccttgccgacggaggatgtacctaaaacacaacaaaaaggtgacagaggtaacactactaacagaatagaagcccccgacggaggagaactcggatccccgcagacgatatcccggacggaagtggggggggaactagagcataaagtaagaaattgataaatttaagaatatgatgccgacggacgcaacaccgatgaaattagggagaacaatagctttgaaacccactaaaggcatagacacgtgtaacaagggagttatttattagaatacatatacgtggcaggggcaaaaagaataaaagaacgagaacacgtgtcaacaaaacgataggtagatgatagataacccatgcaatcaaaaaaggacgtacgagatatataggaaaagatcacgtaaaagaaaagcgattaggaactggaaaaagaaaggcccccaaaaagaaatcttgactgttttcgaccaaaacagtttggcgctgtctgtgggaattttttctttttctcagtaaaagaaccttttcgtaagataatcaataaaagatatggcaaatgaacaggaggatctcacccctcaaaacaacccaaataacatcctcggaacaccagcaaacactggcgacgcaggcgtggacgtatttaacccaaccccgccatggcgagagatcctagagaggctgaaacaacaagaaggaagaatggcaacctagggagtgaaaatttcccttcaaaaggtacatatccaaaggcttgagagcaaaaacggacaaatgaaagttgtccttgtagggtaccaacgaccaccgcatgcggaagaaaccggtaatcgccaggtgggaggagggattgagaaggagaatcaca

SEQ ID NO: 85352 - DNA, 575 bp, Cannabis sativa
ctttttataaaagattctattatagtccttgacatttgttgctcgttttaattcaccaattaattccaaacaatgaacaagaggagaaggtatacagactgtcataaaaaaatttctctaatagtggtgagcatatggtagctttaaaagtctacctatagattaaaacaaacatctcataaattggtatttttattatataatcttttccttatatataattttaattaattagagagtagccacaacatctctgattaaataaaattatgtattattcatctaatacaatttttatctttaagtgtgaaaaattcaactcgaaccagcatctaaaaaatgatctggagtgagaataaattaaaaacattcatttgcttctatttttagaagcctaatatatgcctaagagtctgaataagactttgcattgcatttgtttaaggatcgttaaatagtatcagaataaataaggttaaaaccactttatttttcatacaaagtgatgaggtgtctttaagatactaaaaattatattcaaatatattttgttaagatgaattgactatctggaa

SEQ ID NO: 85353 - DNA, 925 bp, Cannabis sativa
  modified_base (598)..(598): a, c, t, g, unknown or other
gtaaaaaagtcaattgtatttttttacccttgttgttctctgtaaagtctcgtatctttcacttgtttatattctcatatatatcatatatataatgttataaacataccctttttatttaatcctataaaataaaagataatatttattttaatttaaattcaaaattcaaattcaaatataaatatcatataactaattaacataaaccagttaaaacttttttttatttaatattatcttttaattttaaatacatgatctaataatatattaatataataattaagagataattattaatttaattttctttattttaataataaaataatcaaacaaaattctcatggacctttgtttgtcaccctacacgtgtggggtcatattttaaggtccaaaattgatttctcaatttttctacaaataagatttattatttattttctcaataaataataattgattaattctcattattctcttattttactaggattaaaacaaatattatttttacttaaaataatatatttctctctttaatattatttaagtaatattatatttaactaattaatataattttatcaaatanaactaaatagttaaatactaattacataattcataattgatgcaattattcaaaacaataattttcacaaaattattatttttcccttaagaattatttctcatagaaattaattcttactcaaatttttcatcaaattaaaccttttcctatgtagtgttgtatagaggtgacttggggactatggacctatattttgaagctcgaataaatacttaattattattgaactaatcaatagaaaaatctagtttattaattctattattacttcactataaatataaaattacactctttgacaatataaaattatatttacataat

SEQ ID NO: 85354 - DNA, 607 bp, Cannabis sativa
ttctatgcatggaatacctttccaaaattttaacaaaggtaggaaagaaaatagattttaaattccatgacaggtgtttggatatggagctcaaccatctttattttgcggatgatgtgctgatcttttgccacggtgattttaaatctatctattatctacttcaaggcatgaaactcttttctatgtcatctggattgtatccaaatgaactgaaatctgcattgtaccgttgtgggatgaaagaagatgaagttcaaagagtaatagatgcatcggggtttgctcggagtattctaccattcaaatatctggggattccaatctgtgcaagaagattaacagcagtggaatgtggcactataattgagaagatggtacaacgaatccgaacatggggaactcgaaatttatcctttgcaagtagaatcactctaattaactctgtattaataacaattcattcctattgggcacaaatcgtggttcttcctaaagcagtgttgaaaaaaaataaatgtcatttgtagagcttttttgtggaaaggcatggctgattaatggtcttgggcaagtatcatgggaccgattgtgcaaatcaaaagca

SEQ ID NO: 85355 - DNA, 944 bp, Cannabis sativa
aaaattaataaaaatattaaatacggggtttgaaaacctaattatatatatatatggattatggcatatcaaataccataaaaatacctaaaaaaatatcatataaattggtcaaccttagttaaaagtactatatttaagtaaacaacttttgaaattccataagtgtaatttcctcacatttaaattatatgttttggctttttagctttgtttctttttttaaagatatttaaaaaatgactattttttatcacttactaagctatatatatatttttatttttaacttaggttttttttttttttttctagagtgttatttttttatcgacttaaatattgataagaagaatggagacttgataggtcttgatagttttgtattgataagaaagtaattattatttttattcatatttttttctattacttttttttttatcaatttatcaattattaaatactcaatgtgtctaataaatattctactagaaaatctaatgcatacaacaattagaaaaaaaaaattaatttctaattaagttcaaaaagctattgagtgaaagctctttgtactgtctgtaaaatttgaaaattgtggcaaccacaaatgagtacagatcacttttaaatgattataaaattttatttttagttacaatttcagtggagagactagaaggaaaaataattaacattccgatcaatagatctcaattcataaatccaaatttaactcatgttaatgataacactcctatttttttaacgaagaaaaattaagcagtattactgtgaaattttgtttactatatatttctttaaatatatatattagaataataattagaagatgtattattattgttgtatttttctaccttatcaaatttaggtagaaagtgtagaaagtgatgaaattagtttatttttttaaaaaa

SEQ ID NO: 85356 - DNA, 581 bp, Cannabis sativa
atttgaaattttaaattttatatatattaaaattatcaaattatcttatataacaatataacaaattaaataattaataaatttgaaatcgaccaagatatatttttttatagatatcctaaccataatatttttaaattcaaaattggttattttgtaaaatatttaattatttataaatcatatgttagaaaagtgatattttggctatattatatcattttactttataaataatgttataaatagttaaataacctagatattttttgtaaaaatttgaaaaatacttaatttgagatattttgacatatagtttggataattattatttgtttattattttattcttaaactaataattgcataaccatatttattttaaaattagtatattttgttctttaattttattaaattataagattagaaaatgatactaaaaatacctatttggttattttcaaatcacttatcttattagatatttaatttaatttaataaaataattcaaataaagttatatattttaaaattagtttgttactgatgtgataatcagcgatgaagtatacttaca

SEQ ID NO: 85357 - DNA, 641 bp, Cannabis sativa
ctttggaaggggactgccatgcataatgggtcaggttatgtgtcttactaagatgtatgtcaacccaagtaagcaggaggtcttggaatctggaatgttatcttatggaatagagcattgattggaaaaattatgggctattgaaaccaagcaagataatttatgggtcaaatgggtccatattgtatatttgggaggaactaattggtgggactataatgtaactactaattgtagttggtattggaggcaaatagtggatgtgaagaatcaaatcaagggaatcaacaactttcaacaggagatggtaagtagttacaacattaaacatgtctataaattaattgttatctatggaaaaggatagagttcacatgaatgatgttgtttggggacgattaagtttaccataacatcgtttcattctttggctggttaaatagagcgcctgcaaatcaaagatagactcttcagatataatatttcatcggattcagattgcttggtgtgtggctctaatgttgaaacttctaatcatttattttttgagtaccatcttagtgcactagtatttggtggtgtaggaatgactctttttggaatcaaagagtgcaaagtgtagatacaattgtaaaaaagat

SEQ ID NO: 85358 - DNA, 730 bp, Cannabis sativa
atttgctgcattttcttttcctcacttgcctcgaggtaccagccacttttccggtccctttatttttgctaactcgggggttgttcaaatcatattccatgttcttgtcacattgacttggctcttcgtatccatcttcttctaatgaaattttttgtagcctatacattaattgctcaagttccttctttgccaaattcaaaagattgtcactcgtacaagcaaggaaagaaatttggtaaagctgggttgaaatattaccaaaacgaattttgtctttacgacatgtgaagctgcatcgagtagaactttcgtctggtatttcttgtacctctcgtgcatgtattgtccattgtgtaatcaccaaagactttggaattgaagtcactttgaattttttcatgacacagaatatatgtcggcatgggatgccataggtcgggaaatattgacattcacaacctattgaaccagttgacaagtctagatatactgttctatgcagcgtgtcaaaaagaggtgtttttgtcaatcgaacgaccaccatatcatcttcttttgttgaagaatctaccatgtaccttgcttctttttctatttgagcacgaactcggaaaaacatatttcttgtgtacaattttgctgcctcctcctcgatatgtgccatgtttgtctgctgaagcaacggcatagtattcatcgtgtcatagtcatccttggcgtctcgagt

SEQ ID NO: 85359 - DNA, 615 bp, Cannabis sativa
attggatcccaaaaaatatggtgacttgtcccctctacaagatgttagaaaggcacacaacaaaaaggagataacctatttggggaatacaccactactttgacattctctttctcaataaggaggcacgactcctcctatcactattaacaataccatgcatcatacaatagattgcttttaggaaatgggtctcacctactaggctcaatagctcaaaatataatattaaactatgtattttccccactagtcggctttatggaacaaaaccctaacgcgacccaaatttgcctggcccgataagcatagtttcctataaatatgacattatatcttccatgcaaatggttcacaacctgaaaaatacatactagagctgtaaaactccactgcttaaaacttatcaaattgtcttgtggactaaggttcactaacgcctaaattacgttaaattgtgtgttattctcgttttaatcctttttctttatcttatttttttgtaataatttatttctaaaaatctcggtaatattttagtacttttattgagagttgaagaaatttcttacaattttttacatctacaacaatagtggccatgagaaacacagt

SEQ ID NO: 85360 - DNA, 1383 bp, Cannabis sativa
actcacaaagtgcaactaagcttcgtgcaattacttgttaacttggtaagatagcaatactttatattttgaaaaagaaatatgagatatttaggtttcaaaataataaagatgagaattgtcgcataggctcaatgaaattgactcaataccgatcctaaggtggcgatcaattgttaaagagttttatcgtggaataacttaaataatatttatgtgttttacttgtatgcggtcatgcatcacattatagtaattttgaaaagatatttactattcttgtataatcattatgtcactttatttatttcagtcatgtctactatgccaaatccccttactactttaccaacacttgaaaaaataaatggtgataacttttataaatagaaaccgaatattaatttaatgctggtttgtgagaatcacaaatttttcctaattgaggagcgtcctgaggagctcgctgccaatgccccaaaaatgttcaggaaagatatgatgcttggattcaatctaacaacaaggctaaatgtttcatgcttgtaagcatggacgatgttctatgtaagacgcatgaagatatggagaatgcatctgtgataataaattatctgcaggccatgtttgggcagtagtctaatcaaacaagatatgatgcttcttgtagttacaagaattgtaagatgaagaatggtgtccctgttagaactcatgtattgcacatgattaagcgtatgcatgagcaaagatacacagggctatcattgatgagaggactcaagtgagtatgatccttgagtcgctgtctcttcaagctttcaccacaaactatgtgatgaataatctagagttcaacatgactgaatttttgaacgagcttaccgtgtttgaaaaccttaataaggataagcctaaggaaggtgaataaaatattattgaagcaaactctagctctgcttcttctcttgataagaaaaggaagtgaaacagtaaggataacagcggtggcaagcccaaaggaaaaaaattacccaaggccaagaagaaaaaatccaatcccaagtccaaggacaagaaggctaaaggaatgtgtttccattgtagcataatgcgatactggaagcgaaacagtaacaagtacctctctgagcttaagaaaggtaaatccaatttatttttccttaaagctaacttagtggaggatgataaatctttatagattgttgattttggagccactaattatattttttctatgcagatacttgaatcgtcaagggagctggccgatggggagatgactattcacgtggggaatggagcacaagtgtctgccaagagttttgacacatataaagtttgagaaaccttccagtggtt

SEQ ID NO: 85361 - DNA, 1760 bp, Cannabis sativa
cgaccctatacctctctcttttcactactacaatttgaccttttagtgacactatttagtgacatgcacttttgtgcgagtcactaaagaatttttaatgacatgcataattagactctaaacatttaatgttagtgtcatacaatgtgtgtcactaaaaatatagatagtcaccaaaaagtaaaatctaaaattttatattttttattaatttaaaaaacactagtctatagtgacatgccaaatgtgactgggtaaatgtattcccacacacttagcgcgtcactatatcataatttaatttttttacaaaaaataaataaataaatacatctgtagttaataattaaataaaaaataataaaaggtaagttttaattaattaagaattgtacctgcctttacaaaaaaaaatgtacctgcctatttaaaaaatataaataatattaaaaaagaaatatatccatgttagaaaccctattttatcactaagaaaatttataaacacaataggcgccgttcctctctcttcatctccctctatcacgcaagcttcctctccttctccctgtgtggcttctgagattccgaggcacaacgtcgacctcccaaggccaagcccgagccacgacgatggcctcccaagcccacaaccactgctcggttgttcgccgcccaataacccacaaccaccgctcggttgttcgacgcccaataacccacaaccactgctcggttgttcaccgcccagtagcccacaaacatatttttctcactcttgttcatctatagcaacctggccacccagatcgacccaccccaatagctccggccaaccctagttccaaataaatctcacaccttcgcactctcggtctctctcacttccttatacaagaaatcaaatggagaccagcggagaacacctcctgccttgcccagtgatgctagactttcgtgcgattccccggtttaattttttcattttgaaatgtgttcttggccgttttttggttttgtacaattaacaatttttctttggttgtatctgttgaaaaaaataaagtatttatgtttaatgtatttgttaactctattagttgattgtatcttcttgtatggagttaatttttctttttgttaaaataaaatattaacaaaaaaattgtgtattcataggtttttaaggttcttaatttttttcagatctgttcttattgttttttttttattagagtgttcataataactgttattgttgtataaatatttcagttaaaaaatttctattgcatttattatatccaatcttatataaatattttgtttagtgtttatatttcaaattttaattttcttccataaaaaaaaataatgtaaataaatttaattatacttatttattttactgagatttaatttttaattcaaataaattataggttcttttttttaaaaaaaattatgatatagtgacactctttaagagtagctgatatcagaaaaatatatatatatttattaaaaaataaaataaatagctatagtgacacgcatagtgtgtagctgttatttttacagtctgacatggtgtgactctaaaagcttatagtgacgagcagtgagggtttctaaaaagatttagtgacacacattgaagtgtcactaaatattgtctttccagtcacccacattagtgacgcgcactgaagtgtcactaaaacattttagagtcactcaatgagtgtcactgaagcccc

SEQ ID NO: 85362 - DNA, 772 bp, Cannabis sativa
tcgggatgttgtcttctatgagtccatatttccttacaaaaactccaatccaaacaccaacatcgacatttttcccctcaaattcttcacctacagtcgcatatgactcaactccacctactgctccagattctccacaatctggtttacactagaatccaaggacttccaaatttggaagaaaaatcataccccctgctcatttacaagactatgcatgtacaactacttctagcacaccctatcccatttcaaactgtctctcctatcataggcttagtccctcttttcgaaatgctattcttactataacggcaataccagaaccaagatcctatgctgaagctaaactccataaaatatggaacacaactatggataatgagataaatgctctagaacaaaatgacacatggatagttgttccattacccgatggctaacatgccattagcaacaaatgggtatatagaaagaaatataatcctgatggttcattacaaagatgcaaagccagattagtagccaaaggcttcacacaacaacctgacatcgactattttgaaacttatgcccctgtggccaaattcaacaccttgaaactacttcttgctcttgctgccataaaaaattggcacttacaccacatggacataaataatgcttttctccatggtgacttacaggaggatgtttatatgaaactacctcaaggatacactccaaaaggagtaattccaaaaaatgcagtttgcaaactaaagaaaagtct

SEQ ID NO: 85363 - DNA, 1143 bp, Cannabis sativa
taggacataaaacccaacaaataggctggctgaccaccaacctatgagccatagatgataaaagtcactttacaaaggtgattccataagtaaactcataaaaaagacaagcctcgaggaagacctggctgggtgatcaacctgttggccagaataaatgttgtcaggagtatcagacaaagctacacgatccttgatttcctcgtcaacaagtttctacaaatatctcaaattgaatcctacaaatttggaaccagaaaatctatctgagaataaaggagattcaacagattgtagcgacaacctagaatataaggatatttattatttgtttactcattttacggagccaaatgtaacaatcttttccctataaatactgaatgaattcacaaggggaagggaccaagacgtgaattggtatttccacatctaagagcactttgttgagagatgttctctgtaaatactttgagatatgtagctagaattcactttgtcttccttagtgatttgtccgatattatctcataagtaatataactaaaatggaagtaggtcattacccacatataaggaggttgaacctttataactccctatgttctctttatttgactacgagtcagttggctatatcggtcgacagtctgtctaactgatgataaaaaaattactattcccttagaataaatatttgtaagttgtaagtatttcaaaaaaaaaaaaaatacgatgagaaatatatgaatatgagaatctacatctacatctagtttttcttcttaaactcttttaattttcatttataattatgcttatgattatgtttgagattatggagtagtcctcttttaggttaagggttatttcactcgagacatgatttattgaatgctttgattaatgttattatttatgccttcttattgaattgcttatattcttctttgattaattctatgattaatattttaatcttgtttagatgaccgctaaattaagttttacattattctactattgttcttagaatttctattcacctaatattttgacagtgtggccaagcttgcgacaaagctggcattgcaccttttatccccaattgttggtctaaccacgaccatacgaggcatggcc

SEQ ID NO: 85364 - DNA, 1151 bp, Cannabis sativa
tatatctatttatcttttctatagggacctagttgtcaattagctattagtaatgaggctaatattgttgcgtctggtgtagtcattgacaaagggattccaagctcaaactacatgatagtcatgtttattaaagttttgaagagaatgattcttgcccctattctatgtcctagtttggacatcctttctgttgatcaaagtgttgggacaccgatcccttggcctcgtcatttagtaattataactaatcttgtacatcaagtaatttttcatatcacatacttatataattaagttatacctattattagtgtttattttttatatactaagtgttaatttaattagttgtatacacagactcatcatgaaacaacaagtggaggtcgattacaaaggccaccaactcctttaacacaaccaccactactagagaaacgacctctaatagatcgtctaacacaacagttacggactccattagaacagatacataatatcatttctcggtggacggataagaatgagtgtttcaaatatatcatagagaatgaagtatttggtcaagatttgtcacatttttacatatgtaaagatgatataattcagtttacaaatctggaaaagattggacaagcagttgtcatatgctacctgaggtatatatatattgtaatatattatatttaaaaatatttatatattttatttatttaacaatgttcatatattatatattttattaggttgttacacaagtatgtagtggaacaaaatcacacaatttttttttatttgtcaatcctaatattgtggcaacttcaggaggtttatttgaggatcgtgcccaaaatatgttcaatctatgtaagcaattaaaatcaactggacaacttatgattgttccttgggtccatgggtgcgtaaactaaattttttatcaataattaaatgtaatataatatttatatgaaataattatatttttcttttgtagtggacactagatgttaattatattggcgccatatgcttactatgctgcttattgtgatcctcttaatgtcaatttccaaaatcgtgaggaaattgtgcgattgattgttactgttttcaattgtttacttcaattcaaagaaatgcctcac

SEQ ID NO: 85365 - DNA, 988 bp, Cannabis sativa
gatactttgtgaacacccctaatggttgccgcagatgccaccatgcacttcacagagtatgtaatcgcactcggctccgtcaatgcacttgagcaacgattgactgaagcttttacggtaaagcttgccatcataaatgacatatcaagcagctcgatactgtagttttctagcttctatcttatcttcgggtaggattcctttctgtaagtaatccattattggagtcatccatgtgacttctctggcagtatttatctccagtacttcagtccgactcactgttgggtgagtcaatacatcgacaggaattacatcgagtaattcggcttctcttgttgaggccaaacgggccaaagcgtctgcatgagagttatgagcacgtggtactcgagaaacaaccatttttttttttgaatttctgtagcaactcacaagttagggcaaggtatctatccagacgtccgcctctggccaaatattctccgtttacttggcatacgacgatctgggagtcgctgaaggcttgtaaatactcgatcttcatttcaagagtgagtttcaatcctgcaatcaaagcctcatactcgtctttattgttagatgcagaaaattcaaatctaagtgcaacatgtaccttaaaattactggggcttatgagtattataccaccgccgaagccttcgctgttggaggctccgtcaacgtataaagtccatccttcgccgtttggtacatcatgatcgattttttcttctatgagtgccacctcggtgctcgagaactcaagtataaagtccgccagggctttccccttaatcgcagatctgggtttgtacctaatgtcgaactggctcagctctactgaccattttaacaatcttcccgatgcctttggtttcgccagaacttgcctcaaagggtagtttgttgaaacttcaatgctatgagcttggaaataaggtcgcaattttcttgacgctatcac

SEQ ID NO: 85366 - DNA, 1089 bp, Cannabis sativa
ttatgtattataaaggattggaaaaatatttgtttttttttttttgaaaattgaaaaatataacttactcgttattttaattattttttcttattatatatatacatacgtttatatattctattatgtactataaaagattggaaaatatagttttttcgtttttctttttaaattaaaaaatataatttgctcatttaattattttttcttatcttactattataaaagtgtcataataatgtgataattgtaatgacaattttctccttggtgaaatcaataaaatgtgatagaaagacaattttgctatttgaaaagtcaaaatatactcatatctctctttctctctctccctctaattaaacaagtactttctttaatattttaataagcttaggttaatttgtttaaacactccatattattctgctaaccaataaatgtgataaatataaatatatacatacaataataaataataaccatgtatactaagatttattgttaatttatattatatatttttaatcttcaaaattattatgtgagagagattgtttttatatgtgttaacaatattgattttttttacttaatataatctaataattatttttgctactatttatttaaatttattatggttttgaactaaaatttttaaacacattctaaataaactaaaaattacatagtttgacaaatagaattgaacaaatttatctctctaattttttctcttttaaaaaaatttatctcagtagtacccaattaaatacatattttgttccaatatgtgttttcaaaagtataataataaaaaaaaagagtaattgtcagcgtcaaatgtttaaatttttatttacttaacattttaattttttttgtgacaatattcctttaatttttgattgcaaatttgagatgtttgttaaattttaccattaaaacttagttagattttcattgtgaatacttttgtatgtgagatatgtttttattaactttgagattttagtgtcatgtatatacaagtatacacaatgacaatctcagttaacatttaaaagtttaatttaactggtt

SEQ ID NO: 85367 - DNA, 903 bp, Cannabis sativa
tttctcaaactttagatgtgtttatttacattgttttattatatttaggatgttaaacaacatacatgatagtaaatctagatcctggtaagacatattccaacagttaatggccctcgaatttagattggttgtaggctccctactgtggggagagatgcagaggaaaagagatgaaaatctaagtgaattcatggcaaaggcacaagtaatcatcaaccttgaagatgcctatatacaagcttttagagtttctctagctccatagccttccacgaatgctccgaattacacacctccagttctggctccaactttgcctatacgcagagcttagtatatcacaactgtttatgggcctaccacttccaaactagcccctacatagaccaacttttctgggtacggagcgccacagtttgggtgtagtgttgtgctggaacaggcaaagactggggtccgggagtccaatctaagccactcccagaacaaaagagggggataaagccataaccataacgactcttcgaagaagccaagagaggagtatgagccaaaacatactgagtacacaagcttagtcgacacagaggagaatgtctataaagccacctgtagcatggtccactacagggagcctccacgtatgtcgcatggaggaagaaatagacatgaccagaataaagaatgcgagtaccatggagagaagggtcacactacaaacgagtgtgactatttaaaggatgagattgatatgctagtccgagcaagacacttggggtagtgggtccgcatcctgattatttatctcggacagggggtggctcgtggacacatgatagttccaggacagtggaaagtaatcaagattatgtgatcaaagatatattcctagatttatca

SEQ ID NO: 85368 - DNA, 2810 bp, Cannabis sativa
gccatagctgtaaacatccacctttaccgatacagcaacgtttctaaaccattcgggagcaacatatcctttggttcctcttattccagttgtggttcgcgtctcaccagtgttcaaaatcttggccaatccaaaatcagaaattctcgcggtgaatgagtcgtctaggaggatgttttgaggcttgatatcacagtgtatgatttggttgctgcactcttcatgcaagtaaaatagtcctcttgcagtgtccaaagcgagttgctttctttcgtgccattttggctttgagggtccaaaaagaaagcttgctaaggatccattgctcatgaactcatagacaagaagccggtgttgtccctcgttgcagaacccaattagctttaccaaattcttatggtttgtactaccaatagacatgacttctgccttgaattcttgatcaccttctttcaccatgtgattgttatccaactttttcacagcaattaccaaatcattattgctgtccatttccaaaacccctttgtaaacaactccaaaagcaccaactcccaactgttccttgaatccattagtagctttttctagttctgcaaaaccgaaattcttcaaattcatttctggtatgggctggttcggtttagtcaccaatgttttgcgactaaggcgaaaatagaaaaccaatgaggttattaccaataagatattaagcaaagcagagctacttacaaacactgatccaatgactatcagtgttttctggtcatttgttttcgaatctttgttgttgcatggctttgaagcagcaccagtagtagtagttaagttcgcttttcttactttgtaaagagttttagttcctttgacactagaatccatcataccatttgagaaaggaaatctcttcttccaacaattttcacctccataaatggcaagaacacaaaaacaatcatgcaaacaagcatttctacactcatcctcagacatagatgaagacacttcataatcaccctcaggccaattcaagtaatcaacaaaatcaatattaaagttcttgtaatcttctaaatcttcatgacaactttgagcttcgaaagtcggtatacatcctttaatcttgtcattcaaatcaatgaaagtgtaaccatcaaggcaacgacaacttggtctaaaatcatcttctagtatgcaatagctattgtatccacacacaccaggtcctttattagcattaaaagttaagcagatgttttcaggtatggatttcgaaactcgagaccatccaccagaattcgaagcaccataaacataatgactaaaaacaccatcatattcaagaattgccctttggtagagaaaatcatttgaatgattagaattagaagatgacattggtatcaactcatcaaagatggttgttccattctgttcttgcaagtaaatagagccagattggttaaacaccagctgtaattgtatgtcatcttctgttggggtttggttatttggccaataacgaatattaccttgaccaggcataacaagtctagtggtgtaaaacactaaactacccttttcaacaatgaaatagtatctccctttagagtaatttgactcagagtacttagcaaaaacttttttaccttgattaagaacttgggtaggtaacaatgtgtctgttggttcattaaaactctcccaaagattggcatgattgttgttggcgagcacgaaattcccggtgtcaagcatggctgcataggaaactccaaggccagagacagcagcagaccatattacatctgttccatttgttgggtctctcaaaactaatgagccaagtttggttagttcaacaactgagccttggtgaacaagattgtctccattggctgaccaaacaatggttttttcgggtattttgttgaaccatatagcaagaatgaagccatctttttggatttgttgaaaaccaaatgcaaaatcttcatttggagaaatccatgactcattttgatttggttttgcagtgagttttgaacccaatgtgatgttgttgttcctttgagtagtttcatcagcagcactagaagttgaacataacagaatcaatagaaataagaaactaataagaaatattttatgcaaattagtactcattgtgtagttttaatatattacaaccaataaaataatataggtattatatggattgagaagcttgaattattattattattattattatcatcattatgttgtactatcttgcttttatgatctttaatggagctttgattgattcagtcaatttttatttttatttttgcactatttatagtcaaagacgcggtttcaaatcaaaaagggaaagagaaaagcataataactactaactagcaaattcaaccttggcagcttccaatatttacacccaagaaaatatttctattagcaccccattattaaaataaattaagttaattttctcaaatctatctgtcaatgctatcatgtgtatatttttgtacatgttagctatcctagtccaaagtaaagttcgtaaattttactactaaaaaatcagtttgtggagttaagcaagaaaaatagtataatgtaagtaatcttgctactaatattatatcccaaatttgttttaaaaggtaatctgtataatttgggtgagtgagggcttaaataaatattgagtcaaagctcataaaagtaaagtaactgataaatgtatcttttaaattttcatcttcaacaaaataaaataaaacattgtcaataatattatt

SEQ ID NO: 85369 - DNA, 635 bp, Cannabis sativa
agtatctctgaatatataattattagataatatatttagggtatagtcttagctcaactgcttttcgaccggtcttttgattagtgaacatgtatcactatttatagggcaagtaagcttggggaggaaaagtttcccctctcgttataatccgtataaatagaaagatcgtgggatcaatgctcaatgcaaggatcgtgggattgaggatgaatacactgatagcgggatcgtgtgtatgccatatccacgtaaattgatccctgagttatacggattgtgctgatgactcaccatgcaaaagtttaattctctcagtgtttggtcattctgtacgaattactgaatactttgctctgggcatgccagtgaggcatcctgctcaaactgtgcttcccaagcagatgttcctagtagactccacttgtcaccattggtgtgatgccacgttagagtgaaaaaattgggataacacggaaaatacgaggatcggagagaaaacatgatagcatatttgagcaaaatacatgatctgctcgtgcaattcaaaagttacagtctcagacaaattccaagggaagaaaacacaactgcatatgcgttagctcgaatggcaagcagcaatgtaagtgaca

SEQ ID NO: 85370 - DNA, 951 bp, Cannabis sativa
ccttgatgaaatttgtggtaccattgatgggaagcttgcttgagtccatagataaattttttttaatttactactattttctttgggtcaccacacacaaatttttctggttgttccatataaattgtctcatcaatgtcgccatttagaaacattgttttaacatccatcaaatgtaactcgagatcaaagtgagaaacaagtgtcattattatcctaaaagagtctttcgatgaaattggagagaaagtctctttataatcaatgccttatttctgagtatagcctttttctacaagacgtgccttaaacctcaccacattactatttttatccctcttggttttaaatatccatttaaaaaccaattagttttacaccttcaggtaatgggacaacttcccaaattttattgtcttgcatagacttattctcttcattcttggcgtcgttctacttttaagagttagaacttttcatcttaataaaataaagagagatttagaaacatcttccaagaaattaaaagatgatcatgtatcattcatatttaaatgtacattctcaatgatgaaataaaagtacatctcaacaaaaataattattatttttttgtatatagcatattatttaagtttatattaattgttaggataaagttattattttttattgtgtttagatttatgatttaaaaaatgtatgtactaaaatattgtatgtttgaatatttgttataaacttaagttgaattaatttaataaaataaaatgtatataaataatcaagttgaatcaataagaagcttctaaattaaggagatttatatagtttcgacgttctataataaaattattaatttagattgatgatgactttagtattgaaatattataatcatacatatttaagttaattttttaaaagaaaattctaaatacaaaaaaaaaa

SEQ ID NO: 85371 - DNA, 1811 bp, Cannabis sativa
tgggcatttttttctctagggattctttccactttataatctgtgaactcgtggagtagttcccggacgatttctacatacggggccattttatctccacgcgtttgatattctcccaacacctggtttaccaccaactgtgaatcgctaaagacttctattctcatggctcctacagcttttgctaattttagccctgtaatcagggcttctattcagcttcattattggaatctaggaattcaaaacgaagggtcgcctggagtcggagtctgtttggagatatcatcgctatcccagctccagatccattttcgttggacgctccgtccacgaatactttccatgttggggtttgtggcgctggtacgtttgcgctagcttctgcttcattgcactctgttatgaagttagctagcgcttttccttttatagaagtgtgcggtatgtagtgtatgtcgaactggcttaactccatagcccacttgaggagtcttccggatgccttcggcttttgtagtacctgccggagcgaatgatttggcaataccttgatgtggtgagcctggaagtagggtcttaacttccttgaagccatcaggaggcaaaaaactagcttttcaattactggataccgtacttccgcccctatcatacgcttgctgacatagtacacggggtgttggattttttcttcttcctgtactaaggctgcgctaaccgcgttctcagagatggccaagtatagtaacaagccctctccgagaactagctttgacaggaccagaggtttggccatgtgttctttcaattttttgaatgcctcctcacattcttctgtccattcaaatttttggcatttctttagaatgttgaagaagggaatgcacttgtttatggatcgggaaataaaccggctcagggtagcaacttttccggttaagctttgcacatctttgtgcttcttgggagaaggcatattcaggagggcttgaattttttccgggttcgcctgttttcccctttggctgacgatatatctcagaaactttcctgatttgaccacgaaagtgcacttcttcgggttaagtttcattccatacctccggaccacctcgaagcattccgcgaggtcgcctgcatgacttccacatgcctttgatttgaccagcatgtcgtctacataaacttccatgttctgccccagaaagcttttgaacatccggttaaccattctttgatacgtcgcaccagcattctttagtccgaagggcatggccaagtagcagtatacccccttatcggtcatgaagctagtacattcttgatctgcagtgtgcatcttaatctggttatagctggcgtaggcatccatgaaggacagtagcttgaatgcagaggtggcgtccaccatcttgtcaatctggggtaaatggaagcagccttttgggcaggctttgtttagatcggtaaagtctatgcacacccgtcacgtcccgttcagtttgggtactaataccggattggctagccactccgggtaatacacatctcggatcaagccattagctagtagtttgtccacttctttttctagagcttctgcctttactggatcaagggggcgccgcttctgttgtactggaggcatgtccggattgacgttgaggacatgggttattacatgaggacttatgccggtcatatgtccttggcaccacgcaaaaatatcggtggctgcccttagtgctttaactattttatctttctcctccggttctaggctttttcccagtcggaggatcttggta

SEQ ID NO: 85372 - DNA, 1134 bp, Cannabis sativa
ggagtctatttatgcataagtcaattactttgtatttttgagatctatctaatgaatcttatctctgggcgtgactccgtggactagtaacaatcttgaaaggattgttgaaaccacgtaaaaaaaaccttgcgtgtttttacttttctacaatgtttatttttttggtttcttctggagttacagagtttttttttctataactacggaaaaactattttcagtactagttttattattccgcatttaattaaataataaaactaggaatattaaaatacataatttcaatacaaagtactaaaatggtagcttattaaatgataactcattatttttgaaaataaacttgaaggttacccaaatgtattaatataatttaagtaattaattaattattaaagtgtatatgtgtaaattttaacgatactcaaaatttaaaatgtatttcaaatgatataatataaaagtaatattttttcataaaaaagtaacttatgtgtttcttataaacattataagtaactaaaaagttacttttaaaatgtaggaaaataaaaaaaaaaaaatagaaatttaggattagtttcattttagatatattagtttagaattaaggtatttttttaatgacatgacaagatattattgtaattgaaatttgttaagttatttttgtaattattttatattttacttatatttttttaaagatccctttaaaaattgatatggtaataatctgttaccatattgacccaattacccaaacaaagtaatatacaatctgattagaaaagaaaacatacaaatactaaaaggaaaaacaaatacagatatacacaaataaaggcataaaaaatgaacaaaaactaaaaatgagatttacaaattgatagggagaaaaaaaagcatttttcactctaaattttagaggcccacacaaatatgctcaagttccagtcttaatttgagattttcatacccttttatttatttatttatttttttttttcgagaatagattttcatatttttaaataaaaatattttgttgtctcaaataaataaataaataaactatagggaaattatcccatatactattcttttaacttttttttttttaaattt

SEQ ID NO: 85373 - DNA, 844 bp, Cannabis sativa
  modified_base (776)..(776): a, c, t, g, unknown or other
tctatagttttacaacaaaacttatcatttctctaagatctgacctactctgtctcattccggtgagcaaggtttgatcgtcgatcatcgcataaccattgacacatgaagtatctatttacatttcttattttcttttctacttcgcactttaagtttactgacttgaacgtcagagtgccttcggccagcgccaccccggtttcccaaggtgtcactatcatcctttctctttatagtgcaggttgtcggtgcccacaaacactcatttcgatcattgtagattttagcgtctacacaatttggcgccgacaccgtggggccctgagaaactgactgtgagcaagacgatctattattaccacacttcagatggtagaagaaggagagtttgttgcccaagaacaacccaatgtcaatgaacaatttgccacaataatggcccagatgcgcgagatggttgagcgaagtggagttatggagctagaaaatgcaaccattaaggaggacaacgcaacatttcagagtgaaaatgctgcaataaaatcacaaatggactcactgaaggctaccatgatgacttttggtgttgctcaaagtcagttatgagtaccaattacaccaatggcatcactagactcaactcctataagaacaaagacccaagtctctgattaacaaacactcggaagcttggaaggacatcgaccccaacgttaggaagtcattttgtcgtaggaggttctcaagctcaacaatctgaacatactgatatncaaacagatgggacaaactctggaggtctaacgaccaacaatgtggcctccgacctgcctacggtcag

SEQ ID NO: 85374 - DNA, 637 bp, Cannabis sativa
ggttcaagaagatcaatgcctaatctctgaccgacatgaaagcatcatcaaagcaacaagaaaagtgttcttcaaaataacacatgactactccatcttcaacctcttttcaaacttgaaaacaaaataaaaaaaatgcaaaccatttcacaggtccattatttgtagcagcaaaatcttacacagaaataaagtttgaatttcatatgagggagctagacaacttgaataggtgcataacaccgtatctagaaaaaattagccacaagaaatattcaagatatcattcaaaaacaacaggtaaaataataaaatttaataataaaaaaatatataatacaatgactgctattgaaaaagttttttttgtgttacttttgagttgcatatcagttgtataaaattaatgttactgataaaaaactatttaaactacatgtactcaactatgacttctaatataacgaaagcagttaactcagcaaatgtagcagccacagaaacaccagtcacaacattgtggagtgcttgcgcgcacaaatgcaagaataaacatacaataacagaaaagaagcataaaagtcactactacaaaaagtactatttgtgccgatcaacgcgtctcaccaaaatggtt

SEQ ID NO: 85375 - DNA, 505 bp, Cannabis sativa
tagcatatatttaatcaatctcttattttagtccttgtattattttacaatagagttgtaataaatcttgattttcttccattgttataaaatctctaacaactgcttgttagaggtgtattgaaggaaggttttatgggagtttgtgagtcgagggtatgtagcaaaagtattctgagcttttttttaaggccaagatcgggcatgtatatgtgtgaaagatcagtaatgaaaggatgatcttttatagggtgctgctatcatatcagaggttttggcataaacttgattacaaccattattaagaacatttgaagtaaaatggggttgagatggagtggtgttgtaaggatggttagaatacgaatgtgtgtggcattgatgatggtgtttgattagatcttttcgtcaaattttttgtacttattgtgagtatatttagcagttgtgtttgcattttctatgattgcttcattttcaatttttgttaaaggttattacaagt

SEQ ID NO: 85376 - DNA, 707 bp, Cannabis sativa
ttagcgctgctacttctgaccatcggcctattctcctcgacacgaagggtggtgttatttatagaaaaacgtagttcaagtacgaattaacgtggggaagagacctgaaatttttttgggtcattaaaaatgcctggaaggataagctccaccaaaatccaatggtcaaattctatcttaaactgaagaaaataagggatcagctatccaagtggaacaaagtccatttcaaaatgattggacaccaagtgagtgaagctagattttcactgcagcaactagaaaatagagacaatgtgaatgcagatgagctgactggagctagggacaaattgaatgaggctcttgccagagaagagattttctggaggcaaaagtcaagagttaaatggctgcaacagggagatagctgcactaaatttttcatggcaacaactgttatcagaagaagaagaaacttcattcaagagctatgaatggatgattgtacttgggaaagagatcctaaaaacattgctaaaatgttcattatgaaatttaacaacatcttcgtcgataagagaacgtctgttctccttacactgaaatgcctcgatggatgtcatatctcgccccaagataatgaacgtctgaaagctatccctacggagagggaaattgaaatgtgtattcgatatatggggcaagaaagagctcctgaacctgat

SEQ ID NO: 85377 - DNA, 1102 bp, Cannabis sativa
ttgcttaagattaagtaatcactagagataccataaaacaattcataaggaccgcaaaatttcttatcttatcctcataattctgataagttattactatccatgggctgggctttttagaataagtccaacgtactgtattatttgtaaacacctcattagagagaaaatggtaacttaatataacctctattactttataaatacacaacaaatccttcatgcaaagggttagaaatcttaactcacaagcttgagaagagaatagagaaaatatactcattgaattctttcggcttttctagcccaacagataataaaactgattcgtgggctaaggctctttaacgtcccaaccatgtaaaaactctgagtgttctcttctggtttgtttctaccgattaaatttttttagttcttatattaaataatttttttttcaaaaatctcgataaacatattcataaacagaaatattgcaggcttttcagggcataaaccctaacattggtatgataggaactcagtgtttttttggtgatatgcaatcgcgaatagaagttgttccagagctagcacgaaaccacctgtctgaattcaaagagcacgactttgctataaagaattcaaggagcacgctcagtggggactggggtcttcgtctccaaacatggtcggccaacaacctacacgatagagaccaccacattccgactcctttgctcttacgaccgatgcttcattggttgttgggcaaggatttgttgggttgggtggggtgatccaggacggagcaggggtggtttggatgtcttggggagaattttctagttaatgtggcacaactgcttgatattagaatgagtttaacttttacacatcaatttaggttcaccatctcattttttttttctaaattcacaatcttcattaataataatgattctattgagttaataatctacattcaaatgttattttttatattcttttatgttattttgcgatctgcaaatatcagtgtccatgctaacaacctctgaactaattttgaaaaacgtgtataaatagatacttgccctcaatttctgagttcttctct

SEQ ID NO: 85378 - DNA, 833 bp, Cannabis sativa
atgctaaagtactaatgtaagtttcattactgtaaaaaataaatcgatttttattatatgtttttgtgtagttttgattattctaatgtagttattttatagagaaataaaaagttagacgaaaatatttacggtctgaatttttttgaatattttgggtattttaggttataatttgttaatttgtactatggattgctagtccttgtgattagtagttgtgattatttctgtatagtttaaggctttgttggtgagttacatccagttaagaataatgataatggcaagtatgtggtgtacacacattaacatatgtattcacacctctaataaaagttttcaggatcatatcattactcagttcaagtcacttatgactttagtttgttttgggaatgtagcattaatagttttatttatgttgtgtgatatggcatataaaatgctcataggttccaacacgtttcttggagagtttctaaaagtaacccctataccatatccaaaacaagtattgagatatgaatgtggtttttatgtacattaatgacattgtgaaagcgggaagattcgagatgattctaaagaaaaggtaatttatatattcctttaattaatgtaaaatatctgtaactaatatactaatttataattaagtaatatataactaatttatattttaattttacagtttggaggaaagtcaaactacgatgaggacacaaatttgctacaacaccaacatcaatggttatcaaaattgaaacttattatgtaattttatttgtaaggataacaaatataccttaattttgttattttataattaa

SEQ ID NO: 85379 - DNA, 1889 bp, Cannabis sativa
cgaaactcaaagtgctttcctttgtcctttgtaaccgtctcatcacaaataacatcttgatggcttttgagttagtccatcatctcaaacataaaactcggggaaggaaaggttattcagctctcaagttagatatgagcaatgcatttgatcatgtcgaattgagctatattgaagcggtgatggccaagatgggatttgatggtcgctggatttctctcatcatgaaatgtctctcttcaacaagtttttctttctccttaaacggtgaaattattgggaatgttattccaagtagaggtcttcgacagggagatcccttatctccctatttatttctaatatgttcggaaggtctatctcgcttgctgaatcacgaagaatctttaggtaatcttcatggatttcgactcacacggcaagccccaccaattacacacttgttgtttgcggatgatagcctcttgttctgccatgcttctaactcttcggccttagctatctagtgtgttctacatatctacaaccgtgcatccggtcagctacttaacactcaaaagtcggttatgtctttctcaccaaacacaccaactgcaactcaataatttttcaagatacattgaacatgcctattagcgaatttcatgaaagatatcttgggctacccgcatattctggaagagataaaatagaaattgttcagtaccattaaagagcggatatggaaatcgcttaatgcttggaaggaaaagttgttttcaattggagggaaataggtccttttgaaggcggtggttcaatctagacccacatatgctatgagctgcttcagattaccacaaaagtttttatcaccaaattgagtcaatgatggctaatttttggtggggttcaaataaaaatggtaacaaaatacattggaaaagttggaatttgttgtgcaaatcaaattttaaaggtggtatgggtttccgttctttcgtacattttaatcaagcattattggctaaacaagcatggcgaatctttgaaatgcaaaactctcttcttagccgtttgcttaaatacagatacttctccaacacttcttttttggaatcaaacattggtcattccccttctcttacttggcaaggaatctgttggggccgagaattgttgctcaaaggccttcgatataaagttgagaatggtatgcaaattaatgctaggaaagcaccatgataccttgccatgttgatcacaaactagtctcttattcgggtccccccaacctgccagtttcatatttcataaaagagacgagagaatggaacttgactttgttggaagctcacttcaaggagattgatattgaaataatcctctcgattcctctaagcttttttttttttgcaggtgttgatagccttatatggcaccatacaactctggtgtatacacggttaaaagtggtttccactttggtactgatcttgaagatgttgataaggaatcttcatcgacctcccacaaagattggtggaaattattttggaatctcaaactaccttctaagatcaaaatttttgcgtggcgtgtaattcaaaattgtcttccggtggctgctgcactttttaagaaaaaggtactcacttctgcagcgtgctctttatgttcacaagcctgggaatcgattggtcatgctttgttccaatgcaaccatgccaaagctgtctggaggcacttcaatttcccaattgattttagcaaagcacgaaatatggttggtggagattatatttttcatcttacaacattactaagccagcaagaattggaattgttatttgtcatcatgtgggttatttggactgaccgaaacaaaattaatcatggtgaatcaaggc

SEQ ID NO: 85380 - DNA, 546 bp, Cannabis sativa
actagaaaaacactactcaatctgacttcttacaagatccagaataactagattggccaaaacagattgcgattcaataacaaataacaaatcacaatcatcccatatcaaaattgacttcattttcgtacagaagatttcacttttcacttacaagaatctaaaaacctcagttactacatttctaaaagcaatacctggagaataaaaggaggaagctccgggtcgatgaaattattggagaaaaagataaagcagatggactttattagatcaaaagcgaaagaagacaatgatgattatgatattttggagagtgagtcaaggctaacttgtcgaagagaagagaagacgatggagtggagactcaacctcaagctaatctttctatattagtagttaaacagacaatatgatattcaaacagaacagaacacaacattcatcacttcaaatcaagtttaactacataaataatacccataaatgtgtatatttatagagagagagagagttacctctggcaacgctaccccggcacttgca

SEQ ID NO: 85381 - DNA, 2500 bp, Cannabis sativa
ttttaaatattattttaaattaaatttgaatgttttgatagtttaactagatgaacattttcattaattccgaagataaattaaattacttgggttattattggtcacaatgcttgaggagagttctctagagttatattctctaagagttcaatcctcaagtgagtttttaaaatgagagtgggagttcgtgagaatgagttggagtcctttgcaattgatatcaccttaaaataggttttcatgtagaactctcttagatgagtatgaggtgaatgagctatgagaaggaagacattgaaatccccatgaacgagaaaaaacaccatggatcacccaaaggaatttcaacctgttgagcccacgggtgaagggacctcacgactactaagaaaaaaactcatgcctgacgacgaaggtcaagtccgtgatgctggaagttcatcgtcaccatctcatggtgtacgacaaaccactaatgttcatgaggtgttcatggaaaatgaggtgttgttccaatgtctagatgagactttcagactcaatagagagtggcaagagagatatgatgcccaagaggtcgcaataccacgacgacgtggagcccttgggcgtcttggtacggcgagaatgggatgacctcgtggggacctctcaacagccatcatgccaaaattcaagagaggtctaggtcaggaacgatggcgacccgaagttaggataccacccgtaataccgtaccacaacaaccttcccatgaaaatgatacccatggccggaggaatgagcatcctcagtaataacaaccccctcgggtagctaccccaagtcgtgagaacaaaagaaatgatgcacctcctcctgggcaacatcagattgagagggacactcacgaacctagaaacacgcaaaacaacgtccccctcctccacaacaaaattctcgcgaggagtgaggcacgacacacaacaacaccaatccaccttttcaaccatcttttgctcttaaggacattggtgtagatgaaggaggaaggggtcatggacaaaacccgtcatcaccaattagattccctcaatcaccaatatgtcatcccgagccactttttgctcatgctccaccaccacaacaaccaagtcagagacgtaggtcacaacctaaaggagcaccacaccagtacaccccccatgtcaagacttacctcgacctccttgggataggcaggagaattcatgggatagctacattcccccaaaacctcaacctaggggacatggatgggaaagttaacatgatgtctcccgagataactatgttcgcccaagactgataccaagcaaacatggacgcacccaacctctacctcaggaggatagttatttatcaaggtcctagactaccagcacccgagcatactgctcaacagggtgttgcacctcgtaacccccaacaacaaagaacagtaagctctttcgaagatagttaccattaaaaaataattatagtcacttttctaaactcaaaaaataagtaataaaagacactaattagaccttattatttagggggcataagggtatacataactatactcaaatgaaaaatcctataactatcattaacaaagatttttagaaaagtggtgatttttttaagaattcacaaactcttaaactacaagtcgtaatggatttaattatagtcacatgataaacacttaatctagaaagtgagtattaactccaaaagataactagtgtgtggagcatgttaatcaagggagctcaaagagcaaacttaccataacaactagttaactaagaaaatttagaaaaataaagtgtataaagtacttggaataatataactaaggaaattaaaacacaacctcgagcaaagattataactctgctagcacatcgaaatatagagcaaaaggctttaactatatttaagtatcaaactcgagtaagagactttattcaagtgtcaaattcgagtaggagaaacaactcaactcgaatatctaatgggatgagacatgtaactcaaactcatatagcaagggagtctccactctacgtgttaaactccatcttggaggtacataattcaagatgaaaggaagttgtgtccaagcatgatgctcaagcaattttaactcacatgaccaaacattttactcaagccagcatcaaggcaaaacgagagatagaggccctcatggccatacctcttcacctcggcctggaattagctagtcggttcgacacacccaaatcacgtcagccttcaagactgaataagttgctccacctcgacaacttcttggccaagccacgtcaagttcatgccaagatgctctgcaaaagggttaaagttttgccagttcacaattgtagtggcaaaagtttaacttttaccagcgtatttacgtgttgagaaaagtcatttttgccagcgctttttattttgcgccgacaaaagttctaataccaat

SEQ ID NO: 85382 - DNA, 3528 bp, Cannabis sativa
aacaatctcaatagttcaggagtaatttttaatagccagaaaagttcaaggggcatgatttggtacatgttaaagtttagggataaaaatcctaattagcctatttaatattttaatgggtaatttttatttttatgagttttgtggtaaaagtttacaaaaattcaattttttttaaggaaaaaaattattttatgaggaaaatttaaaaatttaaaagtatgaataaataatataatataaggtaactaattattctaaggaagtgacttgttaccttaaaaagtaactcgttacctcaaataatttttttttttccatattttttaatattattttgaattttggacatattttagtatgtattgtataaacacttataaaatgaacaatttatactattcttattggttgaccatttttaaacacagaataagattaaataatattataaaaaaaatagtaataagtgtgaaatgattttattgttaaattagtgagaaaataaattcacttttcgagtattattgattgatgattattaaataaattaaattataaattataattttaaaaatattaaaccatcaaattttgatccaataacaaataataaaaaagaatttttaattgggtgtttttttttttctataataggtattttaggcctaaattttatatttttagcttgataagaaaaactaaacaaaaaaaaaaggaaatctaaaagtttttttttaaaaaatacagacaacttcacctcctgaaccacatgaatctcttttcaagaataatatattaaataaacaagacattacttttaaatggtagactgaagtgggcctatatacatatactcttatatattttattttatttcatagctaaaaagagaatgaatcagatcaactatataacactatgtcagcacatgaactcatacttgcttaattgcactatatattgttctctctcattgatattggccattgaaacaactcaaaatgcacatatctaaagtggttaatattgaaaatgaggtcaatggatgaaacaactcaaatacaactgagatggcatctttactggtcttcaaggccaagaaccttatcccagcagtggaacagatgaccgtaacaggataatgttgaattagtgcagataatgttgtaggaactagactacaatcctgaaacaactcaaatacaattgaaataccaactaaaggaagattgtcaaccactttaaatcaaggatgacaaaagttccctatgatatccattgtgtgtaaacacattcaattacacagtaacaacaaaataacaatccttatagtagccacccaagcaatggctggaagtgaaaataactcatgactcaactgtgcagcaacttgacaacaacacaacaacaacaacaacaactaaataacttttatctgctccaaggaggggatcagtttcaaaagatgttatttttgttgatactgacactttaaaaacagaatcaatagcaaaacaacaagaaaaaaccaaaagtaaacactcgaagaagctaaatattgaagaatatacaattatttgttcatcaattgttttttatgtttttatatcgttgttaaatagttgttaatagttaaaaaacttattaacaactattgtctttatgtttttatattgttgttctactatgatttttttcttcaaatgaatgaactagaagcggagaacgattcaaacaagacaaattaaaaaaacaagttataaaccttggtaatatttttctttggaaggttcaacttttaaacaccatcagaggtcttatcacgcacctaaaaatattaagatgacaaaattaataaaataatgaaccgttaaaatacgattaatagttaaacgtaattgtaagtatattatgtattgaacaacataaaaataacaatataataattaaaaaataacgtaattgtaaatcttattaaacatgaaactaaaacaattttaattataaaactcaaatatagctaataaatgtaagacttaacccaatgatatagattttttaagaaccatataatagctaaattaaaactgaaaaacaactaattataaacagaaaaagtgagagacataaaccatttaaggttgaacaattcttcttactaaatatatcaaaaaaagatatataaacataacaaaataagtctttgaaaccaaacaaagacaacaaaaactatacattaattttttcacatcattatctcgcattttgcccttaaagactctccaatggatgacttggtgaaacaacaacaacaaaataaattaaaagatgaaacaactataaaacaactaaggattagaaatgagttagatgtgatttgtattacgttgtgaaaaaatgcttgaataaatattatttaaaaaaagcatacttttaaatagtatcatttctttcattattattattttgaataaaaataataaaaaaaatagacttttagattgttcttttttggcaactaaataacaacaacaaactaaaaaaaaagttactggacaacaacaatatttcaatagatacgaaaatcaaaatataaatcaatacattagtttttttgatatttgaaaatactcaaaagaaaaaaaaaacaatcttaatatgtgtacgatgaaaactaaacttatacattatatatatatatatatattaattttcttctaattaattgaacaactaaataataacaaataaacaactgtatgacaactctgttgtaacatgtaaattaaatagacatcataaaacaaccccattaattgcatcaactccaacaagaaataaaaaaccagtaatctataaaataaatttaaaagtaactacaaaatatttgtatattaactcaaaaatatatgtacgcataaaaaactgaacataactcaaaaatacttttttttttaattgttgttaaataacttaaaaataaataaataaacaactcgataacaaccacactttaacgtaaaaatagattaggcatcaacaaattgcgacaacttaaaaaacatataaataatctcaaaaaaataaaacaaacttaaaagtaattacgaattatttgtacatcaactcaaaaatatatgtacttgaaatattaaacatatactcttttagtacaatttgatttaatattttacattggtaatattttttattcacttgaatttctagcgattaggagccatagggtagttaaaagttgtgttgagtgttaaaaatacgtatctatatgtgtaaaattaattctatttaaattttaataaaattattgtgatatatttttctctaaaatatttttgtaagaataaataattttgtggcacacttgaaaaataattagaaaaagagcaaatattattttttaagagtaaaataaaaagacattttaagggaaaaaaaaaagaataaaatctcaaactaaaagtgtaatatcccagaaaataaataatatttaaatggacatatttt

SEQ ID NO: 85383 - DNA, 785 bp, Cannabis sativa
atataacatttctttagcttttttatcaaaattatttatatttttattgaaattttaagatatatgatttataaatataaataagtttaatttttttttttaaaaaaaaagtcttagtttgcttaaaatatttatttgattttcaatattttttgtgtgattttttcagataaatgtttataaataaaataaagtttgaaaatatattttttaggaataatttaggttttcttaaataaatttaatattttttaactaatttaatattttggtcaagttttttaataacttttattattaactcatgattaatggaacattataaatatttaaaattaatatttttaataaaggagggcaaaattttgtaggtcacaaattaggggataaaaaaaattattttttaacgtaaaagaaaagaaatctaacaaaaaatgcataattatgtaattgttatagtttaatgagaatttttaacaaattttgtagttgaaagtttgggggaaaaaaatactaattattgttcattttacaacaaaaagtatattaataaaacaaaaatcctaaacaaaaaatgatgttccaaaagaaaaaatatgatattcatcaaacaaaaaaactttgatacattcatataaataatttacggtttaaataacatataaataaaattttaataaagtatatataaatatgtattattttgtataaattataatccattttttttccaaattatacaaaaggggaagatatacatgagtttatataatatataaataaaa

SEQ ID NO: 85384 - DNA, 674 bp, Cannabis sativa
tgcattgtagaattttctaataatatttatgttatatttctagaactctatatgtattcacattattttttaaaaaaaaaaataaaatttaatgacatacaccaataccatatgtcaaatttaggtattattactattaaaaattaaattaagtatttatttgaaactgtcaattaaacttaagtatttataccacaaattattttttttaactttaaagtagtttggtacaatttaatatcaggactcacactttttttagagaccactttatttgatgagaaaagaatatactgaaagataaggtggctgtttcatccaataaaactcattattcatcttaaaggcatacttagagcatctctaatgatagtatctgaaaaatatttaatgagaaaaaaaatttaggtgttaaaatataaggatgttataccatttgaaataaaagaatgttattcttaagatttgtatgatatgctatattttctaaaaaaaaaaaactaaaagtgagcataatagtttaataaagaaaaagatttatatatatataataatatgtgacatcataattataatatttttaaaatgtattatattatttacactatgtttggtaggagggagagatgggtggataagaaggggtggagggagggagagtgatggaatgagag

SEQ ID NO: 85385 - DNA, 587 bp, Cannabis sativa
tgaagagtcaaataactcaaaagtttagatccatacaaactatatatataaggcagcatcaccaagtatcagtgactacaaaatagtagaaatttacaaaggaatataaaaataattagttcaaaaccaagcaatacaattgaagaacttctaagtttctaacatttataccaaaatagaacacaaaataggataaaaataatcggtggcatttaaataaggatgtaaagtttatcaatagacaaaaaaatatagatggaagtacgttctaaataacattaaaactctagctttccaaacagagagaggaaagcactaatataatatagtttaaggtcaaaaccaaatggaattaggtgaattaatcatttttttttaaatctagtatggaatatcactgatgctaccagcttcatgttttcaactttcagcagggagtatttaccgtatttattttgcattagaatattttcaataattagatagtgtagatactcataatgattcaagttaaactattttgaatttatttttagtaaatactttgcttagttttttctttacaattttgagttgatacaagtatg

SEQ ID NO: 85386 - DNA, 763 bp, Cannabis sativa
tgatatattttaggggtatttttaactacacttataaattaaggggcatcatagtatagtgtcataagtacagggactaaaaaagctaattattctatttatatatataactgaattgatgttacatgtaatacatgtataattagttttttttttaattaagtttaattaaacgatgttaagtgcaatatatgtatgctcaatgtttttaattaggtaatatatttttatttttcaatttttaaaatatagagtttgagattttgatctttgaaattatttttagctattgcaactacattgatgtgctgtttagatgtgattatatatacgtattttatatatacagtaaaagaataaattttattgttatacgtgttttatattgatctctctatatataaggattatattataaaatattttgataaaatttgagttttaaaaaataatgatagtaatagatacaatattcttaatttgtagttaggagagtggttataataaagtgtacaaattattagaaatatatatatatcattaattattctaaaacaaaaggtttgtcgtgaaattaaggtttaaatatatatattttatgtatagatgttgttatatagatgtaatttttattcttaaatatatatataattattttttttatataaaatatttacataatttttatttttaaaacttaaccttaacgtagaaaaaaaaaaaaaaaaaaaaccttcgttaaattaagaattatgttatatag

SEQ ID NO: 85387 - DNA, 678 bp, Cannabis sativa
atttctttctttcttccaacagaatagcccctgaaaaagagtatacttgatttttccttgttgcttagttggccagaccattgctcatacttttgaatgcatttactgatgcactcagccgctttcttgcttgcacgggcaaagatcatagtgtcatccgcgaacataagatgagaaattggagtagcaccacgggcaatagatatacctttaatctccccattgttttccgccctcactaataatctagagaagacatcatggcatagcaggaataagaaaggagagatcagatctccctgcctcaaaccccttgacggtttgcatctcttaagcggtttaccattaagcaacaccgcataagacgtgctagtaacacacagcatgatccttttgattacctcacccgagaaaccatgagcatggagaactgtcttgagaaaacgtcattcgatccgatcatacgctttatgcatgtccattttgatggccatgagcccccctttactcttgttttttctaacaatactcaccacttcttggcccaaaagagtagcatcaacaatccatcttccaggaatgaaagcggattgaaacagagatatcactttatccataatcgttctcagcctttgcgacataattctggtgatgatctttaggacaaaattgcacaag

SEQ ID NO: 85388 - DNA, 1176 bp, Cannabis sativa
tatatatgcacgcttatttaaaaatatatatctttatatattaaaagtgcctatctaacggtaatttttggtttaacgatgttgttttgtttccttcgttaactttaacagaatatgcccaattaatttaaatatttttttaacaaaaatttattcaaaaaaacacacattccgttaacataacattattttattaaaaaaaatacacattccgttaacatctcaaaaataaccaattatgctaaaaattaggagaagagaatgaaacaaattgctagacttattagttaaagataaagataaaagggtgaaccaatcatacataattatgacttttcagaattatcttcttcttttttcttatatatatatatatatatagaataattctatggtaggcacacctgttttgttcatatagtataaggacagttttttgaccagtgatatatatgactttttactgtgcatattattagatatatagttgtgtgtacctgattaaaaggatcgattttttttttttctaaaaacaaaagaaaaaaaattagacagtgcaatgctctctcatttcagaacgttgttttatttctctttctttctttctctctttaaaactcatcattctctctcttctgattgcacagttgcctttttctaatagctgtactttgagaaaaaaaggaccattgttataaaatcaaaatcaaaataatatttttgtgaaaatatagatctattccattgttatcctttagagcagatctattccacctattttcaaaataatccctaccattatcaatctttgagtactttaatagttgagcttgaatctattccacctccataataacaacactttcatgcctattttctcccaaataaaaatagataaaacaatttgaactcattcaatatcaccctaattttttttatattatttagaaaagattaacctactattatttttccccttgtaatcagattgtctctgcactcaattgaaggtcagcccattttctttatttctaccattggaaaatttgccatgtccagtggcagagctcagctcacaatctttcagcacatgcatccatcgccctttgtctccggtggtgctcatatcattccacgatttagcttggctttcatcccacaatttaaagagcatgg

SEQ ID NO: 85389 - DNA, 745 bp, Cannabis sativa
cttatgagctcgttcaggccggccagcatcagacttcctcttcttcgccgccacggacttaggagaaaagtcctcagggtaaagcccatacttaaccagattattattggaggtcaactggatgatattcctatcttcctccggcaaccggacaacttttggagctctctccctaagagcaagggtgaggggaggacggtgatatgtcagaatctgctgaaaccgagtccgggtgatgctcgaatccttcaccatgaagtactcatcaacaaaattccctattttgttgatggccttgtcgtttgtgccgctcaaccatttgaagcctggctgagagaagtagaagtacccgaacctgccttgctttggagtagacttcaagtcgaagaaccaggggacctcatagggagaaggagcatcccatccttgggaagcgtagaggacaaagagagcggacaaatacttgatcccctttggagtaatttttgtcgggcagaggccaaagaagtctgccacatccctgaagtacttgtgcaagggcatcagcgccccttgctggccgtgagcccccgactaggcgcacattcccttatcagaatttggggcacgaatgtcgtgggtgggaatatagcagtctagctcgcccagatacccgtcatggtcgagagttcggaggcgtgcctccaaaatcttggacggaggacctacccacctggcgcccaaggcaccctccctcctatgagga

SEQ ID NO: 85390 - DNA, 767 bp, Cannabis sativa
aataaaaaattcttataaaaatatgtagatagatagatttgtttaacatataatataatattagatgaaaataaaatatgacatgttgcgtataaatatgggattatttcgtcgaggttatatgagatatttaaatacatatttttgtaaattcttttataaatcaaaaatagatttataacttatgaaccattaaaataaatttataacttatgaatccaatttgatgatatgtaattaaaagaatagttacatttgggagttatgaaagcatgtggaggaagtttctagttgttagaaactaatgaaataaacatttaattcacatgagaacgttggaagtcgagttatctcgttgaggagattcaaaactccaaattggagctgaagaaatagtttaggtgacatgtcacctaaacctacatgtggggtttttcgacatatttttaatgtatctcgaaagttcaaatatttttctccggatgacctagcacctggagcctaatgggacaaaacattgcaaaacgttttgaatttgatgaggatgttttagcatcaatgagcaatgttcttatctccatttatggcaaaagaagctatcataacccatttaagttgggcaagcctctttctagggttccatactttgggacttcatgttcataatgatgtcatgtttgcttttggtactccgaaaaaattaatcttgatcgaacctatatttccccaatggatgcaatctactcatggtaaaacttcatatgggt

SEQ ID NO: 85391 - DNA, 1156 bp, Cannabis sativa
ttcttggtaaaatatttccaacaggggaggcttccatgaaatgatgagtaatgaatgttttattctctttcctagggcacattaaatgcaaaaccttttgagtccccaaccgtcgaatgtagtaattttttgactgatataatcgggaccgtctattgcaaaatgctttgaactattgccactcatataaatgggagacttggtgaatgggctcactttttcttcctcaccttaagcaatgatccttaacccagagaatttcttaagaagaaacctctaacaaagaaaatacctttgccctcacacacttttctgaacgagattcttcctctccttctccaaaacatactgatattttctagcgtccgatatccattcaaacaacaagttttctattggtgcacggcgtgaccagatcatcgcatgacctgttgaacttcaaatgtcaactagcaaccagcattttcccttcaatccatctacaagtaagcacttattcaactcaaactattatttcttgctttgattgtgaaatattttctcgagcttgtagtaatttattattgtgcatgcgtaggatttaggtttaaaaattagggttactatatgtgaaattggtttgcatgaatttcggggtaatacctttcgggctagggctctactgaggtattttccctttagtttgggtcgagatgaatgtccgttatttggaatgttttagttcaggtgattagatcgatcatttctggttttaaactagttttgggataatttccctttgcttatcaatatatatatatatatatttatttttattttttgaaagggaaagttttggcttctttgccagtgtcgtgttttttggttcccgattcattaccataacaggttacttcatgaagatgaccttgtaggtgatgagtccagaggggacctctccaagcagtttaaggggaggccttccccaataccctatttgtcatttggatatgggatattcattgcttgggttttctttccatttttatagtgtttggtgaagacaatgatttctagttggcacttgtgaatcttgaagaggttcctggagcatcttcagtggatgcaccttctgtacatttagatcctaaagacccagctgttgggattttatgcc

SEQ ID NO: 85392 - DNA, 1895 bp, Cannabis sativa
aaaaatcagttgctcaaaatatactaggatgtcatacctgaattgtcacaaagcattatgaaagggatgcatttagaacatttcaacgagaaaggactactaaaattaaacagtttggacaagaagtcatacaaataaagtattcaagccaatctgtcaaatagggagcaagtagagggagagatgcatggccttcaagaattttggatcaatttttggtagcaacttcaatggcagcattgcaaaaagcttgcacatactcattaagattcctaaaaatcatgaatatatgaaaagaacaaaggaatcaacatatgaacattaactaataagtgtatgtcaattagtgagaaaaatcaaaatatatctattaatatagacctaattggctgcaaatatacacaataaaaataaacatgtggtggttgaatattttacatacatgtgctaaatctgaggccttccaacaatcaaatagcaaagagagcaatatgaacatttaccttttgaatttctccgagtacaacaacaaggacgttgtgttcagggtcccataatgtgataaccgtttctgccgcaactgccaaaacagagccaccatcagtagaaaatgcagcagctatcattgccttctttctacaaatgaccaaataaaactaaaaccttaagactaaataaagcgatagaactgaatatatttttcaataatttacttcagtctacaatacagaggacacaatgacagaattaacaataccttttttgccgcaactgccaaaatagagccatcagcaaaaaatgtagcaaatgtcattggcttttttagcattattttcttgaactatgtatataaatagaggataatcaacactgcatggttccttgcatacgcataaaaaactacaaattagatatgagtacttcatgatctttctattgaattttaaacataccatatactacttaatgacattaaacaaaatcaacttctttagcattttatcaagcacccagaatgcatcacatagaagcaacttttaagttgaagctcaaatcattcagagaaagaacttaaatataaaaatctctatcaatatctgtagtgttctcaccaattgatagtacttaagaactcatagactcatagagtattttaactattgacaaaatttacttttgcacacttaacaacaatttgacatggactatacaaccagagataaataatattaaatgtatttaaaataaaaactaattattaaataaaaatcatatatgtttaattacctcattcttcaaaaaagttacaagattgtactaagtcatgaagcttttaataatcttcatgatatccacactatacatcgttcggttgtcctcgacacttgtattgcctgatctttacctcaatttctattttggatattttttttttgaatcttgtaggtttccaaaacactacagcaaagagaagttacttagtgaccaaattagtaacaaaaatgaaattaatgaaaaaataatagaacatgtgacaataaataaaatcatataaataaaagaatctcaaactttctcgtaaatttgatcaaatcccctaaattctagaatgcattaaccattctaggcaatggtcaaaacctaaatgaacatttgatcaaatcccctaaattctagatagtaatttaaaatttaaccacataacactactaatataaataaaagaatctcgaactttctcgtaaaaagaaagctaaaattgataatgaagttaaataagattaatgcaattgaatattgaaatcttcgaaataaagaaaaaaacacaggtactaaaaaggtccttaattatttgtatggtacaaaatattgtgatatataactgcatttgttac

SEQ ID NO: 85393 - DNA, 1349 bp, Cannabis sativa
  modified_base (63)..(68): a, c, t, g, unknown or other
ataaaattttgttattaaaaaataattattatgaaaattaattatattttaaaaataataaannnnnntattataatttttaattgttttatataggtaatttatatatatttaactaaaattaatagtataaaatgaaaaatctaaaaaaaagatgtatttttttattaataattgtagattttaattatttttataatacgtaataatactatatatcttcaacaaaaattaatgatttaaaataaaaatccaaaaaatatattttttatttgttaaaatactttaaggatatttttttttaattttaaatatttgagaaagattaaaaagtataaaaatatatgtaaacaaataatatcaatcacccacatattttgatcactaattggagaatattatgtttatcaatcacccacatataaaataaataatactaattttgaataaataatattaaaatatatattctataagttaacattcacaatagtcgactaaaaatatatatgaaaaatatatagttgaggaatattattattcttaattattattattttattttatttttttggaaaagagaagccttattatactaacttttaattcatttttttttttaaaaaaaaatataactaatttggtaagattaagttcatcaatcacccaaattaaattatactaactttgtgacaaactaaaacaaaagaatattgatttatttaatgtaaaagtatatcacccacaataatctctaaaccatgtgggacttttgtgaagtgactctcatattagtaaaagcatacaaaaatgtggaaaaattagaaaataaagatatgttcaacaaaaattaataatataaaattaaaaaatctaaaattatatattatttttatttgttaaaaaactcaaggttttttttttaaaaaaaaatttaaatatttgacaaaaattaaaaagtgtaaatatatgtgaaaataaatactattaactttggaacaaataaaatatatatcacctataaatttaacctatagtttcaattatttaatacattaaaataaagaattataacaaaaaaatgctttttataggaaaaaatatttaaatgatttttataattatttttaaacttgataaagattgaaaaatataaaaatataatttgcactcaacttaaaaaatatataattaattcgggtaaaaaattgtttataatcacccacatagaaaataaattatgataactttgtgacaaataaaaataaaagaatattgatctatttaatgtaaaattatatcaaccacaatagtttctaaaccatgtgggacttttgtgaaatgactct

SEQ ID NO: 85394 - DNA, 1394 bp, Cannabis sativa
tccaaattacatccaaattatttgttaattctcaaattaaacttaagcggtcattacaattatccggccgttaaaaggatttcatcctcaaaatctaacccgaataactatggacattgagccttcatgtctgactccaactcccaggaggcttcctccaccttactattcttccagagtacctttacaaaagctatggtcttatttcgaaggacttcatcctttttatccaaaatctgtacttgtttctcttcataagataaatctggctggaattctaggttttcataatttagcacatgagtgggatccgaaacgtagtttcatgacatagaaacatgaaatatgttatggacttctgaaagtgctgaaggcaaggatagacagcaaagtactaatctaacctttttaaggatttcgaaaggcctgtcaacctagggcataacttgcccttttttgcaaaatgtttaattcccttcattggagacactcataggaatacgtgatctctatagcatcgttggttccttgcactgatctgcataactcttttgcctactctgagaggcaagccttctggctttaatcttttctatagcctcattagtttgttgtactaattctaggcctaaatattacctttctctagcttcatcccattgaattggagatttgcacttcctgccatacagcatctcatagggagccatccctatagtactctcatagctgttgttgtatgaaaattttatcaatgctgagaacttcctccaggagccttcaaaatctatcacataggctcggaacatatcctcaagtatatgaattatcctctcggtcttccgtcagtctaaggatggatagttgtactaaattaagcttagtacccatggctcgatggagaatttgccaaaattttaaggtaaacttccgatctttatctaatataatggactttggagccccatgtaactcactatttctttaacatataagtccgcatactgtcagagcgttggttagtacaaagggcataacttatagtgcccatacctagtgcagaaagtagtgtttggaatgtcctcctctcagattctcaactgatgatagcccaatcagagatcaatctcaaagaagattgtcttcccttaaagttgatcgaataagtcgtcgatcctaggtaatagatacttgttcttgatagtcagtttgtttagttcccgatagttaatgcacatgcgtaaagatctatctttcttcttaatgaacaacactggagctccccaaggtgacacattaggtcgtgaaaaccctaaatcaagcattccctgaagttgaatcttcaattatttaaattctaccggagccatctattattgggttttgtgccctaa

SEQ ID NO: 85395 - DNA, 551 bp, Cannabis sativa
  modified_base (504)..(517): a, c, t, g, unknown or other
gaagaagattagaatgccacttaagatgttttgtgctttcctttatattatatattgattattcattgctctaaacatattttattagttgttttaggattaaataattatttttacatgtggatatgtgtatattttaatattttattttttaaatgattaaaatatattagtatttgtgatgtattttaaagaaggtgatttattggtgtaatataaaagtttgatgttaaataaaaaagtgatatttttagtgatgtatttttttgaataaatcatgcaattttatcaataacaatcagttaaaataatagtttgcaatctatcgtggatattgacccacatagaataaatggtagagaattgagccatatataagagcatggactactccactcattgacaattagttttgagatggaacctcataattctcaacatggtatcaaagccatatcccttgcgagcaattgcttctatcccatctgttggaattattttacnnnnnnnnnnnnnntactcacaagtatgttatttaacaacctaaatat

SEQ ID NO: 85396 - DNA, 518 bp, Cannabis sativa
aagagtgttatgggcctatcggatcaccccaagaacctcaaccggccactcaccattctcaatggcgtacggttgtgaggctatggtcccggtggaaacattattcccatcccataggaggacaacttatgatccagtaacaaacaaagctttattacaagaacactggataaaattgacaaactccgggatgagtctcaactacggatggcagcttatcaaaagaaggtggctaaacacttcaactacaaggtcaaagacgggaaatttactatcggtgatctagtcttaagaaaggtcttcccagccactccggaacccgaagtgggggtacttggaccaaattgggaaggaccatatgaaattgaggatgaaatcagctccaggacttataagataaaatgaatggacagaaccatggtgcctagggcctaaattgccgatcacctccgaccattagtcgaaaaataaagtttatgtcctgtaaaggaaacttgtaccggacaaatatatgcaac

SEQ ID NO: 85397 - DNA, 534 bp, Cannabis sativa
gtaaccgctaaaccaaaagggtaacgttttatctattatataataccgtctatataacaataattggtttgagaacagcatataaggctcttaattcctttctcaggtctgcttatattacatttgctagcaaagagtctgttgacaaagcagtggcgctcggtggaacgacatttctctcaaggacaattcaggtatacaagtgtttgttttttaatacctttttcggctcgtgcaaaatcaatagcttagttgtaagattttaatgtaggtgttaagaatgacagacacaacattaggaccaatccatcccgggaagtcttcaaaagtttcgacgctgttacctaacggcaacagtgtgactgtccctgtccaagtccccaccaaaccatattattcgagccatcatctacaatggcgaagagagaataatacttaactatacagatgacaataaaacatttagatttgattttgttaaccatactctgcagcattaccatttggattagtttgatttgttaagtttagctt

SEQ ID NO: 85398 - DNA, 1228 bp, Cannabis sativa
aaaaaacagtatatgagataatttccctaaaatttattataaatattttcttacaaaaattattggaaaattttaccatgcactccactaatgcacccaaatctgttttggtatccgaaataatatttttcgtcaaattttttctcgtagtcatgtactttatagtttttaagatatcttacaaaatcttaaaaaaatttaaaaacgctaaaaataaagttcaaacaatatattgcacgcatataaaaatagattgtttgaacattattttttatattgtaaattattataaatttattaaaattttataaaatatcttaaataattactatgtaagtaaacataaaaaaaaaaaattaaataccaaaaataaataaagaatttatcagtatattttttaaaagatacattataaaagcactcataattattataatagatatttgtacaatatcttattgtgtgtaagtaacaaatgtcttgttgtcaaatataacaatagaatctcagcttattgcggatcggatgtactatgagcaaaatagtgcggattgaattaaatgaacacccctatattttatcatttaacaaaacagaaggtccagttaataatttttgtaaaatatatggtttaaaatggtatttacccattacttaatactaacttattttattttattttttattaacaatattttattttattaatatattttgtttatttataaaatattaattaagattaattttatttttaaattaattttaattacaattaccaattagttttataaaaaattttaattttaaattaaaaaaaattattttattttaagtatatagttaattataattaatttaatttaaaaatataatttttttttaataatctgttagcaactttgttatgacaggtaataaaaatagagcctagcattagtattaggtacagtgctactttgacgctttgcaaatagttagtaatattctataaaagttattaagttaaattgtgtaaaacttaaaatttaattgtactaataacaatatgataccttaagcagtattagacatcaatgatactgttaacatttttaaatataattttcatatttttaatataaccatagaactttgcaaccttccaacttcctccatacttcttttaccactcttttctatttatcattgatactgtattattaatgtaagaattaatttcctttag

SEQ ID NO: 85399 - DNA, 513 bp, Cannabis sativa
ttagtgcttagagatatgagaaataagctttttgacaagatattatgctttgttaaagtcatatatagtaattcccactaatttacacttaaaattgagagtgagtacatatatatatatatttttctcctcttatacatatatatgttttagattaattatatatttatatatttagtgccttcttcttctatttttttttttttatataaatatataaatatataaatataaataaatatatatatatatatagtgtagtgttgttgtaacatttagttaactcttgttgtttttgtattatatttacaataaaattataatacatcttaattttcttctattatctctaccggataatcgagaagaagcaaatttgccaccactccataattgagaatgaatatatgctgccattaaagagactattcgagagtagggtgaggaaactaggaaactgggagggcatcattaaatgacctgcattattattatggctaattaggattttgc

SEQ ID NO: 85400 - DNA, 504 bp, Cannabis sativa
  modified_base (344)..(370): a, c, t, g, unknown or other
attttatattttagattcaatctgattcgcgtaacagtttaaatccaatctaatccaattcgcaatagtacggattagatcagttatttttttttaacgataaattatttaatatttcatagaaaaaaattaaaaaaagactattattttttaatctccaataataatctattttcatctctatttatatacaaatcaaattaatatacatatatctactcatctttagatttacactaaattgtatatgtatccattattaaaataaataaacaagtataaatacatatttaaatttagggttaatttcacaaatgctcaaaaacaacaaaaatacggtttcnnnnnnnnnnnnnnnnnnnnnnnnnnnttttaattttatttacataaaatacagtccttttatgtggaaattttattcatttgttgttaattttttgttatttgtatgttattttttattcttattttgatgttattttcatgttactttaatgttgtttt

SEQ ID NO: 85401 - DNA, 517 bp, Cannabis sativa
ttaattcactaatattattttattgttcatttaaattaatcaattaaaattttattaattttcataaataaataatatttttttattttaaccataaaaatagaattagaagttatgtaatcgcaaccatcctgtgataataaacattctccttacaaaatctttatcccaaaaagttctcgattttataagtatgcttttctctttattagcactcacccaacctatatcaaatgcaactaaggtttctaaactttttatttcaaatgtcattttgccgagctctgttttgcagaagcacaaaaagcttcctaggaataatttttctaatttgtaggttattttatttacccattttcttgcatagttagtagtactaattggtaaaaaaaattgcatgaagaaaaagaaaaaccacttttgagcttgttgtattggtcttaagatctgctttataaatgtaacttatttcgcaggttatgaatatcatagaaatcaagattatcgatccactttt

SEQ ID NO: 85402 - DNA, 862 bp, Cannabis sativa
tttaccgaaaactgaaaatgacgaagaatcaccttcagaaatggaataaggcccaatttcggaatgttcgtcagcaagttgaggaagctaaggcttctctggggcaattggaggctaaggatattattcaggaggaagtcctaggggatgcaagggcgaatcttagggaggctcttactagagaggagattttctggaaacagaaatctcgtgtggcttggcttaaacatggggacagctgcacaaaatttttcatggcttcaacagcgatcaggcgtagacggaattacatccaaactgtgaaaactgagagcggggaatgggtcactgacatgaagacaattgtgcagttattcatttcaaagtttgagcacactttcacccgtcacacatctccttcggctatggggaaattttttctatgtaatcccattatagaagaagaaactaacgatatgctgatccaagtcccaacggaatccgaagtccttaattgcctcaaatctatgggacatgataaagcaccgggcccggatggtatgtcggtggggttctatcttcaacattggagcgtgatcaaacgggactttgtgaacatggttacctatttcttcaggactgcggatctaccctcgtttatcaacaacacaaacctggtacttatcccgaagaaggactgcccttctaatgttagtgactacaggcccattgctctttgtaatgttgcctacaagtgcatttctaagctcttggcgctgcgtttgaagacccttttgccttccatcatctccccggctcagtcggcctttactcatgggcgttttattgcggaaaatacagctgtggctagagaaattgttca

SEQ ID NO: 85403 - DNA, 703 bp, Cannabis sativa
tcaaattacttgtactactaatatagtaatgagttatattaaaaaactcgtattaatttatgaatgtgtgtatataatacgtaaatatatcaaattataataaagtaaaacattgaataattgagactttaaataaaaaagataagtaaaactaatttaataaaattgtatattaaatatgtacaaaaaaaaaattataatacatatgtatagtgtataatatatatgttcggtcggttctcggtttaatcaatcggtttgccattgacactaaaactgaccgtgcaaagacagttttaaccaaagacagttttttcggttttcaattttttcggtgttggtttttttgatgttcggacggtcggtgtactcagttttgtcagtttcttagattttttgctcacccctactagatgactatgtcttcttaaaacttacccttataaaaggtgtgagaagatttggagttaaggataagttagccccagatatgttagacctttccaggttattgagagagttggggaggtcacttatcaattaaagttatcagtgttgtaaggacatgtttataatgtgttttatgtgtttatgttgaggaaatattgtaacagtcagtagtcccgtgatccgtaaggagaaataccgggtaagctgtacaatcccacaccgcctagggtaggtcaagtgtgatgattctgag

SEQ ID NO: 85404 - DNA, 1025 bp, Cannabis sativa
tttcagtatcctcctcacatactacacacttggcctcttcacatatgtcaaacctgtatatcaattctttcgtttgtagtttattcagcataagaatccaaaacatgaatctatgcttaagtatgctccacctttcccaaacttttctttgctaagttacagtaggcagactcgagcttagcttcttcttgtatccatttgcaatatgataattagaagcaataaagtcttgttaatgcatttaacaagaactattttcttccaatatcaacttgctgttgagggaaatttatagtcccaccaattcgaatctcccaagtatacttcatgaatctattttacccaaaaattgtcctgctccgtagctattccccagatacactttcctaaggtagctatgttccataaaacatatcaaactcattgttgcaaaattccaggccattgtctgtccttaaatttttaatccttctgttagtaagattttcaacaagtgtttttcaatgtttaaacctttgaaaagtatcatttttattcttaagtaaaaagatccatactttcctagaaaaatcatcaactatagacataaaataagtgttacctccatgagttggtgtcttttcagggccccataaatctgaatgtatataatccaatatacctttagatttatgtgtccctgttttgaacttcagtctatgatgttttccaagtatgcaatgctcacaaaattccaccttgttgattttatctttacctagcagttgttgttcattaacaattgcaatccattttctgctatgtgtccaagtctgttgtgccatagtatagctttagcatcttctggactttgcaagatagtgttttgtccaacagtgttgttacttctaactataggttctcctatcatgtagtatagacgtttctttttcactcctttgattatagtcatagatcctttgcatattttcatttgtccatctttgattttgctttctattttcaaatcatcaagcacacttagt

SEQ ID NO: 85405 - DNA, 517 bp, Cannabis sativa
aatctctttattgtaattatggaaacatactaaattcccattttatttgttatcgattaagggaaactattcttcatgtaattaacttctataaatagtggtttaacctcactattcaggaacatgaaattattcagagagaaaacgctgaagagtgaaacctcgatctaagagtgaattactcatagattattgtaagagatttcgagagcaattagagcattcttgctcactcctctcacaagtcaatagaactaaaaggggagtaggctaataccaaacataaggggtcaaatctctataaatctggtgttttccttactttatgctctttgatttctattatttatttattcttatcgctttaattaagactcactgtcattggccaaaagcgagatcaacactgatttttttgtggcaaagctatctaattctcacttttgttatgttatttacccttctgttagtaaatttctactaatgctaaggaggattatctatgtgtacccaagtg

SEQ ID NO: 85406 - DNA, 961 bp, Cannabis sativa
aatatatatttttatttttttaatgtggatatatattttaactctttttttttaatggaaatatgatattttaattttaataaaatgaagattcagccaatacaatgtctaacaactccaacgtgaagtcgttaaaatgaaaaacacaatctaacaaataataagcactacttgcaagaaaatgcactctcttattagctgaacatttgacaacattaaaattgacattactcaactcaagttggagatttatgaactctcacaccagaagtccacattcaaaaggcatttgaataatttgtaatcaatattttgtaattggtgtaattaatattattatttttattattttttattttgacatagtgattaaaatcattcatgataaatttaggatgtagatattctcaatcagagcatgaccttccttgaaccacgatagctcatcgtcaaactaaaaaatatgctttgtcaaaccatgggctactaaattcttaagcgaaccacatgtgacaaaactgcttccaaaaaatttagacaataaagctataacgttttcaaacatcacacccaacacattaaaaaatgcatgcccaaagagatcaatataactacaccaactttgattccaaaaggtacttgtcttgactcaatgttagatttttgaccaaagtttgttgcaatattatttgcaaaattgcaataagctgctatttttagcttatgaatcgggttattttcagagttaatttgtcttcttttcaattattttttggaatgagattatgcttgttttctttgatttcaggtttcaatacttgaaatgtgaaaattgatcaaatatcgagaatatggtgtggaactaaatcgaaacacgaaaacaacgtttttgggtgtcaggcgccctacacttgcgctacggcaaaaattacaccatggaggcaccacgatgtgcattcta

SEQ ID NO: 85407 - DNA, 1179 bp, Cannabis sativa
ttgaatggtcacccttcaatctacctctgttgaaatggttcagtgagtggatagtgaatcaaaaggcggccaaagatgaaaaaatgagacaattgctaaagaattagagacttagcttacagattgagggtgcggattcaagggagcttcctacgcaataccctgggaagagaagacaagtggaaacggtggtggagaccagagtcagctccggcgaactggtcattaaccggtacccagcggtcactttgtcggagattggagaagttaccccatttgagaatacaacaaacttgattgttgaaaagatactcccagagcttcctcctttggagataataaggacaatgcaaaagaaaaaagatgtacccagctgcagtggtaaaaaactcatgcctgcaaaggatggaatcgggcacgtggtaccaaattccccttctgatcatcaaatcgtagggctcttgggtgatgttcctggaatagagccgaatatagaaccctctaatttcctagccgttggagtccaggtggcaaatgaagataatgacaaactaaaagggattctagatgacacagcccaagtagaccaaagcttcattcgaaaaagcccaaggaaggtgggccctgaaccacaaagcccgtttggtacacaagcccatattatggagtacccatcgaaggaatgttgggatttggcatttaaccaactattgggagcccaaaccattgataaatttcatcgtgagcccaccctttttaatccaatcttggacattgaggagattcgttgctatgaagctgaccaaggaccaaggaaaagaaaagcaacaaacggcttttatatgcttcccaaaaaagaagacgatagacgattccaccaaaatgatgatcaacgtgatacaccaaggtacgaaggaagaatggactcccctataccaaactcaggcggtggcttttcacctggatctattgagaagggcgatagtcaacgtaggagaggaagaccgaggaaaaatactgtctctgggccaaagccatcggagcccacaaggaaaagaggaagagcgacaaaggaggcgacattagctatgaaaccgaagagcttcaaaaaggagagtgacaacaaaaggaaaaacaaggttagaaagcactactgtaattcttgggataatgcctcag

SEQ ID NO: 85408 - DNA, 797 bp, Cannabis sativa
  modified_base (714)..(727): a, c, t, g, unknown or other
tggaaaaagggtccagagttgataaagacaaattgaatactcaataaaatgcacattaattaaattatattttgacaactaaattgccaaaaaaaacctaacatcaagaaacttcatcaaaaaactagtttcgattatataaaacaagattttaaattttttatgttcctcattcttttatatgaaaatttatcttatatttttaatttttttttaaaaaaaaatatcaaatttagtgtaattaaaaattaaggaacgttattcaaaaaaaaaattaaggaacaaatcttaacttgtttaactgaaaaatgtatatataagacatttcaataaaaaatatatagaaataggtatttacggatttaatttgtgcttgtgttgcactttcatgctaatatatttgtgcattcatattgtgtaatgccttcatgtttgtcgtgttgggataaagtttatattttttgtattgtgtacaagttcataattattcgtgtggtgtcaggtcctgcatgttgtgctcgtaccacatgaaagctcatgatctcgtgttatgaaaaaagattaattttaatgtactattttgagtgttataaagtattaatttattctttaaataatattttaataatttctctcattaactttctagttttttatataaataaaatatattaaaaataggctaattcgtaattttttctcccgaactttgannnnnnnnnnnnnntgccccctgaactttttttgccgttaagaagtccccccgaactattgagattattaaatttaaggacttt

SEQ ID NO: 85409 - DNA, 718 bp, Cannabis sativa
ccaataaaatacttaagtgagcccaaataaaacttaaaaataaaaccctagttttttatatattagcagctctctttcttcacagcagcacacacacatagctgctgcccctgccccctgccttcccacgaaaaaaaaaaaaaaaaaacttgcttcttcttcacagcactacagcagctcgagttcagcagcctgccccaccccctgctcctccattttcactgtcttcctccacgagttcactgccttttccctcttcctccacgagttcactgccttttccctcttctcatcacaaaaaaaaaaaaccttgctggttttgttgctgccttgtccgagttagttgctgctgccttttctttgttgttcttccataggtaaaatttgaatatcatttagttttttttaattcataaatcatatttatttagttgttcttaggttcattaattagctggtgatttattatttggttgttactttattttgtgtagataagaaaatgaatagaaaatcaaaattgagtagttttggtgttggaggagctagtggcagcggtagtgtcgatggtaataataataatagtcttggaaatagaaaagatccggcttggaagcatggtgttgaagttgatacttcgggtggaaatgctgaaaacaagaaaaattatatttacatggagtgtaaatactgtagaaagcttattacgggtggtgtt

SEQ ID NO: 85410 - DNA, 508 bp, Cannabis sativa
agcaaaccacctccccgtcttccccaccaaaccccacgacctagaaagagagagagaatattattgagagcactttggcttaacattctggttattttttatgttagagagaatggaataaaatatattattgagagagaaggtagtggagtggctgagtggttttgataggttttttagctttaaattggagagagaaagagaaaatatattatttattaaataataataaattactctgtttttgaaatctgataagtttttttaatagtactgaatgtctctaggtaggcgataattattatttttaaataatttaacctcacgaaaattatactcaaaattaaaaaaaaatattatttaattaaattttttaacatataacgtcctttgactttttcaagtctaatattattagacatgatataaatttttttctagtccatcaatattggacataaaatctccttataaaaatttcatgtccaacaccattttcgttggacat

SEQ ID NO: 85411 - DNA, 903 bp, Cannabis sativa
tgttcaaaaaatgaaaaatatattccaaatttaaagaccgcttggtcggtcaccttgtcttaaaataaggcctattggccgaacagacataaaaaaagatactaaaaggaaagcaattaaatgacaggagtcccaggctctttgtgtgggtcaactggatttgaaggagccaaaggatcatcattctgggtggaacgagcctcaacactctgatcggcaggagaggtggaagtggttgcctcaggtttcctgtaggccacctgagcagcacagtagtcgagaaacatgtctttggaagtgcccagataatcaaagttttacttgggattggccttccaaaagtcataaaatatctcaaaactagctgtctctaagacattaaccttctctccgatcctcgccacctcggacttctggttcttaacctcagccttgagttcctcctccatggccttcttctcatcctccaacctgtgaagaagagtttggagaccctctctttcatcttgaagactggtaacgtcctgagataaagaggcaatatcagcttcgagctgctcggttggtggcgtctcctgcagttccttggtcagctcggcaactttggtctcaatagcgagaagtttcttattgacctctcccagctctatccgcacagctccaagttgaacctacgcatccttgacatcctttttggccaagtccactttacgttcgcattgtgttagaaatggcaaggtttttagcagcagccgacttagctcgggaataggtgtatgccatcttcaaactagtctgtgcgaaaaaaaaggcattaaaaatccgaactagtcaaggaagaataaaagaaaaatgtcagaaaagacttacatgcgaaagctctttcaagactcctcccataac

SEQ ID NO: 85412 - DNA, 668 bp, Cannabis sativa
ttccacattgaacttggtattttaccactcttggtccttactctcaaagtctgcaagcatcttaaattggcaaaagaagatggaatacttttaataaggcaaccaagcatacttaataaccttagatggatcaaattcccaatttcttcaggcaatttcaatgtagagctgggatccacaggctcatgaacaataatcaaaactctaagcttcaaaaagtgattgcatacatgtctcaatactcttgtttcattatacgcaatttttccaccatgtaaagcaacacacctgagagagtcatctatatttccaaccatatgaataaaaccattagcattagtactttcattaccatagatggaaactcttcgtacctttgtttttattggcacttcccctttagtattcctccaatcaataaaatgaataaagttttcatcttgagctttagacgcacacaaatctcgcatgagatcatgaatgcaaaatgattttattcttcttcctgttgaactcatttctttgacctgaatcatactcctctccaccaactcacacaaccaatcatatgccacatcctccaaagtttccacataacctcttcttcgtgatacaaaaccttctgctatgagtatatgacataactcttttgctcttatcgggacatc

SEQ ID NO: 85413 - DNA, 923 bp, Cannabis sativa
tgattgcgtatacttgcgtagtgatcataattttcgtaacacctacccacattgcaaggttctcccaaattggatatgtggtctgtgaatcttgaaagaatcgtgattcaaaaggtttaaaacatctccaataaaaatgtaaatacgttatataaaattaaaatataattttttttagtgtagcctaataatattttacaatcaattaatagtttaataacttaaaagtcttgggttcgaacccatgacctctctctttttcccatccctccctcaccactaaactagtattagtggcttaaaccaaaatatgacttatataataataatttattctaatagtatgttaaaatattatgtaaatttagcacatagcaaatattatgttaaatttgatataatattgtctacgatgcaaaatttgcacacatacttttttgtttactttttgttacccattttttagctaagtcacgtgacatgcaattaataagaagacacatcatcgtcgaaaaagtttgcaaggtacgctctgcaagaaaagaaaagaacgaggtccaaaaggcccccaagtgatacacctgggcgacatgtgcaaatgcatgatgcctaggtagtccttgggctgtaattcatcaatcccgagttgcctctctaagcaagtggtctgatatgccagccccacacgaagaaaaggtaaagcccaagcacacacttgggcagcatacactgtgccgcccatatatcttgcttatcacttgggtggcatggggatgttttccttgaggctttcagggtgaaatttgtcattttaagtcgtctttcaaagaaagggcaatttgttatgtcacataggagaaaaaattgcgattcggagtgcccaagtttggagcacacatgggcagcatacactatgtcgaaca

SEQ ID NO: 85414 - DNA, 558 bp, Cannabis sativa
tgttttttttttttttgaaaaatctggtctgtccgtacgacatgtcgttttgtaaaaacgacatgtcgttcgctggaagtgcagcacatcccttaacatgaaacgacacgtcgtttgtctgaaggagagcccaaaaaacgacacgtcgttttgatgtcatccctgaacttcagctgggcatgcgggtcaaatccgggtcgtgcgatccgacagcgaacccggttttccgaccgactggaaacaccacctgcggtgctccgttttcgacgccgtttgaggggaaattcaccatttttcatattctctctttttcccaaactcatttcacccgaaaaacactctaaacccgtaaatcacatacccatattcggccattaacaaacttttttaaaaaagcttgggttctcagcattttcaacaaaaaacggaaacgggaaaaatggtttaaaatatggattaactcagtaatcatcttctaatcaaattttctctacgaataatccatatatatatataattttcttttttttttttaaataataagccctaaaatcaaat

SEQ ID NO: 85415 - DNA, 1621 bp, Cannabis sativa
  modified_base (70)..(71): a, c, t, g, unknown or other
cacataatcgtcgccctcaattcacctaggatttcaaacaatactcataaattgtcccacctttgttaannctagattacttctaaacaaaaagattttgttatttgaatcaattagattgatgcctccattagctactcatgtcctatattctacttatgaataccagcaaatttatatcatatagtcatttctctaatctgtttattctatcagatgagctaccattaaataacatacatgcacagtccattcagatttttgatgcttttaattgaatgtacaatatttaacatcaatatcaatcaaaatagcaaatataacatttcccataaaattctaacctgagtcagtcaaaggaccgatacccgagtcccctcgagtcataattggcacttgggcaggaaccatacactcttctcttttaacattagtctttcttttcacatcagtctttctttaaaatcagtccattcctctaactaggctgctctcatccagcaagctcgctaagacaagaagcactcggctcactgactgaggggcggcgagaaccttttatcatattatcatatgaaatgtgaaatgagacttagttggttgagggctgtctgttctttttttaagatgacccacaactccacaataaaaataagattttgctctacattggcctaagtgacgtcttttatatcttggacactcaagatagggtcaccatttcttgttctcaactcagccactatcctagtcaccctagaaccttttgttttatcccacaattggtggtttatttagtttttgcttcctgatctgctcgtaagttggttctatatgtttcaccacatccagtggcacatcaagaagtgtctgtggtacaggaatagacataaggcgagactgttgctctctcagatctcgaatttgttccccccttgttgtctataattgtatatcttgcatagcagcaattacttgttcccaatgttgaggcggtaaagaattctcttccttacctttttccccaagcccacacatcttgctaatcagactatttgattacccttgctgtataacttatcacacatttaattcacatctcccaagcatttaaaactcagacagatatcaatatcaatatcaatatgtgtatatagtacacatattcttatcataatcatcactatcctacttttcctaacatactttataatagtctagacaggtaatctaatagcaaataatataaacacttactataccatgagtcaacctatcttcgcagcaaatgtacatattcgaccagtctttaggatctttaaaaccatgactgttctgataccaagttgtaacgccctatcccatagggacgccacatgtgtgattttataaattattttagtactaataaagtaattaattattaaaatttgtggtaatattaaaaacttcactaaagtaaaactctaacaatatacatcataacgacactaaaactacgttttggggatccctgttgtaagagttttacaaaaaggctaagtacgacaataattcaaaataataaatcaaaatacatgcagatacatctcaaaatacaactcctagcaactcgacatgc

SEQ ID NO: 85416 - DNA, 775 bp, Cannabis sativa
ataaatgctttgtagtgtaagaaatgcagttgcaaatctagtggcagcaagtcttacaatgtctctttctgcaaattttctcatcatgtctaggaccaattgatgattgtaaatatacttgctcaatttttttgctttactcaaagcagttgcatgttgtgggaactctccaattttttcaagcatctaatcaatacagtgtgcagcacatggagtccaatggagatgctatcttttctccatcaataatgtacccgcccctttgtaggctttagcattatcagtaaccaattgaacaacaagatgctctcccatttcttcaataacatcatccaacattttaaacaacttttctgcattttcactaaatgaggaggcatcaatacttttcaaaaacacagtacccttaggattgttgatcaagatgttaagtatgcttcaatttctaccgtcggaccatccatcagacattattgacactcacgttgatggccatgtctttttaatatcctcatctatagtgtcggtagtgtttatctcttccttcaatatccaagtcctaagctcatacatactatgaggtttcaatcccctaccataatttccaatcgagtcacacatattgataaaggaagggctcttagccaaattaaaaggcgaagcattctcaaagaaacacctccttatgtccatgcaaacattatcaaacatttctttctcatttttgggagttaaatgggttttttcagcagctgtcctatcactaccatcacac

SEQ ID NO: 85417 - DNA, 547 bp, Cannabis sativa
tcttaaaatcttgagtaaactctcgtcataatatatatatcccctattatttatatacaaatacagaggcttattatgataccatacgatagtactatttttttttaagccctcataaagtggtatgatttgataaaaattgtgatcttattgaaagcaataattatagtattcaccaaaataatcattgacataaacaaatatgttcacctacactaacctttagacgacctcgatttcctaaagataaggcacgaccaaccaatgatggaccgtgtaagttttccttaaaaggtttcgtaataacttgtcctaccagctgtcgtaaatatagcatttccaaatatacacaaataatattaatatagacaataaactatatatataattttaaaaaaaatatcaaacttatattgaaggaaacaagtataccttactagcttcacgatcgcgcaaagtttctcctaactcggaagctttatcaacccaccgattatctaacttcatttttgacttgccacttctagtctcacaaatattaatacca

SEQ ID NO: 85418 - DNA, 677 bp, Cannabis sativa
attacattgttcttttggattgacaactgtacaactagggaaattactctttttcttcacaacactcacaacattggcccatggtcccacttgcacctttatgttcttcatggaagtagtaatattggacaaataagtctctatgttatccaactttgcttcattcttgttaaatctcttgctggtctctatcgtgaaagtacccagaatgtcttctaaggacttcttctcttcttgttgttgtgcattaaacttaggaggcagttgcatgacattttcagtgttaccataagaaaatttctcatggtttctcaacctcgaatggtagtagttaggaattagagcatgtcggtagttgttattataaggtctattggccatatactgtgcttaatctatactgacctcaggccattgtcaatcagttcaaagaaagaagcacatcgttcaaaaggcccttgaagcaaaagatgggaagatttttgtatcgaaactctaaccagtgttcatcacgtatcttagggagattggccaatttttctctcatgagcggttggctgataaagatccaagctctagtacgaatgaaagagccccatccttcacgaagagagtattcataaacgtcaatgaaacgtcaatgtattctccagcccattcatccacctttttagcaa

SEQ ID NO: 85419 - DNA, 1692 bp, Cannabis sativa
  modified_base (921)..(928): a, c, t, g, unknown or other
  modified_base (1035)..(1040): a, c, t, g, unknown or other
tagagctcgttgcaagctttgaaagggtatatagaacatacaaaactgacacccgagtgaaaagtcaatgataaaaatacgatttctaatctcctaggaatttctaaaaatggaaatactcaaacattccaaattttgcactcaccaaaacttatccaaactactccaaacttcacatggcacatatataccataaatattaccatttttacataaccaaaatttaaatttaccccttaaataaaaaacgccataaacatttggactaagctataaaaagttccaaactcgatttctaacgtaaaatcacctcaaattcaacatgtaaacatcgaaactagtcccatacctaccaaagaataattctataaagtcagaatctccataactattctaattcacgaaactcctatacataaccaattgttctaagcttaaaacaaaactgaaccatactttaagctttccctcttcaaagatttactatcctgctactactagagcttagatcgctaggttttgggttaaaaatcaaagaaaataaataaaggagaatgagggtttcgttgaactgaaagagaaagattttattcgttccttttgcttatgtttctaaaatatataacaaataaatgtatgagattcgtttataatgattatataatattataataatataataatataatattaataaaaactttattattgataattatcttatcatttcttagccactaagaaatttatatttttagggtattttgccaattccaagtactccaaaataccacggtatttctaaaatcaacttatcccaataatcccatcaatatttctaactaaaaccgttgtgatatttttggcctccaatcaggtctccagggttgtggaacttaaatatttttatttcacaaatannnnnnnntatatccatgtatttcaaataaattttcgtaattaacaaattacgtttatttatccacttatcgagtcttcagggtcgtcgaatttgaaaatatttttattccacannnnnntcatattacattcacacatactatataaatcttcgtaatttataaattacgtttatttactcacttaaagcaaatttaaattttatgttgaaatagattagtaggatcataattccacttattacttgattaacccataatataaatataaaccctaattatttaccattaggcttatttagatattacacttggagtaatctcaagatgaaaaatctttcgaggagtcatctcggaaagcgtacgagtgaagacaaagtatgttacaaagatttgtattaggatgcaaaatcaacagctgtttaaaaaattattaagaggaaggggttgataataagtagagatttacaatgcattgagataagtttatattagtggatggaagtatggaatgctttaattgaatatctattagaaacatctacttagcttgttaataagttaaatcagtacatcagcttaggagatcctataagtggaatagaaagacataattatgaattatgtacagtggattcttataattttgaccgagcagtaacggttcgacatactgagttaatatgatgtctatcagtgtagaggatttatacaataaatgagggtatggagttcatacgaaggaatagtctaatcttgtgaaatcccaaag

SEQ ID NO: 85420 - DNA, 689 bp, Cannabis sativa
  modified_base (393)..(408): a, c, t, g, unknown or other
cttcttcttcttcttctctcacctagaccctccataaccacaaacccagaaaccttccatcgccaccactccattccctacccagaagttctcatacatttctctctcacctaggtcaaatgacttgcgacttccagggtccatctcaaccaaagtggtattatcatttagagttttgcacttgttggccttgagatttgctgcatattcactgtccaaagcagggtcttggtgtcccctaccactaaaattgttgagtctactcgagaatgaagaatagcgagatactccaatagtgtgagcacctagtatagaagaagaagaagaaaatttgatgatgatgatattctaaaggggttactgaattcaaatgttattattattattattatnnnnnnnnnnnnnnnnattgttattattattattattagatttacctgaaagcaagaccaagtcttgaagatcaagaccctggttggagaaaggtgtctagagagtggtgaagttagcagtgggagctgggatcatgttgttggcctctgttctgtttgagattctcccatctcttctacctgttgggacactccatgatggacctccctgaccaagccaataagaaatttataaagtggtgaatatatgattaatttaacaggtggaattagatttgataattaggtttaaaaagt

SEQ ID NO: 85421 - DNA, 670 bp, Cannabis sativa
ttttataaaattttatggttttttggataataataattttattaaataatatgtaatattttaatatttatgtaattcactttttatatacttaaatttttagtataaactttcattaatatatgggtagagtctctggaagtccttatcctgtccttaatgagaattatgcaaggatagatgagaataaaaattcttaacgggaacaagatgggagaagcactccttgctaatttttcatattgtgtgcatccctagtctagacacaatattacatatataacattgctaaacatgagaaatagatttaagatatttactaaaatatataattacttttgtttaaaataatatatatgaaagagtattcataaattatgaatgtataaattactaattaaaaggattatatttatagactttattagtatttatgtacagtacttttatgttaatagatagtagtatttttgtgtattgtccggtttaaatttatatttttttttattatatcgtcgtttatatttttttcatatcgtgttaagtttaaacttatatttttctatagagcaatttgcggcgaaactcccttatgttttgatttttatacacttaacccccttatctttatttttggtggcaaaattcccttatgttttgatttttatac

SEQ ID NO: 85422 - DNA, 552 bp, Cannabis sativa
tgttttgtaaaagttattaattgggccctctattttattaaatgacaaaatggaccctgtattttttaaaattgtacaaatatgacattgaactgtttttgtgtcaaaataaaacttaattaataatctgatctatagatgttatgacaaaactggttatattttttgtatatgttcgtgttagaaattgtcttaaagttggttatattaaaaaataaaattgctgaaaattgagctcaaaatcttatttttactattttagaaaatatacagtctattttgtcattttatgtattgaatagcaaaattcgtatttggtattgtatggaatttataatttttaataattaatataatacgtctttcttgtgcgaagaatgtattctaaaatatgttacgtgaaataatagtaataatgtagtttaataaatatttagattcatataaataagtagaaaaaatataaaaaggtgatctcttcacccttcacatgagtttagttagacataataataaatcttagtcaatttttatgggtgtttattaagtatc

SEQ ID NO: 85423 - DNA, 789 bp, Cannabis sativa
cgagaaaagcctaaagagttccagaatgtttatgtttaaaaaattttaacgttgaaatttagatctgacctctagatttgcattgttgaatattttaatcggtggtattccatcttttgcttggtactgtatttgcagggttgtttgtgttttgttgcccccaatatagtagtatgtgtaagagctcttcatacttgcaatgttttggtatgaattcttcactagcctcataactgacataattattttcttcttcccatcatccattgctctttaagagaacaggtatagatttcataacctgcaaattttctcagtatttcattaattcaacattttttcttcaattaaaataacagtaaaataacactaaaaaaacatggttgttcgtttttttgttgtccttttatgatttggatgcgcatttattatcatcgatatccctaatttataataaaattaaggtcataagccaagagcaattatagaacaacgttgaattttgtaatgtacattattaatcgtttctcagggacgatctatattaatctttactttcttttaaatggcatgtataattatacattttcagtttatactttatttttttcgaattcaagatatcattctggggtatatttttttatttgttatttaattgaattagtgtgggtttaggtgtctaacctctttgtttcttttaattctggctttgatgaagttgttgggtcttgatttgtcgtcgatttcttttttttttcttagtctcgccgaaatttatgggtgttt

SEQ ID NO: 85424 - DNA, 584 bp, Cannabis sativa
tattgatatttatatatatttaaaaaactaattttaccgttaaatttaacaaaatatttttatattcttaaaatattatgttaaactaacaaaaattattaaatagtcacatttatatataaagatatagaaataaaagtagactaacacttgaaatagtagtgatgttcatttgaagccagtttttgtttaattgttattgaacattattgtaattaaatttccttattattttactgatcagcttgtggtattgtttgaagattttctttttaaaattttaacagtagttttttttttctttaatttttacgaaaatttatataaaaattcacatatagcaattaatagaataacttaaattgcaatcaaaatctatatagcaactcatatagaaaccaacggaacaacccaaccgtaaattttaaaaaataaaataaaaaattgtatataaaataattctctttgttttaatactatactctatacatatattaatatacacaaaaacggaagaggaatgtagtatcaccacgaagtatttattattattaagacagttaaatatcaattctcatatatgt

SEQ ID NO: 85425 - DNA, 1359 bp, Cannabis sativa
taagcgtttatatattacatcagcataacttgggactcgaacctaggacctccaatacacatgcaccccctatagccacttgagctagcctcaagtggttaatttggctttttatttagttattttagaaaacggttcctgaattattaatttcaaaaatggacttttagtttaaataattcaagaaactagtttttaatttaattatttcgggaaccgttttagatttaattaatacaagaaactgatttttgatttatttagttttatttaactgatttttgtttataagttttaccatggttgttttatggaattttttttttcttcaaatttttaactagttggtaaacataaccggtttcgttatattatattttgactgattgtgtattataatttttttttatttattttgttatggaaccggttctatttatatttatgcctcatatttttagaattgatcatcagcttttttttttaaaaaaaaaaaaaatattatatctgattttatgaagtattatgtgttattcgtttttactagtttattttttaatttatgtttcactgttttaagaaccgattttctctttgttttttaattataaccggtttgagttattcaatattatttgtttttatttattatgttatagaaccggttctattttaattataacgggtttgagttattttgtattatttatttttatttattttaacactgtcatagaaccgattttgttttaattataatcggtttcaattattttgtgttatttatttttatttattatattataaaccagttctattttagttataaccggttagagttattctgtattatttgtttctgttcattatgttataaaaccggatctattgtaatttatatctgacacatctaactccggtcactattctgatggctatgacaactccatgacttctccgacaccgataactttttctgtgatatttccagtgtcgatgacttttttggtgacttttaaggggccaatgtctactccaacgacttttttggtgatagttgttattataaattttaccaactttatttatagtcttttgttttttgtttctcatattttaatgattgtttatttttttccatatgtttttttgcattattaatttctgccatatcaaagtaaactctattaatttttcccatatttatgaaaaaacttcctttagtatatgagtttttgatatgattgttagactttttatttgggcttatattaatttttataggttttattaaaacttgagttgatcatggatagttctttggtgtgttagcccatattattggtgatcaatagttaa

SEQ ID NO: 85426 - DNA, 645 bp, Cannabis sativa
aatagtcattctaccaaaatgatagaaagaccattccattggaatgttattccaatagttttaaatgcaaccaaacaaatgaatggaattgaaattatttcctttccattatattctattttattacctcaaaccaatcatagagtatttatgtgcatttgatggtctgacctaactctgtactaatttttatataactattgcattaaaaaaaatatgtcatatatggttaaaaaatatatttccaatattcttaaatcttacgtaacatttaaatagtactcttataaaaaaaaatatttaaagtcaaaaatagccttcactccaattttaatgaaaacaggattggccaaaaaatttctagttaagtaaagaaaaggaagagaattataattgaatatgaatataaaaaaaaataaacaaataataataaagtcacaaattatatgataatcaaaataagaataacagaattactattactaacaccaactcataactttaaaaaaatactagatatatatcctaaatacatgaataagcattcaatgtgtattttcaattatatttgttttgttgtttatgaaaaaaaaaatctactaacaaagaaaaaagaaagctattagttaaaaataataataataa

SEQ ID NO: 85427 - DNA, 1022 bp, Cannabis sativa
  modified_base (27)..(47): a, c, t, g, unknown or other
aaccaagaattgccgttagataggcannnnnnnnnnnnnnnnnnnnntatatatatatataattatttgtgatataatttttggaagcaattaataacaccttttggaagaattgattcaacgaccggttcttacttcaagctagctatcaagctatatgcccccactaaacacgaaagaaaatttggtgtctccaaattagtgtgcgctttctattctaccaattattttagtacatattatttatacttatttaatatataataaattcgttaacaaactctaaattaaattaatacatgtaaaataaaagtatagatgatgcgtcctgaaacaattgatgaggatagggaggacacaccaatttggagacaacaaatttttttccactaaccctatgctaattattattttttaacttgttatatcagatagaaagagatataacgctaatccatatagttaatcaaactcaagctttccctaacattgacttttccttttagcctttgtaggttgtgcttttgggtggtaatctttgagctaatgataatatttatatgatctaccctagtagagaaatagcctgaagaagagatttaaaaaaacatatttgaaaagatagataagatttttattattcgaaaacttgtgccccttaacagaaagtgagaggccatgtatatatataggccctcaacaaacagaaaatactacaaaccttaattattacagacagaaaacgttaaagacttaaattacatcttttcgcagataaggaattatctctgacatatcaaactcttctttttataactacaaacaaacaaaattttcaaatggctagaggaatctctgttgtctgaatggatcctagtcgttagttgtcattttgttacgagaaagaatctctattggtcttgtgagtagtcatcggtcaaggcacatgaaacaatggactgacttctttaggagtcacatgtccacttcattattgccataagacaaacacgtcataaaca

SEQ ID NO: 85428 - DNA, 1437 bp, Cannabis sativa
aactcagaaagccaaataaaagggagtcaaagcttaaagttatgttagagttgacgttatctatattagtacatttattcttgaattacagtttacagttaagattgtcttgataaataccttccatgttcttacttttaagaggaaaattttactttcacttttaattaaaaataatattcttttctttttgtcaataataatgtcgatattatgtttgactttggattatcgaaagctgttttattctgacaatctttacaaactttcattgacttccttatgtaacgtattctacttgtttaggtgcactatgctattttctaaattactatgtcgacctatgctaattaaaggattttagtgaaaataaatttatttaaacttctaaaattgaaataaattctacttaaataaacatatttattaaaaaaattgggatcccttatttatacttttaaacatttcaaaatatattataaacaaaaggtgtcgcctttcgactacaaaatgcaagcctaagtcgtctcaaagaaccgaacactctaggcctaaccatctcgatatgtacaatcatcaatgagctccaaactcactgttgttcaactttcactttgcctttacctacacatgaaactatatctatagttgacagactcggtaaaaaaatcataaaatatataatcatataattcgtctcataactcaggcgcccatacacctagttacaagtttaacctgcgtccaatgcgtaaaatgagtctcaaacattcttaacaataatatgacctctatagcacatgcactaagtatctttctaatactaatgttgatagggtttgttcgtactatgagtataactgatcgttataccacatacactctgtactcatcaagtactagtattggtaacgctatgtaataccatgtaacaacatactataccacacacactctgtacctcaaccatactagtgttggtagtttataattcatataatctaacatgtatactaaatgcgcatatgtatatccttataataatcttatcttatttcctaattcaaatgtgtcggtcaacttgaatggaaatatcgcttgttgaatggaggctctatgtcacatttacataaaattggttgtttacaccaagagtagtcctaatgacatggacataaatatttgacacgtggcaagaaagatgacatctcagagttgagtagtctcgagtcataacaagtcggcctgggaggggtccttagccctgcgcccaagttgacttcgagaactttgtgatcaaagttcagatttcaataactcatttccaactaactatctttcaatattatgtatcatgaagacatggaggaaccaaatccaggcctaggagctgaaattacacaaacctggaccctagaagccaacccatcgcccaag

SEQ ID NO: 85429 - DNA, 670 bp, Cannabis sativa
cataaatttattatttctgacaattggagaaactgtgcaagagccaagaggatggtccttcaacaaagctaataatcctttttaagcagagtacgagacagagagagaaaagcaatagtagtattgtagtagtacctgtagtaatgagtgtctgtaaaaattcagaagccaaggaatatatcttaaaatgaaaaaacaaaaagcttaaagaaaaaagaggcactgaacaatcgagtctgtgaaaaaaaaaaaagccaaagaagatggtgcccaaatttttttattagaaaagcttcaattgataaagtttcagtcagtgcaactgtgcaaaaactgaagcttcttgcctaatggagctcttgaaaaccaagggactcgtccttttcaaacgagacaaagacctcgcaagttgaagtgggcattgaacttggcattctaggctcaaaaacagatgacactcttttcttttctttttcttttctcttccactttttggttttttttttttttttttttaattttttgggtcgtttacttccattcatctcagttgtcacatgcatacacagtaaaaaaagaagaaaaaaaaaaaggttatgcactgctccattgatcctgtactgtatcactcaaactacaatttatttaagcaaatgaaacaataaacaaa

SEQ ID NO: 85430 - DNA, 604 bp, Cannabis sativa
aagtaaaagaaatattttttttttttcagcatgtgcttaagcccacactgattcttcattgagtccgccagtgcttagaatgaccaaacatatattgcagttattcatttctctttcccccctcatatttgataaattaaaaaacttctacgagttgcaaatatcataaacaacaatatataaggttaatggccattggcaaggattccaaaaataagtagaaaatcttttttagaagtttttttttttttgaagaaaagcgatgaaatatattaattcgacgaaaagttagacctcgcggtcattacataataggttctccgaaaaagaggacaccggaataacaccaaatatattgtgggtaaacgcccacctggccacattatgggccgcgaagttacaggttctactaacataagaaaaattacaactagaaaataaaggagaagatctattacaaaaagagatgtagttcacaagcgcccaatgaggagctttcccattaagagcattgatgaccacactcgagtcattctccacaataacaaaattcgccttgagatccagtgctgtttcaattgccaaacagcaggccgccgcttct

SEQ ID NO: 85431 - DNA, 798 bp, Cannabis sativa
ttgtaaattccacaataggatacatatgctcttctgtttttagcatgagaaaaaagaaaaatgtagtgtatgtatgtttatctatatatttatacacatagctatatttaatttggtgatttatatttaccgactttttgctttattttgtttttcagggtggattgagctctggttataaaaaaaatgttgcagagaaaggtttgactgatgaaacttacacagcagacagtatcactttgattaggatttctggaacttccattcataataataaagtagtgcaagttgatgcggtatgttttctttccagtagaagtttcatggtgttgcctatccccgtgataatctagactattttgtcattaggatttgatgttcccatatctatagagattgttggcctcaggtcggttgtgagaattaacttcccaaaactgtcatttagctagaatacttactgaaagttttcaatgacagagtaccataaaatatttttctggtttctcaataagataagaaactataacctttatcagtagtgtattgcatcacaagagcctatccttaattatactattcgggctattacatttgatatggatctcttctgtctcttattttggcgcacacaaattcatttccatctgcatatgttcacaaagataagcttacaggaagtcaaaccgaaaagcttagagaacagaagagaaatgatacacttaactttcaaaatttaagtttcagaagttcatgaaacctactgcttattcgttttgcaaaatatgtggatatttt

SEQ ID NO: 85432 - DNA, 1071 bp, Cannabis sativa
  modified_base (255)..(258): a, c, t, g, unknown or other
ataagccttacaacaagtttgggggagtgaaaatagagtgtgtggaagtgttgaagaaaagaagaaaaaaaaatcttgtgtgattgagaaacttgtgaaaaaaaattgtaactcgacattacttgaaaagaaaaaaaaaatcagaaataaaataagaaaaaagaaaaaaaaaattattttcaatggtgtccggtgattgaaaaatacaaaaaaaaaaatctcaatcatggttagttatgggaacacttcgggaannnnttaaaattatgagaagcttgtgggttctaaatgtgcttataatatcgttagccaaaaatgtcttttattttctaaatatctaagccataaattcttacgtaaaaagtcctattgattccgaaaagaatgttgtcaacattagtggagagaggtaagcatgcaagcatattggctattggtttgtggcatgatttgatggagtgaaaccactataacattgtttcaattgtgaagtcaggttgtatctgtgcattgtgtgataagatgagcatcccaattaattgttagaatttttggagttgaaaatctagtttaattaattcataattgttttctcagttaatgttgccttttggaatggttttacacttgattttccttgttttaggtcttcgaggcattagagttcaaattgtatcaattgttgaaaagacggggcattttggaaaaaaatctgctgaagctgtcaaagtagcttcagtggtcgcgactggacttacccatggtcatgacccttttctatggtcacgacctgggtcgcgactaggaggattagataacaggattcttagccagttttgaaattttgccattcagaggtagcaaccctaattttttttaagggactcgcattttatgacgaagatcatcagagattagctccgaaaaacgaaagaaggaggagaggaagctattgtgatccggagcaaaatcaccatctaattcttttttaagtcttgattttctatgttaatttttgttctagatttgattatggatgttaatatgggttttatgaactaaactcccgat

SEQ ID NO: 85433 - DNA, 1935 bp, Cannabis sativa
  modified_base (80)..(81): a, c, t, g, unknown or other
tctaagttgtccaaataaaaaatacaaaaaaatatattaataatgtattttaatatcgagtcttatatattttaatttannaaataatataaaaaattattaaataattatagaataatattacacatctttaaataccaaatagtaatgttaaaataaataacaagctaacaccattaaattataatattcctcgttcaaactaaaacatttttgattaaaaaaaacaatttattaccaaatgataatttctctgttataaaaatatttgaccaactcttacatccgtgaataaaaaatatttgaccttagaagaaagaaagggctcacctcattctatttttgtttttctcgtgataaaggcgactgaagcggagccggtcacgctctctctctgacaaccgacaactgtcatgctcccacttgattatcccaaacatattattattattattatttaattaaaaacttatgggtttcactgtttcgcaccccacaatagtttttgtgttactttatttttatttgtttacgtggaatgcttagctggaatttttcagagagccagccgtaaatcacatcaaaagaccacgtaattatattcacttattattgagtcattgaatttgaaactcaaatcaactcgaaattttaggataaaatgtcctaaaatattaatgctatatatcacatttaattgtcagattatttatataataataataataataataataaagtgtctaaagttaaataagatagatggaaaaacaaataaataatattggagtcatttttattttttggccatcctttatgggtgatattgtgataatatgcaagacactgttccacgtgggaaaaaacaaatatattgtgtggcagttcatggtgatcgatgttaaatacgtgtcatcttctatgtatatatttgacaaaagtgtcaccttatatatttttctttaaaacaataaaaaaaaattaaatttcattataatgtcatgttatgcaatttgtttgtagcatgtagagaactccaatcttcctttattatttcttttttgaaagggagcaactccaattttttaataaaagcaaaccataatatatatatatatatttatatatatacgtacatatttcttttgtttctcaattataaaggtttaaataatagtgcaaaataattacaaagatgacactttataaataattaattattttttataataattataaaataaataaaaatataggactgaatcacttaaatatatatcaataataatataatacatcatgataataataatatttccctaataccatttagcattttacatacaccctctctaaaatttattgtcattgcaatttgcaatcttttcccatattattgaagtttcaaaagctcttttaataaaatacatcatttttaaggaatcatccacaaaattctctaacacataactactatcctaatcttcataagtagctacacacatttaattcttaaaacttattttattattacttttattattttcttctaaacgttttttatttcttcaaactagtgtgctatataaaaatttgatataaaaaaaaaaaaaacaaatacattttgatgatgcagatataaaagaaaaaaaaaacaaatacattttgatgatgcattttgaagagtagataaatttttgggagtaaaaaaaaaaatcattgtgtgtaatgtataaattattcttaaaactttacaatcattaatattaattagacggcataaatacttaagtttaactccatttttagcggttataatacctaaattataattttggaacctttgtaggtaccagacggttaaatgttaagtaaattaccacgtggcaattcctgattggtccaagtcattaaagttttattttttaaaaaaaa

SEQ ID NO: 85434 - DNA, 1074 bp, Cannabis sativa
aacagcaagatacgactctaactctcacgatgaaaactgaattaaccaactaattcgatttaatggataatctgtttacagaatgaaaccgactatttatgcccaacagaacagtccacctggcactaactaaatcctaacgataagtcataacagactcacaccaatttaacagtacacaagtgtgcagataaaacagactaaaaatccagacatgactagacattctattaaaataatctgtcacaaaataacgacacttacacatgaaatgtctgttaatctgtgattagggttgtcttgttttaggattataatttttttgagaaaagtttttttgttgtaaatactatttgaattaagttgttttgggtgattttaggtgattataatatacgattttaattgtcttttgctcaattattttttttctatagtttatttattgaaatatgtagtcgttatctgttaaatttgtttttctttaatttggttaggttcatcaaacatggttgggaaaccaaagaggaaaggggcagcagaaccctcaaagaaggatgtttccccctcagccgaaggataatgtcgtagcttggagatatttcttgtaagttttgaaatatggctagttatttactcgtgtcactaatgtttaacatttattttattatatatttgattgaaattatgtccatatgtagcaatgcaaactataaagcccttcgagtggctgagaaggaattaagtgaaaaagaggtttgatcttgactgttactcaattttttttatcaattgtccttaattcatcgtacttgtttgaaaaactttaacatgctttccatgtactctggagttgatgtaagtttgtctcatatttcaggttactgataaattaaaagtgtaatttaaaggtttcaccgacgatgagaaaactaagtggagaaactatgaccaaccctactcccgccaagaagccagtgtaaacaagaaggaggaaagcaaaggcagttgagagtaaggggaagaaggtggaggtggattaggaagagcttgccgctgaaactgaagaagtgt

SEQ ID NO: 85435 - DNA, 621 bp, Cannabis sativa
  modified_base (92)..(92): a, c, t, g, unknown or other
tgctgaatactttgctctgagcgtgccaacggtatgtcctattcaaactatgcttctcgggcagatattctaagtggattccacgtgtcacnattcatgtgatgccacgtcagagtgcaaaaattggaataacagtataaatagtttattagaaacacgtataatataaaagaaatgcgcgtgtttgaactttatttttgggatgtatagttatttttaaaatcttaagaaattcaagttccgtaactataattagttaagtcatttgatatgttttaaattagaaattaagtgaagtcgcattttgcacaacccttttaatcattttttactatataataattctatacattatataactttattaagtataatatatatagtattgatttaaagatataatcaaacttgataagctttggtactctcgattaaggagtgcgggcccctttctattttggtactattccacaactcaattaatctgttgtgatgctctcatttctccttctttttctacttctttaatttgtttatcttgttttaaattttttttgactcttcatttattattttcatgtgtgtgtcttttctcttaattgttctgtgtttgtatttaaa

SEQ ID NO: 85436 - DNA, 2186 bp, Cannabis sativa
attcgcccttttgtttttttttttaacaatcaaaaagccaaattttaaacttcttacaccgattttgtcaaatacaggtattcttaaagttattgctaaaatctttttaatatgattttaattttaactttttgttattatttaacatatttttttagttttatttctgatcatgtttttaagaaaaaaaatattctattgtatttaggtgattgttattattaataattttacatcatttattaaaaaaaaaaaggaaaaattttgtttcttgaagaaaaaaaaaacctcaaaatttctttctcaaagtttaattattattagttttctgttacatgtttcaataccagaatagaatgaattgtcgaggcacaattactttaaaatctagaaagatagaaactgattaaaatgaaggattcagatccgtaacaattggagtatgcacgagcttttacagttttagcatatatgttcaaatctggaaagatttaggagaacataatgaatcaatgtactgtcttctaacatttcgtaactcaattattgaatcacatgtacaattatcaatagcccattttcaggatataaaagagaagaaaaaagagttattagacgactggttctggaatagtgaaggacagtagtctttgtttgtggttatatgcaagcttgaagtctctgaagcctttgaattcgatctggaatggtggagtcaaattccatgttttcaggattttctgcgtaagcaacatagtaagctgcaatgcatgcttgttgccatgccattgctatccgactctgcaacattgaaaacgatattcaaatagttaacttcaagaaaatagaacagaggaagcaagcaatgaatattacttaaactcatactttacttactatcaagtaaccaataatgaaagcataaagagaaagttctgttgcgtagctcttatgcactacaagtgcccatattccgctcactaggctactgattgctcccactgtcacagcagagataaagcagaaagagctagtcagatcagagtcgatcactgattccaacccattcttcttgaacatgtcccaagcatactttgaggcctgaacaaagctcttgttgtggagtccaacatgaacaaagccccatcggttcccatacatcactagcgtggaagcacaacatgtatagcacttggcgcatgaacaacagagttcatttgggccttcttgtaacaagtcaatacatctggctgaaccccacatggttcctagaatcggcactaggaatgaacctatgcagatgcttcccatcaagtgcttaagtgtgtcgcacaaagccaagcttgttttgaggtccaccatataagccacgaacatgtacttcacacgtgacattgaagccagcattgtgtttctgataacaagcatcgtccatgcaaggcttagcaggattattgagatgtatacggagtttaactttgttctgctagctaaagctgatccaatgccaattaccatgaaaccagaataaagagtaccaagaagaatggatagtaagatcaagaaagttggcttggtcggaggaggagaagaagaaagtattaaaacccgaatagcatagaccaatcgagaattgacccaacagccgtatagggacatagtgagagagaagattagagtggctactcctattgtgaagttgacagaagtaccaatcagtagatgaagcagggcaactgcgcctgtcaatattgggccgagccaaaagactgccttgaaagctttggaagggtaacaacccgtgattccttgccaggcaactgagagaattgcagcacatactgttgaactgaggagcggatgataccacttggtggggtgaaagtggcgttggtggtgagctttgtaatggatgatgccttgcactattaagtacactgttagggctgtgatcaagaataggtgaaagcaaaaaagaaatgtgaaaagcccgattacgaatcgtttcgtcgttaatgttgtttcaatttgaattcttgcttctggttgtacctgaaaattaacaccgtatataaggtggcatagtatgggccaagttgatagagtacactacgagagataaaacagagtttacttgatatacatatttcagatatacaaagaagaaaaaaagagtttctaaatta

SEQ ID NO: 85437 - DNA, 902 bp, Cannabis sativa
ggcgcaaggccaacaaaaactagaaagtttataaaatagtcctgaagtggaagcattgctccggatataaggtgagtctggctccaagctccaaaaccaccgtagttgtggttgggcgtctccttatctcgaggccaggcagtggaaaactccagaagcagacggcttgataccggccacagtcacaatcttctctaactggtgggcacaagttagagttgagtgaagctcattcgcctcccaaccattggatcgacatgtgtacttctcctgaactaatggccccttcatcacctcttccaaggaggccaaagtaaccgctcccttgtcagaagatttagctctggagatggagacagacatttctcgaaggtattgagacttgagattccgaaaaaggaaatccaacagttagcccccaaaccaaaccctaatgtaaaaaaaggagtgggggtcccctaaccgcttgaaagagggcccctccgaatgcttgcccaaaatggaaattctaaggattctcccaggcaaacatcgggtgcaagtatctcaaaagcagtgaaagcagagggaaaggaaaggaaaaataaaagaaaacagaacatgggtgagaaaactgtcccatattctgaacaactccctcggcagggagattgattgaaaaatagaagagagagaaagtagcagagcacaaataaaagaggatacatgcaccacaaggtaatttttgccaaagtcatttcccaaaaatcaagcacttaaccaaaaaattctaccctaacatgcaaatgaacaacaaaagtgaaaagtacccagaaaacatacgcaaaggtggtgaactggggactggtgctgatcgacggtagaaggcggactggcaacgacggaggaatagcaataaaaaa

SEQ ID NO: 85438 - DNA, 828 bp, Cannabis sativa
gcttcgggacgagaacaggattaggtatccatgagggataaaacacctcacgtataaagtcgttataaagtcgttaactaacaacttctccacttcctgttttagtgccccttgcctctcaaagttcaagggtttctttttctgtctcttcgctgggtagcttgggtcaacatttaaatgatggtagataatattagggtcgatccctatcatatctccatggctccaggcgaactgatcctgattcgccttcaaaaagtttattacctgctatttgagctgcttgtccaggttcttcccaatgtatacacactttgtgggatttcctagatcgagaataacctcttcctattcctcgattggttttaataggtttctctcatcttgaactcgtgggtcaagaacttcgactttctttttagtttcttctgccaagattgccatcaactgatgaccggctttcctatgctgcagctctatgcgatagcaatcgcaagccagcatctggttgctgctcaccactcccacgccatctggtgtttggaatttcaaggataggtgcttgatcgaactaactacccctagtctgatcagtgctggacgacccaacaatatgttataagtcaatggaaggtcaacaactaagaagtcttgcataatagtagcagataagggcacctcacctaaagttaatgcaagctcgattatgccaagactggcaatgctgcctctggtgaactcgcaaaggttcaccatacaaggccttaatttggctttttcgagccccattttccgtagagtctccttataaaggatatttaccgagct

SEQ ID NO: 85439 - DNA, 663 bp, Cannabis sativa
atattttcaattttatatatatatctgtctatatatagttttttttttctttttttttttttttatttatacataaattttagtttagttaaatgtcataaattgtacatgctaacacatttttatgaatataatatatattttttttgacaaattttaatataatgttttttaatttttaaaattatatgtagttttttaaaacacatttttctttaattaaaaaaaaattaaagtaacaaattccaataaaaaaagtcatttaatatatacatacactacaaaaacaaccccccctttttttttttatgagagggtgatataactgtagggtgtagattagtatatagatatgattgtatgcaataagtttttatattattataataataatcaatatatataaaagaaacactttaaaatctcttcaaagctatttttttttaattctctcatttttaatattttattagagcatatattaacaaattgatattttactattattttaataaattttctatagaaatatctatcataaattaattattttttaaaataaacacataataataaatagggacattaccccatatattatttttttttaacttttttttttttcaaatttacagttttgatttctaaagtggttgcagcgct

SEQ ID NO: 85440 - DNA, 3484 bp, Cannabis sativa
tttatacattaaacataatcatgatataaatcatgtgaaccatgcaatataatacgatttttgatttttattaattagtaaatctgattatattgaaatggtttatttaggacacaaaatcaaacataattataattccatttacaaattaacatatagagcttgaaaaaagatttctaacgatataaagatccaaaacggaaccccgagtcaaaagttatggcccaaacaaaatcgagaaaatgggatggctctctgctaggttttggctgcggcgaccgaaaattcgaccgtggccacattgttcgaaaaacccagataacaaaattttaaggtctaaaaatgccaactttttcatatttttgaacctcaaccaaaacatacccaaaactcaaacaaaaccatacaaaatccaatctttcaactaaaaccaaaccaatctaacattggtattcatttgagcatcacacaaagctcaaaatcaaaaacaacaacaaaatcaagcatttatcacaaacaccatagatgcacacaattgcacaagcttaaaaatccaaagcttcaaagcgaacatcccagaaattagcaacatgattcaaccctaaaatcatccaaaattaacctagatgcaatatacacaattctaatagctcaaaactcacaacaaacacccaaatcaccttcaatttcacaaacatgcaactcaagaacacatttcatgatcccacacatattttcatttcaaaattacaacaacaaaaatttagtaacaaaagatggaaactacctcaagatcttccccacacaagcaccaaaatcctaagctccaagcacaccccaaaaatccaattgaaagcaaatattcaagtgaagaaaattttgagaaagagagaggggaaaggagggtcagttagggctgatcaaaaccataaatgcatttcaatttctctaaaattcattttgttgcaaaagtgagtcaaatggtcaaaatgacaaaattgcccctaggcctaaatgaagtatatgcatgaaacaagggtaagaatgtcattttcatcacatacacattactcaaataaatttagattattcatatatcaataacatgccaatatcaaatcccgaaaatttattttgaccccgaacccagttcggcccgaaatacccgattgtgactataccgtgccgacttgtcaaaaaatactaaaaaggacaaaacaagtatactatataataatatagtcccataggcacgcaagtaaattaaatttacagttttacccttctcgggtcaaaactacaaaaatgcccctggctcaccaatggggtcttaacatgttataaatcagattaattcacatataataatttatataataatataaatccataataaatacacaccaaaaatccaatagaaagcaaatattcaagtgaagaaaattttgagaaagagagaggggaaaggagggtcagttagggctatgttaatttctttcatctttcttcatgtgttgttcttgacttcctatttggaacaagcacctcctaggatttctcagttttggataatttgtctagttgggacctctccaaacagtttatggcaaaggacccccaactccctttctatgctaggtagttagggtggctaactgcttggattctcttctctttatatagaaactatgcctaagggaccttgttgaaaagaggttgacccagaaaaggaagcaatggagcactgagatgctcccaagttggtcctgaatgatagtccatgggaatttgactagcacatcattctgttcaagaactataacaatctaacgaagtacgagaccctacacagacttgaaagtgttccatgactgttcgggaatagactctctatactcagggagaggcctagaaagtgcacgaaaggaggcttcaatgtctggagttgggctcacattgaagtgggggcacatttgccttgaggtgctatttcgctgaattttgtgttgtagctagaatagaacctttccagcttattccacaagcataccgcttactatcaaggtggtatgtcttctatgttaaacatggcaaatttgtgccgatgatggaggaaatcttgtatttctacaagatcaagtcccaactaatgagagggcacaaggagaaggtgggcttctacaggttggagcaatacaggaggagcattccttgccccactagctacacaaagtacacccatgacttcagggattattactttttcacctccaacttcccgttgaagagggttcctaacctcagtttggattttaatcttgcaagtaagtctcatcctcacctttggattttaaagttctatttttccttctgtttattacattctaatctcctaccttttgtatttgctagactgtcttacccagtcacctctgactccagagttagaagagagggtgaatttttattaatccttctcacctatagagctgtaagtggaagtcggtctcaccacaaagaacctttgggaagtcggtcttatcgcctcacatgaggatgtggatcaccttttggtgaaggatacagtccaggatgccctacggggggacctaaacgaagttagagaggccatcacagttatttttgttgaggaggctgataactctatgctatagagttattgttagtgcctttaaactgaaattatcatgaaaagagtaatgaaagtgtgtttatttacttaactttaactagtttttatgttcaatttctatttagtaagctagcttttaagtcttgtaaaattgttattttagttgtgtttatttaattaaatgttgcttttgtgctgttgagaaagaaaaagaattaaattgttagggaaaagaaaaggatgcgacgacatgatgggcatataagctgaaatgggcttaattggtgaagcattgctgcaacgaatttagcattctgggaagtgacgtggaaaaaaatgttgcagaacaaatttaattcgtccacatcagcacatacgtatcagccactcaaaattacgccaactggctattttggaagaaggagaccaaacttagtgggcgaagattggaaaggattgagcttctatttttaaggtattacattgtaccctaatgagggagcaaagcaactaagtacaacaaccttcttctacacatgagatcagctgccatttttggaggaaattaaatgcagaagaaaaaagtaccaaaaaggaagtgattaaagaggaaaccattagaaaagaagaaggaggacacaagccctactcgtttgaatttctttttccctttcttctattttttctctttgatattgttgacctcgcttttatccaacgacagtgactcaaatttagtaagcgataagtagtttataacgatcgaaatataataaagcaatataaagacacaggaattttatagagcttcagccccgagcagttcggtaa

SEQ ID NO: 85441 - DNA, 1138 bp, Cannabis sativa
aaacagatagtctcattgttgtgcaagcttttcgaagctcggtgacttttacctctccatttggttgttgtatcaagaaatgcaagaggatgtttttcagatttaatcaatgtttatttatgttttgttaaacgttctgctaattgtgtcgctcatggtcttgctcgagtttcatggttaaatgcttaacgtagttactcgtttgattctcttccgagtaacattattgatgtaattgtgcaagaatcgttataaataaagtttcagcttttattcaaaaaaaaaaaaaaaaaaaaaaactatacaaaaaaggcttaaggctttgattcaagatacacattacacacttcagttttgacaaacaaaaaagaaaaaaaaaaactgaattagaaaaagccttcatttcctctcaagctattttgagtttctctctctctctaatatttttgtattccttagtattgagtattttcccacacaattcaaagcactactgagatctttgtggaagactgtatagaaaaaactattcataatataaatgaagcaatccaggttcaatacttgttattactctgcgatagaaaaaaacaaggattaaagtactgaacagaagcacttataatattccgttgcaatttatgtaagatatatcaatcttctatcttatatatatatatatgtgtgtgtttaattattgaatagaacaacaagaagctgactgagattttggtggtagaagttgatacatccatctttaagtgtcccttgaagtaggagcgtctttgtgaccttgtccttcacaaaataagaatttgaataacacattgttgtcagtagtaagtttagacaaactaattaaatttttaacaatttttggtactggtaacaactcattttatatcaactaactgtcaaaattggtttgtaaagtgctacttccaacatgagaaatggggatttgattaccatcacctattgtcaaaattccttaccaccatactcgattttctggttgatgtttgaggttgtggatgtgacatggttgttagctccactattaacataccattggtcactatcaaccacttcaatggaggctatgaatgcactgtgatttcctccaccttgctaacct

SEQ ID NO: 85442 - DNA, 589 bp, Cannabis sativa
tttaatgtcgcttctaatacccttactatcagagacgactttttgtcgcttcaaatatcgtcatccttaataagtatatttgtgtagtgtgatgccatacttattttttccccttttttaataaagttaaaataaataataatgtgtgaatatagtagcaaatttgaggagtgtttattattgttgggatacttttacaagtaagagtatcaaaagtgatgtggaaaagagatacaataaaatattataattttagatgatatgaagagtttcgacacttttgaaagagaaatcttagaaaacagtagtacctaatacctttttatgtgtcatatcattaataatgtaattaaatatcaagtctaatataatttaatatagtaacttttaaaaaaatatcgctaattaattataaattatcacacgtaagtagtcctaaagatagtgataagcaatagtgataataaaaaatactcattttaaaagtagcacctagaagctcttatataagctttagtggagattactttttcttttttctttttctgtttaaagagacgacaactttcgctttgaaaaagaaaaagaa

SEQ ID NO: 85443 - DNA, 630 bp, Cannabis sativa
tctccctgacgaatgcctctatgaggaataattgggccaaggcttttaccactatgtaccacattgtattcaacagaggtaagagtttgtagaattaactcaacaaaataactagcaaaccccatacgaagcatcatagcacgaataaagtcccactcaacacgatcatacgccttactcaaatcaagtttcaatgccatgaagccttctttgcctttacgtttacgcttcaagtagtgcataacttcaaaagctatcataatattatcagaaataagtcggcctgggacaaaagctgactgatgttcagatataatatgatgaagcacaatctttaaacggttagcaagtaccttagagatgactttgtaaaggacattacaaagtgaaatgggacgcaaatcactcattgtgcaaggctgttttttcttaggaataagcacaatgttggttcggtttaacccagcaggcagagaacaagttgagaaaaaatccttcacttggttgaccacatcacaaccaacaatcgaccaatatttctgataaaaaccgggggtcataccatctgggccaggtgacttgtccggatgcatctgaaacaaagcctttttcacttcttcgtcagtaatc

SEQ ID NO: 85444 - DNA, 1228 bp, Cannabis sativa
tatggtttcatataatatgttttcgaaatgtataagtttttaaaatatattttttttgcacattttttgtaattatattgtttttgttgtacatttatgaaaaaaaccctattaaatgttcagcatataaagtagtcacgtgtgctttgaatcatgttttcagcgtgttaaatttttcaaaattttaaaagatgtcttcaataactacagtatacatgacatgatacgagaaaaaatttgattaaaaaataatttcggataccaaaatcaataagggtgtatcagtatatcgcttttaagaagtgcattttagaacttttcaaaactaaaatacctaaccctaaaaaataatatttagggtatttatacaatgcaacccactaaaatgagtgtactgatgcaactcctaactgttttcgcatctataagaattttttagctcaatttttttcatagtcgtgtatattataattatttaaaacatcttgtaaaattttaaaaattttggaataatttacaatagagaaatcaatgttcaaaccgtctatttcacaagcatataaaattaaaaattcactcgtgctataggttctttgaactatattttcggtgtgttaaatttttttgaatttcgtaaatttttaccaaatgtcttaaataactacaacatatacaaccattaaaaaaattaaactattttttttagataccaaaacagataagggtgcatcagtgcacccattttaagagggtgtattgtagaatttttcttaaaataaaataattagtgcttctacagtgcacccccttgaaaaggatgtactgatgcatcattaatctatttcgtcatccaatagaattttttggtccaattttttttttttttttatattcgtgtacgttatagttatttagataccttacaaaattttgattaattcagaataattgacaatatagaaagcagtgttcaaacagtttatttcacacacatataaaattaaatagtcacgtgtgcaatacactatttgaaccatatttttagtgtgttaaattttttcgaatttctcaaaattttgtaggatgttctaaatattataacgtacatgaccatgagaagaaaaaaaattgacgaaaaattattttgaaaataaaattttatgaaatttagaataatttacaatatagattacagtgttcaaacagtctatttcacccgcgtataaaa

SEQ ID NO: 85445 - DNA, 734 bp, Cannabis sativa
aaaaaaactggtacttataccactatttaccttaatataaaagattacatgaagttctcaaagcttttacaagcttatctttagttcaatttttatttatgtaatttaattaaaaaaaaattagaaactatacagaaaataaaatgtaagaaacaaattgtataaagagagaaaaaaaattattgttgtattttttataacaaaaaagaaaaaaaataaaaaaaaaatagtaatttgacaaaatgcattatagagaaataaaattcttgcttgcttataaaaaaaaaataaaaatagattatagattatagaaatatgagatgatagaatgagattatttcatctgaaacaagtggaagataagagaagactcaataggaaaaaaattggttaaagaaatattgaagaaatattgtttaaaattatttggatggtattgaaaattttacaaacatgaataagagaagagcaatgaaagaaacaaaaagagataggtaaaagaaaaagagaggagagagaaaatatattattttattaatttattgaattactatttatgtctgataaataattagtgtactctaaatatttactattttatacacttatctatttattatggttaaatttattatcaatggttataaaaatatttctaccatatagacaaaacactagttcttactatagacatatcctatatatatatatttatatatgggtgactattcaat

SEQ ID NO: 85446 - DNA, 592 bp, Cannabis sativa
gttaaacttgctttgattaaaggtgatcatttgttaaggcgcttggcatattaattactatcaacttctttctttttgagtgtttttctttcgaattttcctttaaaagttttattgaagaaagtttttcatgaaaagaaattcaaattcagcttaattacgagaaaaaaaaatgaagtcccacaaggattttggaatacttttttcagtgcttatatttctttaagtgggaagttatgcattttaactgtttaagaaattaataatcttttaagttatatctatattattttactatatattattaataataaaaaggtagataatagtatttaattttagtttcttatctttttaaccatgataatttcaaaatttattgatggggtaatctttcacataatttctttctattcattgtacacaaaagagttggaatctttacaacttttttttttacaatcagtttggttttgtaaagttattgtaattattgttagaattattattgtggactaatataatcatgagcttaatatcataaacacaatcattaactatgcgccctatatttattcactaccataatgtg

SEQ ID NO: 85447 - DNA, 1068 bp, Cannabis sativa
gtatccttgattcttttcgtataacaatcgaacatacaataaaagaactttattgaagaatcaacaccttgatcttccatgttagcatcagcactcaggattagagtgggctattagatcttaaagaatgaacagatttaggtattacagtgtgtactcaactcataagatattgtaatgagattagggttttaatctcacacacaccttaaggtccaaaattgatttctcaattttgccataaataagatttatgattaattctaccaataaacaataattgattaattctcattaatctcttatttcacaagaattaaaataataattattttctctaaaataatatatttctctctttaatattatttaataataatattatatttaactaattaaaatagttttatccaatcaaacttaaaagttatgctgacctcaaaaagtaatcaaccaacagtggggtcgtatgaatctggcactgttcatgtgttcgcagaaataagaatgaaaagcaataaacaacaagatttgttatagaggttcgactcccttgtgatagtgcgtaatgccctactcccctttaagtaatatttataccgagggaaatactatctagattactataggtgggatcttctatagcacccttaggattacaaggtatgaattaatactggcaaaactcaagtgttgagatgtgctaggatagacatgtgagagagaggatgtgaggaagagagagagagtttaacagagacttagagtttagaaacacgtttttggcttagaggcaacttaggtttctaggctaaggttaaggcctttatataggagacctaaaatcctaagtttcaattcaaatcccataatattcgtatagtttgttagatatttacaagacaccaaagtgcccttgattctagacattattcagccatttcgttgggcttttacagcccaattagcagcccatagcctgttgtccacgtgtagaagtgtcaaggaaagcctacagtgcactccttggcaggccaagcctctgtggagactaagctagccggccat

SEQ ID NO: 85448 - DNA, 752 bp, Cannabis sativa
atcatgtttttgcatcctttttagagaaaacttctgcatattctttcaattttagcaacaactttctttggcaagactaatatctgacctcaatatgtgtgaatagttagcaacactgaattaatgagtactgctctccctgcaaatgagatatgtctggtgctccaacttttaattcgagacgccatcttgtcaacaagagtgttacattcattctgtgagattctcttcgagcagataggtaccccaaggtacttaaaagggatggtgcttctgctgaatccaaacaattgcattaacttttgtatctctaattatgtcatccctgcacaataaatagcagacttgctattattagaacagaggtatgaagttctagagaatagcttcagcccttgtagtaccaacttgatactttgaatgtctcatttatagaaaagaagcacgtcatcagcaaaacatagatgattgagctttagctccttacatatttcatggaatccaaactctgctttatttcccacttttttaataattctattcaaatattccataacaagaacgaaaagaagaggagacatggggtctccctgcctcactcctcttttggcaccaaaatatccatgtagagctccattgaagtataaggaaaacctacctgtagagacacattgaatgattagattaatgaatttagttgggaatttaaaggctacaatcatctcctttaaaaattcccaatctaaagtatc

SEQ ID NO: 85449 - DNA, 893 bp, Cannabis sativa
aaaaagaaggtaaaaataaaagaagacaatataaaaagggtatagagtataatttccccaaaaaaaaaatcatcggcaatttgaatactatttcagcattttgaactcaaaaaatttataagcaaaactctgttaaattcatcttcaatcctcttccctaaccccttccaacataaaagtaagaaaaaaaaatcaaaatcagttatatttacctttttttttaatcattctacaaattttactcttatcgtacttcatgatagttttcattcttctttaataaaaattttgccccaacttttccacaaacttacacatccatctacaaagaacacaaatctattatgtttgaatttatgtcttagttatgtgagtgtgtaaagataatctattaaaaagagatatatttgaattaaattttatttagaagtaaatttggttaatgtataaaaaaattgtattcttcaactttttcctttgttttttaatatatagtggtaaatatctaaaatttggtattttgaaaagaaaaaaaaaagagtctcttttttctaaataaaatatttaaatatagtattttaaaaaataaattgggtctttgcttacgaaaaacaatcgttcttttaacaaatagtagtaaaaattaacaatatgatatttttgaaaattaaataagggatcttttaatatgaggaaattattttgtatacccaccttattttatttattttacttttatttttatattctttaatatatactcacttttataaataatgtccctattatacttaataagttaatataaattatgtgataaagttaagtgaagggtgagcgtatattggacaactcactcacaaaaatggttatattttaatgaaatataatat

SEQ ID NO: 85450 - DNA, 858 bp, Cannabis sativa
atatactaacacagtagcttacaacaaatagtctacaacaaatagtctctttcaaatagtctctttcaaatagtctctttcaaaaaaaaaaatatatatatatatatacttacaaatagtaaatatgctggggaataacattgtactcttagggtccgtttgacacagcttttgaaaaagttaaaagctgtttttcaaaaaaattgtagcaaaaagatgtttagtaagaagttaaaaaacaacttatcgaagaatttatggaaaagctatagctaaaagctaaagctggtacaactaagtttttagaaaaagctattttgattaaaacactttataataaattattttttactaaaaatttatttaattatttattatatattacaaaaataaaaatatttttttaaaggaaaaaatatttaaaataaataatatttaaattttaactttttattttatattaaaaaatattttatatttttattattaacaaaaaaatattaacctaagtttcttataaactacaattttttttacaagtgataagaaatataatttaaaaatattaaaaattatttttatgaaatgcatataaaggtatactatgaaaaaaaaaattaaaaatatacaaaaaataaaaaaatttatatataacatatttatatatatttgtgattataattaactagattaaaatattatcattattataatagaattttaataactcgcactactttaaaatttataatttaccaaatacttagctcaacttttttttacagttctactacaactgcttttcccaacagcacaattacagttgcttttttacatagcacaactgtgccaaactgg

SEQ ID NO: 85451 - DNA, 1641 bp, Cannabis sativa
gtgggtgtaacaaagttcttattcctttgtgtacctatatttgttgtatttctcttctgcagttgcgataatttctatccatagcttcttttcggtccctagattctgagcgttaggacagtacaccttggataagttgaaatcctcaaccatttgatagtccaggattagcttagccctgcggtagttagcagtgatcaccaagtccccaacattcaggtgctccttcttatagccgccaaatactatggcatggtttagaaatagctgggtaggggttgtcttgtgcaatggaggaatcctgacccagtctgttagaagatccagacgttcaaaagccttaaacctcgatgaaaagctatgacggtattccttgaaattcttctgagagttaaagggtactggggtttctttggttggatgggcttgaaacttataaaagctgtctttgtacttgtcacccttcttaggaacagaaagaaattcataaaaatacaaaatttctgcggggctgggggcggcctaacccctagcagcataaaaaatgaaagacctgaaagcaagcgataggcttgtgggatacgttaataaggagcaagtccgacaaaaactaaaaaatctatgaagtaatcttatagtggtaacatggctcctgacatgaggtgggtctggctccatgctctgaaactactatagttatggttgggcgtctcctcgtctttgggaagatggtggtagactcctaaattggatggcttgatcccgttcacggccacaatcttctccaactgatgagcacacgtcaaggacgagtgcaactcatcggcttcccaactgttggagcgacagaaatacttcttgtaaggtaccagaccttgcataacatcctccaaaatggcaagctttttagtcgccttggatgaagaaggattgacagtgggggtagcattagacggtacgtttgagtttgacatcgggttctttgagtggagttctagaatttcctgatcgaattcgaagaaactgtgtttgtgaagatcctggagaacttcactcatctgaaagacaagatacccagcaattagcaccctcgtcaaaccctaagtcaaataggggaatgggtcccctaaccattgggaagaggccccctccggatgaaagccaagaagaatcttacgattccaattgtcaaacatcgggtgcaaaacatccaagccataacgaaagagccataaaaaagaaataaaaggagataagggaaaaacagtacgattttcacaaaccctaaacctaaaaatttctaccaaaggctgaaggcaaagattttatttttcttcaaaaagaaatataaaaaacaaaaacaagtgcaaccttaattgaaaattctaagggaaagtcaccattactactacacaatatatatgtatatttttcgaagcacaaactacgatctgctacagtatacataatgttttagaagatgaaagtggaggaagaaggacttagatgatgaagaaattgcaggaagtgtcggaaccaccgcacgacggtaatagctcgcttaaaaacagcagaggaaaagtaaaagaaaatctggggagtctacaacttttctagaaggtttgaaaagtatgaaaatga

SEQ ID NO: 85452 - DNA, 748 bp, Cannabis sativa
  modified_base (704)..(720): a, c, t, g, unknown or other
ttgtagggtactgcatttttttttttatttttctgcatttatttagaacgagcaataaactctggactagtgaaaaattgacaaagaggaagccattgctctggagtcagttcacttggcgggtgggcaacatcattatcaaaatccatcgaacttttatagtattttttgaaatgaacatgtcttaacatctttcgtctcttatatgtgtctgccatttcagcccatgcaatgtttgtaattacttcaaaatgttcattgttgtcaatatcgtaataatactggattaaaagaaaagaaactacgttagcaccatataacttgtatgtaataaaaattaacatacaaatttttttacccgaactctgttgaagactgaatcatgaaacatccttggaactttctcccaactaccataatgtcgtgggacgtgaattctaatctccctcccagtcaaacgagaaaaagtgccactctctattccaactattttacaggcacgaacatcacacacaagaggtagtggcactaaagattttttcctcctatcctctaagtcattaaggacattacaaccacgtttcctctttcctgaagaatcaaaaagctcattttcagcttcagaagcttcagtggcaaattcacactcggtgagaatcctagtaggatctggtgggtcctcactgttaggctaaaattagtcnnnnnnnnnnnnnnnnnttttggttagttttcactctttgtttct

SEQ ID NO: 85453 - DNA, 1535 bp, Cannabis sativa
atgatacggttgattggcactttattgaaagtcttctcaagcagctttgttttccgtctaagtttatccagtggattatggtgtgcttaaaaggtactagatacaacctcttgtttaatggaaagattcaaggctccttcaaaggggaaaaagggctttggcaaggtgacccgatgtctcgtcttctgtttgttctcgttatggattatctgactagacttctagcccatgcttcaacaaagaaagggtttggcttccatcctttatgtaaacagagtaatctgataaacttatgctttgcagatgatttactcattttctgtagagggaacatcaaggcggttaaggtggtttccattgctttccgaagcttttgtgaggcaacaggtctggctgctaacaactccaaatctcacatttattttggaggggttaaagagattgacaagaagaagattttggaggaggtgcaaatggaagaggggtcttttcctctgaagtatttaggggttaaactaagacctacaaaatggaaagcacctgactgtggaattatattggataaactaaacaagaatctaaactgttgggctagcataaatctatcttttgcagggcgtgctcaactcattcactcagttttattgggaatcaggaacttctggatgagtttgtttatccttcctcaaaaggttactgcagctattgataaaagctgtcgtgactttctttgggggattaaaggaaatagaagcaaactgcatttgtcatcttgggagaaggtctgcttacctaaaaatctagagggccttggctttcgagaaggaagaaaatggaacgaggcattgatagctaaattcttatgggcagtctccagcaaacaacataatctttgggttagatggattcatgctatatatatgaaagacaacaatctctggactatgcctatcaaaaatgacacgagttggtactttgaaaaactgttgagactcagacatagaactaacgagcaaagcctccaacaagctgtaaaaaaaggtaagtttcgggctaaactattttattcaaaccttcgaacagttcctagagttgattatgcaaggaatgtttggcatagattgattatgcccaagcatagattcatctattggcaagtttgtaacaatcatctcttaactagagataacttgaggaaattgatgagtattgattcaagtctttgtccagtttgtgaaagtgagattgagacacataaccatctgtttgtggactgcctttacacaaagaggctagctgctgcaactaacagttggtttggtaacttccaatggccgaaggacatatcggagctgcaaaaagggaccccaaaagctgccttcaatttgagaaatcaacttcaaaatgctgttttggcagcagtgttatactttgtgtggtggaatagaaatctttgtgtgtttgaatccaaatatatgactgtgggtagtgttagcttgatgattaaacagataattaaatatagaattttatgc

SEQ ID NO: 85454 - DNA, 1075 bp, Cannabis sativa
  modified_base (351)..(365): a, c, t, g, unknown or other
  modified_base (714)..(717): a, c, t, g, unknown or other
aagttcatcaggaaaaacatttagaaattcacaaaccaccttgatgtcttctggccgaacagagtcaagccgagtggtatccaataccacggccagaatccctagacattcatcacgtaacagttctttagctattagtaccgaaattactgggatctgagatccctaaactgaaccgacaaaatcaaacggttcttcaccttctggttggaagattaccatcttcctctcacagtcagtactaactgcatacttggataggaaatccattcccagtataatgttaaaatcttctaaactcatttctattaagtcagcactcaactccctatcctcaattctgatcggcannnnnnnnnnnnnnnttttggagataactaactctccgacaagtaatagggttccaaacccggattcataactatcatgcggtctatccaatttactaaaaattttggctaccacataagaatgagtggccttagagtcaaacagcacagagaaataagagttgttgaccgagagctgacctgttaccactgaagggctagcttctgcatcagcctgagttattgcgaacaccctggctggagtgggtttcgctgtaatcttcggtgcttcggttctgaattggggacaatcccttttgtaatgccctctcatgccacactaaaagcacccctgccctttacactcccccagatggtgcctttnnnnactggggcactctgggtaagtgtagcgggtctcagaattaccctgcctattgcctcgaccttggttcccttagaacctcttgttctaacttaagccactggatgcagtagatgcctttcttttttaatctgtggccgaaccactacctcccctgctaaaacctaatgtaggaggggtaagagccttgccaacaaccgaagtctcacgagactcaactatgcatcccactgcgccctcagctcgtagtgtcctatccaccatttcatcataggtggttctgtcgtcagtagtgatcatcaagtcgtgcctgatcttcgcatttaacccatctagatacttctatttcttactgaaatca

SEQ ID NO: 85455 - DNA, 575 bp, Cannabis sativa
actctgtgtgcaggtaaaggaaaaactaaacagtgaggatggtgaactcgaggtgtggattacatgttaggggattatcacgatgttttggtttagaaatatatatttcgttaaagattatgactcgattacttttgtaagagttaacgtttaaaatttaatgaataaatcaagtgtttttgttttaaaataatgagatcccatgcttttgttattttcaataaattagattattgtttttgttataaatggttttaaacgaactagcgagtgtgacgtctcgggaaattggggcattacaataattctataattactaagagttcaattacatatatgtactagagtaatcatagaattaaatcattaataaacaagattatttggttgatgagactcaataaataatttagtttattcgagtttaaaattataagtttatggttactgaaaatacagaaaattatgtactaatagcaaagatttattctccattaggtaggtggaaggatgcaaaaaaacttgagactaattatgagtgagattgggtaaagaaaatcaccagctcatagttt

SEQ ID NO: 85456 - DNA, 772 bp, Cannabis sativa
gattagcaacgagttgcacagtatgtttaaaaatcacgtaatatgcctatgttagttagggtgttacaccggcgcaatcgaaaccccaggtgtcggcgacctcatgcccaccaagcggcatcgcttctttcgccgctgttagctggagatcgcaagtcaaagtttggtggttcaaactttgaacagattttttagccacctccggtgtccgtttgacgagccatcttcaccactagacttagctcgtcgatgagaacaacctactctaatcgcccaagttgctactttttccggtgacgttttttgtagatccacccctttccagcgactttcctacgatattgtgtatcgttttgacaaacggttggcgtgagtgtgatttactcgtcaaggtggatgttttgatatacactatccctattttcggtgatgttttcggtaaaataatttttatagccactgatagttaatgtgcaccgcttaagtgaggcttgggaattccaaattgtaaatatagtcatattatatgtcgttagactcgatgttgaatggagaatgcaatggcgatgattatttagccatttgatggtatatgtgagagtaatatctaagattagactaaacaattggtgatcggaacttgagaggttaagattgtcttctggacaaagtttaacggcttgattattagacttaatttttatatgtgctgtataacattagacatattctaaatttttatgatttgcaaattatttgaaaaattaaaaac

SEQ ID NO: 85457 - DNA, 1049 bp, Cannabis sativa
  modified_base (105)..(115): a, c, t, g, unknown or other
aaaaatactcaatgttacaattctcttacatctgttactaccacttccgttaactcataaatatagacacgtggagggcccaaatgaattatatttatttatttnnnnnnnnnnnttaatattcttaatataaaaaaatgaaatgctactggttttttttttaaaaaaaaaaataagagagatacaaaactaaataaccataactgagtgaaacagtgcaatatatgtgaaaattattatgagaactaatttttttaaaacaagtatcatttagtttctgatattaagaattttaagttttaaaataaaaaaaataaatgtaatgcatctggatgcttcacgtgtccatatttatgagttaagagaagtggtagtaatgagtgtaagagaattgtaacattgggtattttttcctccaaaaataaatataaagtatttaagtgtataaatcttaaacatgaagtatttatgccgcaatttatttttaaaaaaatagattgtatcattatcataaataaactgaaatatgtgacaatcaatttatatacttatataaaagcaaaatcttgaagagatgatgtggcgtactatcatctttactttttaatttatctattttaatgttatttttatttgaatctcatattattctactttttccaataaataataaaataacttctcataattattaattatttttgaataaccttttaaataaaatgtaaaaaaattacattaaaataattaaaaaaaattataaaaggggttgagctcgcacaaagtgcagcttaattccctagtatcataataaaataaaatgtagagtaacataggtcttagaaaaattctaaaaaataatattaataatgaagaaaggtaaaaagaaaaagaaaaaacaaagagttattgacaacacttcatattttattcacttaactagattattgttacgtgtattgcatgtaaacttttttatattttattttttatatttgttgtgtatactttttttaaaattttataattaaaagaaattaattaatttt

SEQ ID NO: 85458 - DNA, 673 bp, Cannabis sativa
tagaggaagataaggtgaaggaatgaagagattgctagagagagtaattcttttggtcttaagtgctagtgaaaaaaaaataagaggaagccactatttataacctttagaccctaaccaccaacgctacttactaactaaattgtagccctcttaaaaaaaataattcaaataaataactaaccctttaactacaccccactattcattccataatctctctactgcgtatgactctcctttgagtcaaaccatattcccatcatttgttaattctttaagatttattctccaaggctgccacataatattcttatcactattccctaactaagtttttaaattttaaatttgctcccttaattcctatgtatacgtgtccaagctaagtagattgaagttccctttgtttcttttttttttttttaaaaaaaaaaaaaaactaatcctcattactaagctatatagataatattcctatcacaataccttgacccattcttagcatttggccacgttggcctacattaattaatataacttagctcatcataactatttttttcagattgtgatgctttaatcattttgaattctcaacaaacatatgcataggaacgattctcccaacaaattctatctgttgcttatttctctaactatttcatttatt

SEQ ID NO: 85459 - DNA, 551 bp, Cannabis sativa
ttctatttttattttctatcaaatatttgtatgcacatactaattcatgaattttattaatattttggttattaattttagtattatggcataaattttatgatttgtttaataattagtgcttatttttcttacctatcgtaagattgagaatcaaattgtttggtcatgaggaacatttaaatgttaatttatttaaattttgtaacttcctccaaaattttattaagattcttataagtaattaagtatcctatcgataataattgctagctaaggatgcttaatatgtcgaagaaaatttattaaatattatgaattacaatttatctatcctttcgatagaaaattaatgtatttaattattatatttaatagattgttcttacctgtgtatgagttgttcttacctatgtatgagttctattttattattttatctaagaactatagcatacatgatgatcatttgttattttgcgatcattcatttatgagaaaagagcacaaataacatgatttttattataacatgcatttaatggttattg

SEQ ID NO: 85460 - DNA, 769 bp, Cannabis sativa
taatgattttgaaatgagaacatttactaacatagtcctatgatttagggtcatttgctataattttttaaaatgaggatatatactaatatagttctataatttagggttatttactataatttctcttttttaaaaaaaaaaacaaaaaaatacaaaacttgtaacaaaggaaagaacaatagagcacatataacaaagatctaagaagaagataaaacacaattgttctgaagacactctttatgagttcctaatccaacttggacaatgttatgagcaaatttgttattgtctcttggtgtgaatcgaacaatagtaaatatttacatgtatatttatacattataaaaaaagttactgataatttatcccgttagctatatttcaactttataacaagttgtttataaaaaaaaaacattattaaaagatgaaatgtgattagaattctcaaaagggttgtaactaaatataccttttagttataataaaaaattatttgtgactaatacataatattcaattacaatttaatcacaataaattataattttttttgtgattaatacttttaatcactaactttttagtcacaacgtaaaaataataatttataatgaattataattttttttacttttaatggtaaatttaattgtcattaaaaataaaaatttttgtactaacatatactttaatttcgtagacttgtataaacaatcaaatcaaataaagaaaatacatataaataatgaaggaaagcaga

SEQ ID NO: 85461 - DNA, 592 bp, Cannabis sativa
gaatatattgagtattattgcatatattcagagtacaatagaagagtactttatataatgactacacaccataaccaaaaaaaattaaatgcaatcttcactaaactgaaaaatcctatccctatatatatataattagattgtattaggattgtattctctattttagcataactggaccaaatcctatccctatatatatataattggattggatctcgaggatattgttaaaaatattatatgtggtttaatgaacaatgtatgatatctttcttctctgcattttttctgatgtctcttgtctctgtctaattgtcttggctgtcttcgtatatgcttgcgataaaccctaatattgaagacattcagtactttttgttttttttgttttagttttgtttttatttttttgaaatggggtactttttgttattatcccataattttccaaatttgattccgtcaattttggttgacttgagatcaccagaagtcgtttttcgttactagtaccaatatttgcatatccattatcatgaagatgaaagtaactatcacatgttggtggcattttctattgattgaacac

SEQ ID NO: 85462 - DNA, 562 bp, Cannabis sativa
aataccaattaaaagtaaccaattcaatctgtactcttgcggattgaatttgagttattatgcggattggattgaattcaaaatataaaatccacacttagtgggaatcgaatgcactatttaagtaaaataatactgattggattggatgaatacctctagatcgaaattagtatgaaaacacagttagtcgctcatccaacaaatttaactatcgcatataacctccttcaatggtgtataactgcaattttcaggtggttagcttcctctttgtcccatacaagtagcaactatgtggatagaagttggcaactcaacttgaaagtttgaaagagagagggggaaagaatgtgggcaaatgggaaattcaatatatggaagataagggtaataatacactggccgaccttgagatttggtaggccttagaaaaaaaattgggtcattattaataggggaatttttattgggataattttacaaaaataacaaaaaaattacaaaaatatagtttcacagaattttaaatatttttacgatatttttaattttatttaca

SEQ ID NO: 85463 - DNA, 959 bp, Cannabis sativa
tatgcaatattttaatgtttcttacggttagggaaaaaagaatatatcccttagttcttttacacataaattctctaaatccaatgaccaagctccttatttttttttgtttgaaagaaatttagcaactaattgagagacaaaatcaaaagcttaaatcatacttggatgttcgaactgcaaaactgagggtgagtcgataaataaaaaatttctgatacaagcttcaacaaaattcaagtagcaaaacagcattttggacacgattttagagattcaagaactagccaacaataactaaagtacatcccaaaacagcctcaaaaactcacagttacaaagctcatccaacttgttcaaaatattcacaaagctctgaactttcccgtctcgaagaaataccgaaaggcccttctccacaaaatctgctctcagcgtagacttaaactgcgaggcctcaacgcctgaatctgcaacagtactctcgaccaccattgcgaagtctacaagcttaccatctcgagcgaggttgttggcgaagtcggccaagcttcgtgtgtgggttttggtgggctcccattggagggcggtggagaggggaggagagcgagaagacgaccttgggaggaggtaagttagagggataaaggtttgggatttgggatttggaagctttgagaaggtgggggtaatggcggttatggcgggaaggatttggaggagtgacaatgggacaaggatgactgctaatatgaagctcaactgaataagtgctaattaattaaggtaggaattgaaaatatagagggaaaattttgaaatttaccgcttaaattaaaaaagaataaatattttgtaccagtttatttttagtaatgaataattatatttctctaaaaaatatatattatttattgtaaagataaatattttatgactaatattttagttgtaaaaga

SEQ ID NO: 85464 - DNA, 1065 bp, Cannabis sativa
ggcataaaacccaacaaggatttcatcctgaaaatctaactcgaacaactttggatattgagccctcatatcggattccaacttctatgtagcttcctccaccctattgcttctctagagtaccttgacaaaatgctatggttttattccgaaggacttcgtctttcctgtcaaggatctactagtgtcttttcatatgccaaatctttttggagctctaggttttcataactcaacacatgagtgggattcgagacatatttccgcaacatagagatatgaaatacattatgaactgctgacagtgccggaggtaaggctatacaatacataactaatcaaaccttcttgagaatctcaaaggccttgtaaatctaggtcataacttgcccttcttcttgaaacgtttaattcctttcatcggagatactcgtcggaatacataatctcctacctgaaactctacatttctgcatttcatatctacataaatcttttgccaactttgagaggctagcatcctagccttaatcttctttattgcctcataggtctaaagtacctattccctacctaagtactttctttctctagtttcatccaagtgaataggagatctacacttccaaccatagaacatctcgtacggggccatctttctcatactctaataacgattgttgtatgaaaactctatcaacgacaaatacatactctaagagccttcaaaatcaatcacacaagctcgtagaatatcttataatatctagattgtctttttggactgaccatctatttgaggatgaaaagcagtactaaactttagctttgtacccatggtttgctggagacttgcccaaaacttggaagtaaacttcagatccttatctaaaaaaattgactttagagtccccatctaaccttacaatttcctttacatacaatttagcatactgatctagtgtgtatgtggttttcactggtagaaagtgtgctgacttgttaaatcgatcaacaagtacttatatggaatcaaaaatgcccatagttgtaggtaacccaacc

SEQ ID NO: 85465 - DNA, 1053 bp, Cannabis sativa
aggtgtagttaactagtgttaacatcccccctcaaacgaaaaggggtttgagccattttcagtttggacttaaggtagatgaaccgatctttggacaatggtttggtaagcaagtcagcaatttggtcatgacttggaacatatctaacagacagtctcttatccagaatttgatctcttacaaagtgtaagtcaatttcaatatgcttacatcgagcatgaaacactggatttgcagccaaggcagatgcactttggttatcaacccatatgagaggacagtgagaaagtgcaatctgtaattcagtgagaagagagacaatccatttcaactcagcagcagtgtttgcaagagcacgaaactcactctcagtgctagatcgagcaacaacctgttgctttttagctgaccaagaaatcaaattattccccaagtaaacaacatagccccctgttgatcttctgtcatcaacacagctagcccagtcaacatcggagtagctttgtaggaccatttcagtggctggtgtaagtagaagaccatcagatacagtgcctttaagatatctgagtaatctcttgcaagtgtcccaatgtgaaacagtgggagccttgagaaactgactaagtttattaaccacaaatgcaacatcaggtctggtcaaggatagatactgaagtgccccgatagtgcttctgtagagggttggattgtcaaataactcaccatcttgcagagacagtttagaggtgctgctaatgggagtattgcagactttggctccgtccatatgaagtttaactaacaaatcagtaatgtacttggtttgagagagaaacatacccttggaatctcgatagatctcaacaccaagaaaatagtggacatcacccatgtttttgagagaaaacttattatttagatcagtaataagctttgtaataagtgtctgattgggccccgtgaccagtatgtcatcgacatacacaaggagaataattgcagtgtcaccagtcccataaacaaacagagacgtgtctgacttcgaagct

SEQ ID NO: 85466 - DNA, 529 bp, Cannabis sativa
gtttattctttgacggaattagtgacaaaatggtcaagatgtttaattagtcgaagtagctaattataattgtcaaatttactgtgcgtttttgtattgttgagggaggaaatggaattctgagcgattcaaagttataattttcttgttaatgtgatgagcattcatgtgcaaattaatgtggcatttttgagaaatagtaataagctgagattttgtaactcagtgtacctaggctgcgagacctccattgtgtgaggccatgccttgagcttagaacttggcttggctgagacaaaacaccttagctcgaacctaaggtttcggcactccatataaatcttatttgttttgtcccattaaattctatttacactcaatttattatgagaaaattataccaaaaaccgaaatattaaaatagtattacatgaatgtggttagattattaaagagcattgttattgtacactagtggtgcatagtacttctaaatatgtcagccttatcattagtttttttttttttt

SEQ ID NO: 85467 - DNA, 1240 bp, Cannabis sativa
atgtatgttggcttttgtactatctgacattatcacatcggtacgcctagagtacgactagcgtaccgagcataggctaatattatggtcgatagtactgtatttttttacagtatcacatcgatacagctagagtatgactagtgtactgagtttaggctattgttatgtcaatagcaccgtcgtacgaacattttagattaacagtgtgggtcacggggatagggttatgattgggggtatgggtatccgatcataatctgagttattgctatgttattgtttatgcttttcttactgagtctgtcaactcacagtgctttttctatgtgtaggtaagggcaaagctaaagttgcggagtcgtgagagcgagcaggtgaagattgtacatgctaaggtgattaagcctggagcgtacgatcttttggacatcagggcttttgctgtttaatcgctaggcgacaaatcttttgtatatgaatagttaacttttgtaaatgggatcccgggattttataaatgtattacttcatgtttttaattaaataagcaaattttaattattcaagattttcaataacctccctcattagcaacgagctgcagagtacgttgaaaatcacgctatgtaaagaccacttagtttaaatttagaattagcagataattagagtttaattatgaaaattatttattgctatttaaataattatttatgatgttttatttgaattcagaatgcattttatatgtcatatagtgaaattttataattttgcattttcggtgcccgaaaacatggaacgcggtgtatggctctgtagaatcacaatttagtattttagtatagtgggacggtttagttagaaattgggaatgtcgggattggtcgggaatttagaatttcccaaattaccccttagtaccctttttatgtcaacttagtgtgtgagggcaaaaaggtcattttgcccatatgtgctttgttttgtatggatttttaattaagtgttaaatcttttatttattgttttgttgtctgatgtaattcatctaattgaggaaatccactctttatttcattttattcaaaaaaaaaaaaaaacaagaaaaaggaaaaaaatcacatttcttcttctctcaaactctctttgtctctcttgaaaatcctagggctgctagggtttgttttgttcatcaattcagcaagtttttatcaaatcttagagtaattcaagt

SEQ ID NO: 85468 - DNA, 2500 bp, Cannabis sativa
atgcttttgtttttaagggtttttgaagcatgatattgtggatttattttcctatctgtgatattataattattagtattataattgagtttccttatcacttctgcaggctgttgttagttttgtcacaatgcaatttcagctttgctctgttttcttcacattctctcttggaacaaggacacattactttggccggactatacttcacggtggtgctaaggtttgctttattcgtttctttaaaagctcattttcctttgttattattttcggtgtatttgtgtatcatgattgacttcaatttgtgttaattttaacagtaccatgcaaccggtaggggattcgtggtcaagcatattaaatttgcagaaaactacaggctttattcccggagtcattttgtaaaagggtactactcctctctctctcccccccatatagggaaagttatttttatagtgttatggattgatatggttgtttcactatcgaatatggtgcagttaatataatattttgacgatcgaagtagaaggctgagtgtcaaatttagttattttgtattattgttgttgcttttaatatttaccgagcgaaaatcgtatcgcattttttcattgatgtgctttttcttgtcatcagattggaagtagtgctcttattggtgatataccttgcatatggttacaacgaaggcggtattatatcttacattcttctatccgttagtagttggtttatggctctttcttggcttttcgctccgtatttgttcaatccttctggattcgaatggcaaaagtaagtaactgctctcttttttctttacatcaaactttggtgccacatcgcttatatatatataactctttataatgtttttgtagggttgtggaagatttccgtgattgggcaaattggcttctttacagaggcggaatcggtgttaaaggagaagaaagctgggaagcctggtgggatgaggaactggtaccatttctgatctcaattcgatctttattactttgctgttttccctaaccgatcgccggtaattatgaaaaatggttcattgcttccacaggcacatattcggactttcagtggaagagttgctgagactattcttagtctaaggttctttattttccagtttggtgttgtctacaagctagatttgcaaggaaataatacatcgctttcggtataatctcattaatttaactaattctttagttacgtgaactcttctatccgacttttgacgattccttactttgattcataccaatcttattatccccattgtcttttgttttctagatctacggcttttcatggatagtgttagcagttctagtaattcttttcaaggtacgagtttaacttcaagggttcctgtacgtatataatgtatttcgttacgctttaagactcatttcggtttggtttcaacaggtgttcaccttcagccagaaaatctctgttaatttccagctcgttttgcggttcatccaaggcatttcctttctggtagcactcgctggtataaccgtcgcaatcattttaacagatttgtcagttccagacattttcgctagcatccttgcatttgtaccaaccggatggggacttctttcggtgagttttataattcgctaaaccgttctcttctcgattttatagctttgattattaacattctttaccttccgacgcacccccagatcgcagctgcatggaaacctttgatgaaaaaattaggactgtggaagtcagttcgctccattgctcgattatacgacgcgggtatgggaatgatcatattcatcccgattgcattcttttcttggttcccattcgtgtcaacattccaaaccagactcatgttcaaccaggctttcagccgaggtttggagatctctctcattcttgccggaaacaaccccaattccgggatctgagactaatcaatctccccttttgtattgtattgttgtaagtaatgtaatacacattctaattttgccaatttcttatcgaattttttcgtttgtctaattttttttaaattgtttgagagaggcatagcttagaagcatttgtgaaatagaagtatagcacagcagctttttagtgttataaaatttaccatttccatttccttatttatgttttccttttctttctttttttttaattggtagatttagtgatagatttagattcatggaatcacattcttttatttgaaaatgaattattgcttcttctgtttcagttcaattcaaagtattgtgaaagtttctttttattattttgatgaaaatttgaaccaataattgtgaatgattttcttctcttcttttttcgttttgagaatgacgtttctcctaatattattataaaatataaagagataaaagagatgatatgcccattttctctatcacgaaaattttaatgaaactttgaaattgaaactattcacgtgtct

SEQ ID NO: 85469 - DNA, 609 bp, Cannabis sativa
atattatcctcattgggatgggctccgaggggacgtgatcattttctgttcctgcctaaatgggtaatggggcggggataaggatcattttttatccctaaatataatatgacactcctcacacttacgggtactagtttaatatttttttaataatattttataatatataatttataatttatgtttgtatttttttagtatattagtattctttttataaattttcaagttgtgttttggataataataagtatattaaataataaacaatgtgtaatattttaattttatatagtttaatattttaatgtatacatctaactaaattaaaaaattagaatttctcgtttttaaatttatagctacaagcgattgtcttatttctttggcgaggcccgcggaccttgggtataggtgcaacttggtcgaggttgtgtatttgctattacaattcgattcttactactgcaattaatcttgtctttttgacatagttttgagtgttttattcttgtctatgacatggttttgagtgttttattcttgtttatatgaaatggttttgttttgttgttggttcagcgatttgatggcttgccattaaat

SEQ ID NO: 85470 - DNA, 528 bp, Cannabis sativa
  modified_base (500)..(503): a, c, t, g, unknown or other
gtataaatgttgagttacaaaatttgttgaaatgaagagtcgatatttttgaagtgatcaagtcaagggggtttagtgaatatatttataagaattgaggtgaaatttctagtaatttctgggggttttggcagttaaggggacgaccaatctagacatatcgcgggccttggccaaacgacatatcgagaacattctagttgcttctaatccaattgctctgtaaaaagtttcgggaacacattctccaacttttgtatacacttgtcgtatggtggtagattttgacatgaataaaaaaaaaaaaaagagagagaaattaaaagtccccaaaaacgtcactttgatcagattagtcctcaaggcaatagtcctcaaggtcacacttttcatttgtctgttattcctaattttaactgactcgttttttttttttttttacattgtcacgtgtcaaaatattattggtccaaattattattttaattttaaaaataaannnnaataaataaataaattatttaaaaa

SEQ ID NO: 85471 - DNA, 1336 bp, Cannabis sativa
  modified_base (963)..(963): a, c, t, g, unknown or other
aaaaaatatatacttttcacatcttgaaatgttcacattgaagagtaaatcgcactgatatttttcgtaggcttattcgagtaacatcatgattagaaattatttttaaagtttgagagaaaatagaaaaataagaaagagagtaacctaaaaaagagaaagcgagaaaaatataaataagagtattgaaacattattaaacaaataaaaaaacttggccgaattatttttgataattaaattaaaaataagttatttctgacaatttctctaaaataaatatttttaaaaaaacaaccttaattatatcaaaggataaagatatgtacctcgatttgatcaccaatatgaatgtagagtgcatttggtatataatcaacagcaacccatttgttgtctttccatatttgaagaccagaaacttgattagggataagtatggtaatggctgacatgtctgtgtgaggctcaactcctagggcaagctctggttgtgggcatggtgggtacatgtttatcttcatttctaactctatttcatcttctcccaaacaattctttaaaccctttccctttgataatccaagaccttctgatagcacttcaagaatcttatcagttatcttcaacatttctttgttgtattcttcagtcacttccctattatattatttgttaattattttagtaactacaaattcattatgattcatttaatttttgttagttttctaatatcatgtcaaattatgtattatatattagtttgtattatattgtacaaatagggagtaacatgatgaatgatattttgtttttctaataagtatgcgattttgaaattttaataaaataattatgggatgtttccttttttatgtttttttaggattttttgagttaattagtatatgaggtttaaattataggaaatcttacaaaaaatatgtatatatatatatntttatatatattttttttgttatttttacacttattgtaaaaaaagatagataatgtataaatccgagttgtatagatagtagatttaaagaaagcttcaaaaatagacttaatcttgtacaagaaaggaagttgtctagcatgaataaaattgagtcgtaagtttctcttttgaagagaaatcctcttgtgtatgtaattggtttagtttgattaataaaaattatatttcttgacaaaaaattaataaagcaaattaatttaaaaaataattatgatagaagtgtgtatcgaaataaattagtagcgacttaagtaattaattattagtataaaaatattagcaaaatttgtaagtaaaatgatttttttt

SEQ ID NO: 85472 - DNA, 527 bp, Cannabis sativa
ttgaaatggagtgttgatgatgttgttgttgatccaaaacatggagagggcgtgcttgaaatgctttcacctaacacaacattgaaggagctcgagattaggtactatccagggaaattttttccaaattgggttgggaatgattcgtttagcaacattgttgaagtaactctctatgggtgtgagcattgctccaatttaccaccctttgggcaacttcctttgctaaaagatcttttcatttcaatttgcaagtcggtagtgacggtgggtgctgagttttatgggaattgttctgcaagaaagccattttcatcattggaaacattaaacttctggaagatgtcatcatgggagcaatggcattcaatgcaaaatgtagaggcaacaacatatgggaagctcgaaacacttaagattattgattgtcctaagttcgagggagttttgcctcgcttccttccttcattgataagtatcgaaattacaggttacaagcagtatccattattaagtcttccaagatt

SEQ ID NO: 85473 - DNA, 531 bp, Cannabis sativa
tgaaaaaataaaaaacaaaaacaagcttaatctaagaataaatctgataaaaataaaaacaaacaagctaatataagataaaaggcatgtgaactttagtacattaagatcactttaaattttacaaagaaaataaaagcattattgtacagcaaaattgggaataaaacagaccattgtgtactaattaatctttatagctaaaatagaaagacaatattagacatggataaatgagaccatacaatgcgtatcaaatcattatcaaaaacactaaatgtaacttatttctaaccaaataaaaaacttactctatgatccattctcctcattcacttccttacccaatattccactcgcacatttacatttcacacctactttatcaatttttgtcatttgaaaatctcctaagaaattattattatttttttttaaaaaaaaaaacaatgacaattcaaactaaaaaaaatcataataacaaacacatacacatatcattatgccataatcaatgaaaacttaacatac

SEQ ID NO: 85474 - DNA, 571 bp, Cannabis sativa
tctttgtgtaaccattgataattgatgtccaagtataaacatttctactcctcatttgatcgaaaactcgtctaccctcgaaaattcttccactcttcgaatacatatcgattaaacaacatccaagatgaacatcaaaactcaatccattccttaaaatgtaacaatgaagctctccaccataatcaggccatttcctggaatcgacaccacacaaaggcaaaatactcgaaatcgtaaacccatcaggcttcatcccatcaatctgcatacatttaatcaatcccaacaattcttgatcaaaactctgcttcccaaaaccaacatacccagctaaaaacacactccaagaacccacatttctttgaggcatttcatcgaacacctttcgacaatcaccaaaactcgaacacttggaatacattgacattaatgaattcgaaacaacaatgtcagaatcaaacccaactcttacactcctcccatgaaccaatttcccagccaccaagtttcccatttcacctgaaactttagccatagttgcaagtgtataatcatcacaacaacaaca

SEQ ID NO: 85475 - DNA, 734 bp, Cannabis sativa
gcttccttcacatttttcgattcaaattgtgagacaaaacaaagaaaactaatcaaattaacataccttcttcttgttaccatgctttcttagaatgagagctttaggatgattcagttttactctggtgcttggttctttctggatataattagtaatgatgtttggatgaatcaagatagactgttctggttcatctacttcaggcagcggcaaattcgtcatttgcttcttcaaaattcaattctactgcatcagaatctatatttgctgcttctggtggagtatccaaaaaaactatctatctcgacttctgtggaaaattctaaaaaatctttaaaatcatcaacaaccatattagctgattccaaaacagtttgagttctcatgttgtaaatacggtaggctctactatttaaggaatatccaatgaaaacaccaacatcacttttagtatcaaattttccactatgctcacgatctctagaaacataggaaacacatccaaagacatgaaagtgacttacatttggacgcttacctttccagatttcataggatattttggaagtacttggacgaataaacactctgtttattgtatagctagctgtgtttatagcttctgcccacaatttttttgccagcttcttgctatttaacatcactcttgccatctcctgcaaggttcgattcttcctctcaaaaactccattttgttgaggagttttggg

SEQ ID NO: 85476 - DNA, 663 bp, Cannabis sativa
caaagagtgtcacgtgaaaatttattttccacttaacagctaagtacttatagaatttctagaattataattattactgtcaaaaattaaaattagatatttatttgtaaccaaaaattaaacttaagtatttatatcgcaaattacttaaaaaaaaaatatacaaaatcttattaagtatacataattttaattatataaaagaaatcattgaaattagatacttagtctttataattgaggtgacagtttaaaaatggttaatattttttataataatattatcaagtgtacaaatataaaagtgtatacaacttacatttgtgtgtgagtgaacaaaaaaacaaaaaaaaatctataaataataataataaaaaaaaaaacttattttcataatctttaaataaataccactctatgtctatccttcctcacaccccacaaattaattggcacaatctcactctttcttctttctcctcaaacttctttcaaggtaataataataataatatcacacttttttttttttttttaaattcagtttttattttgatttatttaacctattaatttatgcttaaaggtctacctttttataattaaacataccatcttgaatttcatatttatatatatatttcaattgtttttttttttttt

SEQ ID NO: 85477 - DNA, 596 bp, Cannabis sativa
ggacgtgtgtatagaaatcacccttcccaggtggttcctggcacaacagctgtgcacatactctccatacccacacgaacatcacagtttacctttatccaatccagaggtggaggcgtccaggtatcctttacaggaggcgaaggtctgggcagaagagaaggatgtgcctctgcataagaagaacaaatatagtcaatacaatcatgaatattaggagaacaattgttgtgtaccacatcattgcgcattctccatatatggtccaccacaatcgaggcataaaggaaaacatcctctacccggatacccctctcattaagggaccaaataaacttcacccaatcccagactttaataccagtatcacccacagggaagattccccaaggagacgagcgccataaatgcattgcaacatcgcaagtaagaaataaatgttccattgtttcattccccacaccacacaacgggcaactggtatcttctatctggattcttctgttgataactgcacgaaccgggagagcttgtgagaggatacaccaccatagaaccttatgtcgctccaatatgttactattccaaagcttatt

SEQ ID NO: 85478 - DNA, 544 bp, Cannabis sativa
aaatcatttataaaataattaaatgcttcacatatttcattaaaatagaaatattaaactttaagttttttcaaaaattgttcaaatctatcataatctacatctaaatctaatcttattaattaaaaataatgtagcccacatgcaaattttatttaataagatttcatatttaagcatgtttatacattgttaaacacataattcatttaaacaacaaaactatatattaataattatgtgattttattacatcactaatcataaatttttacagagctagtagctagaaagttctaaaatttattctgataaaatttattctgataacttcatctagaatatatattttttttactgtataaataagaaaacacaatcacacatcattatcaccaataaatattcaatttattttatatgaattcattctaatagagtgaattcttttagattgttatttcacattcataatttcttgcaaggtttacaaatagacctaaggaataagttagtaactgtgagcaaatcttatccacagaca

SEQ ID NO: 85479 - DNA, 780 bp, Cannabis sativa
  modified_base (621)..(626): a, c, t, g, unknown or other
gagagagagagagagagtgaaaatcttttttactactcctattgttattattatataaataattctgaagatcatttattacaaaaaaaaaattacttattatttaatcattagcataaagatatatatatttatgtattaattttggaatggacacttatttaatttttgtgtcttctaatttgaaataaactaattaaagtaaagtgttgccaaagtaacctcttttgcctaaaattatttattttgagataataatatgtgtatatttcttgtttatgcagtcaataattgacctaaaaaggttattgattgaccaaactacaaatgtacttcaagaatgagagtgtaataattgtaaagtttccatgtgaacaatatattggctcaaatgaaggttgttgtttgactgaatttattattagcatttgatttgcattgagagtaccacttgcaagttgatgtttttgtatacacaacatattccaaccaataattctcagagaagcacactgaatcacaatatgcctttaaagacctaagctttgagtttcaaagctcaaacttgcataaattcaacccaaagtgataaaaccagctactagaagctaaaattaactnnnnnnaaacttagaattcgaaccctaagcatttctaaccttaacagtcaccaataccaaaaatcacatacacaaaccaatttcaaaactttaaaaaaatcaagttattggtactaaggtttaccttgcctcaaacctacttgaatccctagctttacac

SEQ ID NO: 85480 - DNA, 1332 bp, Cannabis sativa
ttcataaatttactaaaaattacaaaacaatcactaaaaattacaaaacaatcacaataacataaaatagtataaactaaatacaaatccctcaatcaaattctaacgccagtcaatttttcccatcaaacactgaaggcccaacgccagtcaaccaagatttgaaactagaactctccttcaaataccaaatctgtcaaatgcaaaacaaccaataccacttgctttaacaaacactattaaaattaattacataataatgggtatattaacctaaattttaacccaaaataatatacaaaaacacaatcttcctaacagttaaaaaaacccagaaattgacctaaagcaaaatcagatccaaggagcttcaaacgaaccctacaccatgaaagtcgaaatccacaactagcttcaatcgttgtccaccacaaacgctgcagagaaaggagagagagagagaggcaaacgaaaaaataaaaaaaaaaagaaaaaaagaagaaagatatttaccagaggcggcgacggtaaacttctgctcgtaagaacaatggccatctggggcggcctacggtgtgacgaaggtcggaatgcctgttgggtgttttgggttcttgaatggaggcaaatggatttgtggcttcggttcgaaaacagagagacggtgagcagtcgagcgagagagaaggttggggtcatggctccgttgagaaaatagagagagggtgagaggtcgaggtcggctccggtgcaaaaacagagaggggctgggattagtggcctcttgcggctgagatgttggctgttagaaactagggtttttttttgtgtttaagagagagaggaaagagataaggttgttatggggttttgagaagaaagagagagagaggggtaataattatataaattatttttttatttttattttttcagattgtattttagttggggtttgataattttttattttttttatttattttaaattacagctgtgttttttttaaaaaaaaaaattagggtattgatatagttacgcgccaggtgtgtcagggtacatttacccactcgcgcttggcgtgtcactataagtctcaattttttaaattaataaaaataaaataaaataaattttaatctttagtgacactctatattttcagtgacacacattgcaagagattaatactgaatatttagagtctaatcgtgcatgtcactaaaaattactcttatctatttagtgactcgcacttttgtgcgtgtcactaaatagtgtcactaaaaggccaaattgtagtagtgcacctctccttcttcctcttgttc

SEQ ID NO: 85481 - DNA, 557 bp, Cannabis sativa
  modified_base (521)..(530): a, c, t, g, unknown or other
gagagagagagagagagttttcaaaatgagaggtattttcgggtgtaatgaaaaattaacctatcctaccaattttttgatacacttaaatttattatattattttatacataataaatggtttaaaaaaattcaaatttcccaatataactaaactttaccaattctctcaaacagattataatataggaaaatttgattttttatgcttacatttggttaaaaaaattcccctaaacacataataactaatatttgtaggatatgacaatttttatgatatctctaaaatattccccatttacatcacccccgtttacacaatcgaactcccctcatcggaccccacatcagacacaatcggacccatcagaccctatatcggaccccccattggacctacgtctactacctcgcaaactcacagtttcattcgaccctatcggtccctatcggacctacatctgaccctatcggaccttgcccaaaatcacaaatctgagattctaaaacctaaatcnnnnnnnnnntatctttaacactaaaatcacaaacaa

SEQ ID NO: 85482 - DNA, 731 bp, Cannabis sativa
ttgtaattaccaactttttagtttccacttttgtttatttccttttttagggccataaatgtaaatttcatctatttttggtctataatagaaaaaatctcttctaaaaactataatttatgtgattatgaaaaaaaattgatatatttttttttaaataccaaaacagataaaaaatgtacggaaataattttttggggtgcacttcaaaattttctaaaatttaattcctttggaaagagggggaaattaaaaaaggaaaaaagaaaaacactttatctagtaataaagtggaatagaaagacaatgagatgaggcactttcattttatttggttgaaaaatcaaggaaaagaaaaggtgggcaaaagataatgcagcagagcagctgcttgggcatactttatttattctataaatatttcactttaaggtctgtttggaaatgaataaataaaggtgtacattatgctcaattatggaggagttagaacaaatatagaatatataggaaagtagtaagggacatgtgaatgtgaatatgaaagtgaatatggtggcatatggttaatggtacgtgttgcattattgcatcccaaaaaatgcctccgttccacaccgaggtaaaagtgtccattcatcgatcccatcccaactatatatatatagatagatagaaacaaaattaaaatgaagaaagagagaggaaggaatactttttttttttttttt

SEQ ID NO: 85483 - DNA, 655 bp, Cannabis sativa
ttttgcgctttgatgtccacaattgattctgcatagcacaaacctataaagatttacgtaaacatagcctcaagttcctcctctaatatgtatattataaacaaaccatatataatgatactcaattgtaggtacaaaattgataatatgtaaagtgatttttttaaaaaaaaagtactgaagtggcaaataattttctcatataaagaaaataaaaatataaaaaataataagatttagggtaggttaatatcacctggtcccagttttacattttgatgtcgaaattgatccaacataccaccagttctataaaaatttaaacaaacataaaaatagagtgttagcctcaaggtcctgctctaatatgtatattataaacacaaattaatatataatgacactcaatttatagtgataaaaaaaacacataagtggaaaataattttcaaaaaaataaaatttagggtaggttaatatcacctaatcctaattttgcataaagacacttaattatagatacaaaattaagaaaataaaaaatacaaattgaacggtagagagataaagagaaaagagagtcattcatataaaaggaataataacatttggggtaagttaatatatatacacaatataatctcatggaaataaa

SEQ ID NO: 85484 - DNA, 1213 bp, Cannabis sativa
ttttttttttccaagcagtgacttgctggtttggcattatgatcatacatgggtttatccagtcaatacaggctatcatttagctgcatctttggaggctgcagcagattcttctccatcgacatctcacaattttggtggaagttcttttggtctttataattgccacaaaaagtaaagatttttgcttggaaagtagttcatgatgctctccatgttgcaacctttttggttcgacgaaaggtaattactgattcaacttgctccctttgttcccgagcttgagaatctataggacattcactctttaaatgtaaatatgcgtgttctatttagacattcagatttgatgtttgatttgaatcttgccaactcaatgcatagaggagactacttgatgcacctttcgacctttcactctaaaactaatatggaatttataaattgcaccatgtggtcgatttagtccgaaagatacaaagttgtccatggaggtactgcaagaccagtagcaacacttttttttttgagaattacctacgaaactaccaagaagctcaagcaaaataccatacaaatggtaactctgtttcaaggccttcgctaatccaatcttcagttcattggcatccacgtgcaccaagggaattaaaactgaatgtggatgcaacaaaaaatcaagctataggcattataggtgttggtgctagatactcatggtaatgttgtcgttgcattctcaaaacctttgattggaaattttgtttacatgaaatggaggccaatgctagtttttacagtttaaattgggctctccaattgtagcagccaatcactgatgttgaaacagttgcattgatgctctccaatgctttgaatgcacatttttccacaatttcttctttcaatgacctaaatgtagatatttctagtcttctatccttttttcttagggtcattataacatatgtcaaacattcagttaatgtgattgctcattgtttggttcgacatgtgattatggtataaaattgcatattattacgtgtaattggataaataaatagatttaaattatctatcttcatggatttaactgttacttgaaagtatttatttaatctaattttgtgttaatttttagatttgttgtggaaattgttaaagttgaaagagaggatcaatagcaagcccaatttaattggtctaagcc

SEQ ID NO: 85485 - DNA, 669 bp, Cannabis sativa
tgatctacatgaagcagaatcaaatgcccgggagaagtataacactgctatgaagaattatctctctttcctccaacagaaagccaaggctgcttggatacaaaaaggggacagcaactcagctctatttcatgcgagcatcaaacagagacagaggcaaaatcagattttatctattgttagagaagacggagttcgtgttactgagcctaatcaaattactgaggtattcattaactactataagtccttgcttgggtttcagttgaataatagaacaaaaatctcgaacagggtcattcttgaaggacccgttttagatcattcacaagcaactatgctagttagtcctttcaccaaagaggaagttaaaaaggcagtatttgagatacctggagataaagcccccggaccagatggctattctagtttcttcttccaagacaactgggatctcgtgggagatgatgtttacaatgcagttacctcattcttggaatcagggaagatccttaaggagattaattccactattctgacaatggttcctaaggttaagtgtccttccttagccaaagattttaggccaattgcttgttgcaatgtaatatacaaagttgcaacgaagctcttgtgttctagaattcggcttgtccttcctagtttgat

SEQ ID NO: 85486 - DNA, 539 bp, Cannabis sativa
ttttttttctccatttcattttctctaaaaatacaaagaaaaaaaaaaaaccatctcccaaatcggcatccacatcaccggtccgcacaacccaacttcggcgttcacccaacgtcggcctccaatcaatctcagtgaggtactctctctctcattctctttcactttttttatgatatttgtaatattgcaattgactaattatattattgtgttgagactaatataatttataaataatttttttattacattttaaagattcatatattaattattagttttttattttacaaaataatttagttaatatgtattcatatatcataaaattaatttataatttatttaaaaagaaagtagataataaatttttaatcttttttatgttagtatttgatatatatttacatggtatttttaatttgtatatattttgtgtatgttattttttacaatgttatatgtttatatctatgagtaggtatatatgtttatttatatgtatatgtattgtatatgtatatgtgtattttttt

SEQ ID NO: 85487 - DNA, 842 bp, Cannabis sativa
ctattaatttatgagtacatgtccaacaaaagccttgactatttcatttttggtaacactctttcaccattcttttaacacatgtaatgttctattgtgtaaaatttgccaattttgttcgaataaaaaaaaaacactaacatttgcagatgaaagtcgaagcatactattagattggcctaagcgctttcaaattatatgtggaattgctaaggggcttctctatcttcatcacgattcaagattgagaattatacatcgggatctcaaagcaagtaatgtgttacttgataaagatatgaatccgaaaattgcagactttggcttggctagaacttttggtggagaccaaatagaaggaaagacacgcatagtagtaggaacctagtaagtcatctttaaaaaacaaacacaatttctttaatattcataatctaaaaaaatttattatgtaaatgcagtggttatatggcgccagaatatgcctttaatggtctattctcaataaaatctgatgtatttagttttggcgcgttgatcctagaaattgtaagtgggagaaaaagtagatccttttatgatgaatatagtagtctcaatctcattggattggtaagttttacatacgaaaaatacttaattaatgtcacattaatagcgaaatttgtatttatatttatgttttatttaacattttgttaggcatggaatttgatgagggaaggcaatgaatttaagcttattgagaagtgcttactaaaagatccgaatgacaacatggaagaagcgttgcgttgcatccacattggccttttgtgtgtgcaacaaatgcctattgatag

SEQ ID NO: 85488 - DNA, 1064 bp, Cannabis sativa
ttttgatccatgtggatgtcaagcatggtgctcttcgcaccagaccctcgaacaagaagccttctgtgcgtgcaaccttcatacatgtttggtttgaatctcagtcagctccaagtttgaaaaacttcctgcgcacctagatgttgcacatgatagaggattctcggtcaaggaggctgcagactcctccatccgtgagcggaacaggctgcatgcaacctatttctcggccaggggtgattttcacaccaaaagttctaattttggtcattttttcaccaaatttttaatttttcaatttcgaatccctacatatcaatataaaatataatttttaatatttgaacctaaatatcaaattttgagatttataatatttaattattttaatagtttattatgaattttttgatattttgaagtttgaatataaaaattggttatttgatatttaaattatggatagattttaaaattttgttaacttcttaaaatttaaaattatttaataataagattagatattttaatattagatatatattaaattaaatgatattattattcttttaatttaaaaaattataataaaattatcttacattataaattaaataattataaatttgaatttaacgtagatattttatagatatcctaaccataatatttttaaatttataaattagttattttgtgatatattttattatttataaattataagtttaaaaaataatatttatgactatattatattattttacttataaaaaatttataataatattttataaattcaaataacctttgtagaaatttgaaaaaaggttaatatgagatattttgacatataatttttaaaattatcatttatttattatttttttctcaaaataataattgcctaaccatatctatttgaaaattagtttatttgattattttaattttattaaattataagattagatgatgatattaaaatatttatttggttatttcatatcatttgtctcatatgatatgggaaatttgattttctatacttacatatacctaat

SEQ ID NO: 85489 - DNA, 804 bp, Cannabis sativa
ctaaggaactttaaaatcttaaaagcaatgtcaaaatgctaaatctaggttccaatgaaaagattcaaaattcaggtcgaatgagtcatgttgttttaaattttgttttgactcaatcaaaatctaataccaaatttgttaaatctaatgtttttgtttctggaagttctgtctctacattggagggttcttttatatcagcaaagcacactgctgatacaaaaaagaagcagcacggtaagtttgacaatttcaaagggaaagaagacgattcattcctatttgtcatttttgtgggataaaaggtcacattcaacctaaatgtgttactatgaaaaatatttttaaatctaattattttgaaaataaatatgtttgtcaaaaataaaaatgggctatcaaaaataaatgattggtaggatctccatgttttaaaactattgcctctcacctgtggtattttgacagtggttgttctagacacgtgacatgtgaaaaagattatcttgacgacattagaccaatgcattgtggaaagttactttcggcaacagtctagtgggaaaagttataggaatgtgaactcttaattttgaaggttttcctagactgaagaatgtcatgttagtggaaggactaaaagctaatcttcttagcattagtcaagtttgtgataagggttatattgttagctttgataataaccattgttatgtttataatattcttaatgaaattgtactagtgaggggaccatggccctatataacccagctttcaattagtagatctagaattcaccaa

SEQ ID NO: 85490 - DNA, 943 bp, Cannabis sativa
accctacctcaaaaccaactcaaaacttagagttttcaatccaaagagtaaggaacttacctcaaaactcctctaggttgatttgggataagatttagcttgaaaatgaagaaaaatgggtgaagagaaaccctcaagcatgctggtttggcttgcacgaaggggaagaagagaaggagaagctttttggtgccttagcttctaagttatctcacatataggtttttttctttcttttctttttttttttcttttaaaaataagggtcagcccacaaaagtcaaaagggataaaaaaaaaactaactagccctcacaaactaattagactttttaaaaaataacctaggggcattatggtaatttaataatccattaaaccgacgatctaaaattctaaactagtccagaatatcctcaaaataatccatccattaatgtcatgacatttctgaccacatcgtcaaattttcacagtcatcgggcccaaattatatttttatttcaaaagtggtatcctcgatacccacatatcctaatataacctccgtaattaatcaattacgctgaatataattatttaataaatcctcattaattaccctaagtaagatcataatcttcattaccaacataattacatatttaataaaatatatttatttaaatatcattttattttctgagatattacataggaacaatcaaacagttccaaagagctcggttatatccaatcttcttgtatttagcaaggagttgtaaaatttagttaccttgaattttcctttatgacatgcgaacaaaccatttttattcatgatacacctcaaattataaagctttttaaagtaccaactcatgtccactttaagggtaaactcccaaaaataatagcaatattataaataaaaaagtgaaatattaaagtctatcattaatga

SEQ ID NO: 85491 - DNA, 539 bp, Cannabis sativa
atctttgagaaaccttcaacaaattgacagtaatagccaactaagcctaaaaagcttctgacctcagtagttgatttaggtcttggccaatcctgaatagaatcaatcttggctagattcaccataattctatctttatccatgatatgaccaagaaaagaaacgtgaggtagtcaatattgacacttcttgaacttggcatacaatttatggtcacgtaacatttataacactaatctaagatgttgttcatgttcttcttctgattccgagtacaccagaatatcatcaatgaaaattatgacatgcttgtccaaaaaatccttgaacacatggttcattaattctacaaaggttgtcgaagcattagtgagtccaaaagacatcattaaaaactcataatgtctatacttggtacggaatgcagtttctagaatatcctattcttagatcctcaactggtgataaccagatcggaggtcaatctttaaaaatactattttacccttagctagtcaaatagatcatcaattctaggc

SEQ ID NO: 85492 - DNA, 774 bp, Cannabis sativa
atttttaacgtaattttatagttaactctacatataccaggaaacaattatatttttaggattttatgaacatggatataatttagtagaatttttctcaatttgaaattcagttgtctctttttacattaatgctcctgctatttattataagaattaaatagtggttatttgattttatctataaattaatttatgaatcgtgctcattcttcacgtttcatatatccttttatagatttgtaattgcttatacttgaaataaaaaaaaataaaaaaaaaagaaccgttattgttgatcttatcccaaacattgctataatcaagcctttctttgaacgatatcattacatcttggaaaaaatatttcgtagaataactttgttcatatttttcctcgcaagtcggctagactaagaagacaaatgatccttgaagctcatttaagatgagattttggataatttttgttcaaccttttaagtaagttatttcaaattgcatatcttaaactggttgcatttgaaggcattcaatctcgtaactaacttaatttaagtcctgagtttcttgagacactatccatataatttttcttgtgtttactctactggcaattgtattatcgagacatacgatttttttttttctcgaggcaatctttaatatatgataggtcaccttatccataactaaatatattttaagaaaaatgttaaagggcactagtggtgtctaacaccttattatgtgttaatatcgctattggtcaaa

SEQ ID NO: 85493 - DNA, 698 bp, Cannabis sativa
gcgtcgttttagaccctccacacccagttttcgatcgtgaccaattctttgaaggtatcaacccatatcttcttccacttagaataccttttgatccagatcgaaaaacaaacaacactcctagctcaacaccaatcacattgaagcaaagaatgtttcgcttttcaaaagaaaccatagccaaactcaaagctaaagccaaagctgagataatccatttgtcacccacaaaatccattaataatatatcgtctcttcaagcggtcatggctcacctttgggtgtccataacccggaaccgaagttacctgaaatccgaagacgaagtgaactacattgtaatggtgggtctcaggcaaagaatggagccgccattatcagaagcgtattgtggcaatgcggtgatgtttgggaatgtggagaccacggcagggaagcttttgggtaagaatggattgggctgggcagcattgaaaatgaataagatggtcgtttcgcatacccctaaaaaggcccaagagtacttgaagaattgggccgaaagcccagacgaaataaaaatgaagaaagagttagggtgtgaactgttgacgggtagttcaccacggttcaatgtttatgggaatgattttggttggggaagaccagttactgtgagaagtggtccagggaacaagtatgatgggaagttgactgtt

SEQ ID NO: 85494 - DNA, 832 bp, Cannabis sativa
tgcagtgcggtgcggtttgaatcgcaatttaataattcaaaaccgcaaaccgcaccgcaccgcgcggtttgggaaaaattcaaaccgcaaccgcatcgcgaaaaatttcaaaccttattttttttgcggtgcggtgtggtgcgggcgatttgagcggtttgatgtacacccctactcctcagtatgtaatttttcttaaatctatttataggtaaaacttaatatcaaatcttacataataatttaatttaaaataaaatatataaaactaacttttttttaataactatttataaccgtgcattacgtggttacaatctaatatatatatatacctattaaaaatgttccatacttaaatataaagatatactaggttaatattaggcacaatagatatatacttaattatatttttaatttttattttaattatgtatatttttagttgtattattaatgtcttttatgttatttaataaataaattattttttattaaaaaataaaaaaaaaaacataataatattcaaaatttattgttaattttaattttagtttaattactaaaatatttttaattttataatacttttcattatttattgaaatatcatacacttttctttaattatttgataataataataatagaaatatatatacactacagataaaaaataaagtttctgagttggaagaaatttctcattgtttaataaccattgtttgaatctcaacagtaaaattcaaaaaaaataaataatagaaatatatatttttggtaaaagaaaatgataataaaaagatatactgtgtaactacgaatatta

SEQ ID NO: 85495 - DNA, 966 bp, Cannabis sativa
attttgctggtcttagcaccaaagcaggggacccaatgatctacatgaggcgactagctggcagaatggttgctaagacgaggatcggaatcaagatgatcccataattgaagatgcaaaatttggaaaaagcagttctaatgatgctaatgataacactctagacacacccgaggatatgcatgacgattactgtcaggacaaggccgctgatgataacgttggagagaaaggcagcttgacaagtcagacctcgtggtgatcttaacaaaacaacttcaactagcagaaatcaagttgactcgacaagatcaattcaacgaggtagtgctcacaaagatgaccagaatggaggccataatgaatgtcctaactaaagtagttcctaacatacaagtttctccaacaattgatgcccctgagaaagtcaatccaaaagatattgatgcccctatactcaggcatcaaatagccaaagaagactccttccgccaagcagcataaaaagtctaaagttactgatcaacctcaatagaagaggaaaggaaaccacgcttaaaggtatggtgactagaccaattctagaggcaaagtcacgtagaaaaataagactgacatcagaatacgaaagctagaggcccagaaggagaagcatcaactcagtcgatgatgacatcgatgagatatatcatgtattagacgacagcagtagaagtctctccacaactgatctttgaagaagaccaaatgagaaaaaagaaagagctaaagcataaaaagttagaccttgtgagaatgatttgagaaaccacatcaacaattgcgttactagaagagaatcttcaagtgacaagacttaacacttagaatgcaaagttgaggagttgatgaagatcacagagaaggtttctagaaaataaagtggcaccgtgtcatattctgaggaagaagacacgaagccatgtg

SEQ ID NO: 85496 - DNA, 692 bp, Cannabis sativa
aatccaggaagcagccagagtgactcgtgtataagagccattattccgtgggtgtaaggacccaatagagacttgaagcggggacgttacagagttggccatagataattaacaatttgaagctctgtataaaagtatatattattatagatgataaaaagtattgatatataatttgtttggaattattattaatgtgtggatgcatgcattgcaggcccaccttattcatggagataatacagagggtaggatgcatgagaaaggatgatgatgaggtggtgcagcagaagggtggttgtggaggtttcggaaagggtaatttcgctgagctttttaaatcggtcgaggagtatgagaagacactgcttcaacccaaaaccaccattaattaatgcctaaaaatatctataactatatgtatactcactattattattattactaatcacagtagcctgttaggctgtactgtatgcatgctgaagtcttgcttgaactatatattatatattaaataaaacagcacactcatatgtccggtacgtaagatatatgaacttaattatattatttctttgcacctatatatataataaatatatattccatgtgcattaatatataataattagcacctaattaatgggtatatgctataaactttatatccatcctacatatgatcagtt

SEQ ID NO: 85497 - DNA, 1622 bp, Cannabis sativa
atttagggcacaaaatccaatatttatttcttcatttctaattatttataatttatttttccaaaacctcgataaacaaacacgtaggaagatgctaggcactatgggtgtctttttagcatttctaataaatttatactaactacaaaaaaatttacttttagtcataacaaaacttgttattaaaagtaaaagagtcgtgaccaattataaattaccatacttaagtcacatgtgcttttaatcataatattttttgtgactaaaagtaaattagtgacaacttgtatttaaatattatattttaatcacaaataattttttattatgattaaaagttttttttcttcaaaaaaaaatatattatcatgaaaaataactattttttgtagtataagtttactcagatataactagtataaatatgttactttatggagtaagtatataaatgtttatatatatgtattattttttctcgatatagctgtatattaaattttatatggttttttaaaccatataaaaaaaaaaaattatatggtttattgttttatttttataaaataatatggtttatcctacatgaccttttggctaatttttttttgaatgtaatgtaagcattttgttaagaatctaaaaatatctgtcaaaaagcttttcatgagataattagtaaaccttttccatgataattaaagaagaaatgggaggacaagaaattactagtagtaagttataatggatggatctagaggagattgaagacaaaaattgagaataatagcagataaaggaaaaaataaaaacatcattgaaagtgtgcaaaaggaattaatgtaaaaattgtcacgaaatttatgacttaatttaaacacttgctcaacttggtgtttatccaatttcaaggaccatgagatttccaactcatcttgtaaacgacaaggtactataaatattactattatatttatgaatgtatggtgattttcatacacgtggatcggttattgtggttacaaagtaggggataaaccctacccgaattcaaattctttctcaaatctaagcttaacttatatattactataacgcttatactgttatacaattatgtatccttagccgaaaagaaagaaagaataattgtataaaaatgataatataaatttaggaatttttatacgtgtagtattaagtaccacagtttaactaataaactctgtggttgagatagtggcatggacccgcaaaatcttttttattatttattaacacaattttattgtaattattatttatatgtgtaaagtcttttgtttttcttgacattttacaaaagtgacaaaattaattatgggtaaatacttgggagttttacattaatatacataattataaaattatttataataataatcacaaataatcattcaaaactaacgttacatgcagcaaataataccgtgtattcaatatcaggcaagaatactttgtattcaattataaaagtaaaactttaaaaatagattagctcgtacactttttgtttttattactctttttttggggtaagttgaaaaatgcctcttttattcatcaattaatcaaatttacct

SEQ ID NO: 85498 - DNA, 581 bp, Cannabis sativa
  modified_base (279)..(282): a, c, t, g, unknown or other
aagaaaatcatactcgtcttcttctgtgttccaattccaagaatcttcttcatcaaattttacatcgagattgatgatagttttgccgataattaggttgtacgtacattagtgtgtataaggaagaagtatttactcttaccagatgagcttggtttaattgggccacaaacatcagtgtgtatgagctcaagtggcattgtggctcttgatagtgactcctttagaaaacttgttcgggattactttccaagtaaacatccttcacaaagttgatcnnnntggttgatgcatggaaggcctctcaccatctccttcttctctaagagtttaagcccgccaaaattgagatgcccaaagcgtagatgcccaagccatgatgactcattgtatatagcaggcctttaaacaccgaaacatcatgtagaatattcaagagaaatatttctattctttgtcatgggaactttagcgatcaaattaattttatcatctcttaagaaaaggttattttcttctaagtgaatatcataacctttctctagtaattgacccaaactcaaaatattatttttcatgtt

SEQ ID NO: 85499 - DNA, 730 bp, Cannabis sativa
  modified_base (38)..(40): a, c, t, g, unknown or other
actttatatgtgtttattttattattttagaattcatnnnaggatgttaatgaaacatacatggtagtaaatttagatcctggtaaaatatttccaacagatttagccaaccgatgcgaagtctgactagaattggattttgcttatgactgtcacgtgagaatgataataaatgtaggagacacacagatttatagaggttttgtcccttttgtttagataatgacctactccccttttagttgtagtcactcttgagataattaagtagaatacacgctaaaaccttgtaatttctagctaggctctctttagtattacaacgagaatgtgttttgtaagtgagatatgagaaaagagaaaggcttattgctatagtgctactaagcgtacttgtatcatcccttcaggtttaggttatgaccctttatatagtattggtgtttataagctgtacatagtgatatcatcggaaaataggaaatttacactatatttggaatacaaagtaaataattcacttgttatttttgatggagaattcctatctttgtgggcaatttgaactgttctaaagttgtgagaatgctaaaggcgagttgcaaggcttgtgagaaaaacacaaatgctggtgtgcttttgtacacttggtcggtcagccctgttgaaggttgcccaatgctttgaagctatcactcccagtattaagtccatgtaggattttactggt

SEQ ID NO: 85500 - DNA, 560 bp, Cannabis sativa
aagaagtggagggttggctatgctttggaagaatcaagaagaggtttcggtggacactttttcaatgaaccacattgactgtaaagtctcttttgaaggacaacgggagtttagattcacaagagtgtatggtgaacccaataggagtcttagaaggaaaacttgggagcttttagcaactctccttactcggtcaactttgccttggtgccttatgggagatttcaacaatgtccttaatcagtcagagaaaattggaggtcaaccttatccggtgtggcttatcgaaggatttcaagaggcaattcgattgtgtggattgagagacatggaaatgcatgggcatccttttacttgggaaaagagtagagactctcctagttggattgaagctagactggatagagctttggtgaatattgagtggttaagcatttttcctatggctaaactcactaatttagaaatatctccttcggatcattctccgttactcttggaacttcaagtgggttcggctcctacacatgagtaccggtttaagtttgagaattggtgga

SEQ ID NO: 85501 - DNA, 1051 bp, Cannabis sativa
ccaagtgttatgtgggcaatgcctacactggacaattggtcactgtagcttccatcaacatgtagtttccatgttgattcttcaggtttttgctgctgctctttttctcgcttcttcgctggctcttacttttctcttgaatcttgagagatctcaagaggtgtgttcatacattcagccacgaagtctacaagagccttaccctttatggacattcttggttgatatgtgatatcaaattggccaagttcaatggcccacttgagtagtcggctagatgcttcagatttttttaaaaccgaccgcaatggctagtcggtgtacatcttatggggtgtgcttggaagtatggcctcagctttctggatgctaaaagtaagctataggccagcttctccatgagtgggtatcgacttttggcatcgatcagtctcatggtgatgtagtatacttggtgttgtataccatcttcttctcttgttaagtttgccctcataacatgtcttgtgacagctaaatacacgcctagctcttcattatccagatgctttgacaagacaggtggctgatatttatttttcagcttttggaatactttttcagactccttttttcactcaaattttttgttccctctgagaatggtgaagaagggtacacattttttcgtagatttggacataaatctacttagtgtagcaatacgtcccattaagctttatacttccttgatgattgtgggcaacttcatgtccaaaagggcttgaatcttgtctgggtttgcttctattcctctagcgttgactatgaagccaaggaattttcctgagcctactccgaaagttgagggggttgagattcatgttgtacttacagaagatcttaaagcattcgtctagatctttcacatgcccccagcttttttggacttgaccaacatgtcatccacatataccaccatgttgcagccaatgagatctttgagcatttttttacattcctttggtacgtggcccctgcatttttcagcccaaagggcatgactttgtag

SEQ ID NO: 85502 - DNA, 1284 bp, Cannabis sativa
  modified_base (687)..(690): a, c, t, g, unknown or other
aatttaaatttaaataaaataaaataatatataaaaaaatatataatttaaataaattaaattaaattaaaaaaaaaaactaaaattcgagtatatatagcatcagttcccacgggtatatatagagtaaataagattcactaagaaattatttattactagaaaaaataaaaacaaaaaaaaaaaaaaattcaatttcactcaaaaaattcataaatcgccttaatccacattataatttatagatgtaatccttacaaaagaaatgtcactgagcagcatataacatataattaattatgctaattttagagtaatataaaatgttatgaatgaaatcaaagtttaaaccctttctcttcaactatatataaactaattatatatttttttccaggatttattaaatcgtgaaaattgataatgattactatttatttaatgtttattaattagttttataaagataaagtagtaatttcaacaaaataggttagtttctaaaaataacttctaattctttaataatatgagttggaattattgttcccaatttcattaaaaaaataatgtaattttaaaaattattattagttacctgccatagcaagttattagattgtcacatcataaatttttttagttaccattaagaggtattgcccattaaaaagtgttccatatatnnnnatatatatatatatataaatcagtaaaaagtatttaaaaataaaagtgctgatgaataagtgtcgtgaaagtccaaaaaatgacaaaaacgttattttaataaaagatagtatactgccgtataaaagttataaaaaatatatagtataaatgtaaattataccgttggtaatataaaagtaaaaaaaaagttagtattctgtataatttttcctttgcaaaacaagaaaaaatgaggaccaataaaatgagacaccaaattctagaaaagatcatttttacttgagctttctaaactattaggcctcttgatggatctgtaaaagaaattttaagagaaatcaatacgtctttatagactacattagaaagttggttcatgaaagccgctagttttctaaatgcctgataagtattttgtaaacattgaaggttggaatggaaattaatttgcatttcaagcaatggattgcgacactgaaagcttttagaagaataggttcgaaaattaaatttttgttagagaagaatgcatttactcattaattctagagatcttaaaaaattttagtttgacaatataaaatatttttt

SEQ ID NO: 85503 - DNA, 633 bp, Cannabis sativa
  modified_base (299)..(301): a, c, t, g, unknown or other
tgctaataaatctattagtttattctgacatattgaaacaaaattttatttttcttttcgtatattggaacaacaatttattttatttcatataggctactattatatatgccaataaacctactagtttatgtgtgttagaataatattttatatttttcaatacagagtaagctataatcaaacataatgatatacaccaataaatctattataaaataatattttttaggttcaatctagtaatcacatggttagaaattctttttaaagttaaagatgagagagagagagagagnnngagagagagagagagaatagaaaagataaaaagaaagaaaataggtaaatgatgtattcttgaaaaataaacttaagtaaataaataaatattaataaactttcactcactttcaataataaacaatttttttatataaaaaaacaactaatatggtaaagtatgtattttttttttttttgcaagctattagatatgatggtatatgacatcatcagttgacatcaacacctagagtgactacaaactccataagttgataaatgcaatgtgaaaattaatcatgacactagcgaacaataagcaattaaatactttaaaattgaaaacgg

SEQ ID NO: 85504 - DNA, 656 bp, Cannabis sativa
aaaactgagatttttagagagaaactcttcttttcttttgatgtctgttatgtgtcctctcaacctttcttttataggagctgagtacataacctaccctgtatacaacctacactacatacagcctccttgcactaaccttatcttttaatcagcttgttgatcgataaggttgaatcttattcgtaattaactgcttcacccaagggttcttattaaagataataacccttcctattatactcttttatttgtcaacatttagaccccatattgtatagagaagattgtattttctttatgtagacaatatactaaaactttatgtagttcctcgatacgcgctctatagtcctttaccactttttatagtgaacatcccttgaagattgcttataaatataccttgttgtatacttatttcatatcattttatctattagcaacgctaaaaaatgttatctgagaatagccatgtttcccgtccttcacctctcaatgtagttggtgagttaattgagcttctttctcacgctctatcatatgtcaatgatttacgtagccgtgtacattttatagaacgtacgcttaatgaatatgatgacactaaccgtagggcatctgaatgtcgcgatcatcttcgtcaccttgacaat

SEQ ID NO: 85505 - DNA, 817 bp, Cannabis sativa
gtatttttataatgtgcggtgcagtgcggtttgaaccgcatattaacaattcaaaatcgaaaaccacaccgcgcgatttaagaaaatttcaaactgcgatcaaaaagaatttcaaaccgcatttttttttgcggtgcgaacaatttaagcactatgaacagtttgatgaacacccctaacaaaaggtactaaaaataatctcaggaaaatataataaaatattatatttttttggccaatgtagatttttgacgctcttgatctttaatgagaatgctataaagaatacttaatcacataaatatattcttagcatcttttaatagatgcataaaagaataccttacacacatcctttatatcttcacaataaagtaagaaaaatataatcatttaatatatattaaatagagtaatttgcactataaatatttttaattattagttacaaataaatacataagtttaatttttggcagtaaatttataattgtaaaatttttgtaagtacctaggagttaagtattaagtaaattatgatcaatgtagcaatccttaatttatttaggttattaatttttattttttttcaaaaaatattagtttaaatataacgataagaaaatgacaaatggataattacttaatatttaatcctcagatacttacggagttttagaaatataatttaggtattattagcacaacaaaattaaacttagatttttgtttgaactaaaaattaaatttaataataatatattattattttaataagttttagatttacttctcattgaaaattttagaataaaaa

SEQ ID NO: 85506 - DNA, 1120 bp, Cannabis sativa
atataattaaaaaatatttacagcgattgccatctcttacttcaagcagctattttctacagctaataatggtgttgatattcaagagactctatctaggtgtgttcctaatcggatgagcaatgaggataataacaagctgctggagcccttttcctgtgaagaaatccaatcggctatgttccaaataaatccattgaaggcccccggcaaagatggactttcgggtattttctttcaaaaaaactgggagacggttggcaaagaagtagtttcggcatgccttgagatactaaataatgatgccgattgtggaccaataaatgaaactcttatttgcctcataccaaaggtccctaagcctacaagaatgtccgaataccgcccgataagtctttgtaatgtggtctataaggtagtatctaaatgtcttgctaaccgtatgaaacaatgcttgcctaatgtgatttcagcaaatcaaagtgcttttattggaggaagaattatccaagacaatgccattatcggttttgaaagtctccattgcatgagaaaaggtcgcttcgggaacggaaggaaaatggctgtcaagttagatatgtccaaggcgtatgatcgtgttgagtggaatttcctagaagctatgatgatgtctttgggtttcgacaacaagtggattttaaagattatgaactgtgttcgatcggtgtccttctccatcctcatcaacggttcaatcaaaggcttctttattccggagcgaggtcttcgccaaggtgaccctctatccccttttctttttctattatgctctgaaggcctatcttgtatgatttttgaagctgaaagagctggaaaaattcatgggttgcggtttggtagcttggatcaaaggttgtcacatctcctttttgccgacgatagccttatattccttgatgcaaccatggaagaaggaactagcttaaaagaagtcttgacatcttatgagaagctctcgggccaatgtatcaatttggacaaaaccgaaatgtgtgtgggaggaaaggttaatgattcaatggccattgctttagcatcaaatatgggagtctccttagtaaaaaatcataccaagtac

SEQ ID NO: 85507 - DNA, 658 bp, Cannabis sativa
ggtcgatgaaaaattttcaagcctttcaataagagaaaaattgagatgacatccccattgcaaaaaaaatagcaaatcatccgcaaaacacaaatagttcagcttcaaaaacgagcatatatcatgatatttaaagcttagccaagttcccaccctcatcacaatttgagataattattccatatctaggacaaacaacaagggagacataggatccccttgtctaagccctctcttgtcttcaaagaaaccatgcatagatccattaatgagcaaggaaaacttaggagttcttatacagtcctaatcaagtctttcaacctttgagaaaaacaaagagctttaagcatctcttcaatgaaattctagtactctaaagtgtaataagtttttcgcaaatctattttgatcatgcagctagacttgtaatctttccatcatacttacttaaaaattaatttagttcaataattatttattaaaattagttcaaaacttctaaaacttaaacaaacaaaaccctattaatcgcaaatctagttttggggctgttttacgagtgtgacagacagtagtcctgtgatccgtaaggggaaataccgggtaagctgtgcaatcccacatcacctgggggaggtcaagtgggatgattctgaga

SEQ ID NO: 85508 - DNA, 661 bp, Cannabis sativa
atttaaaattaaaattaattaaaagaatttaattttattttgtcttttatttgtttccttctccctctttgagactgaatctgaaagaaacactaagcctaaacctaaaattaaatcccaaagttgaaccaggatatcgactcagcccaaaaatcgaaccccttctaatccataagcatgttattaacccctccctctgccagtttcatcaccgttagacttcgaagaagggtcggttctcaactcatacattttcttgttgctcattgtcgtcggagggagcttctcctcccaatcattggcggcatcatcgtcattaaggtggctgctctcgtcccaatgctctcccacacccaaactctttcttgcgaatttcacagaagttcctcaagtttgtttgttgttgttgttggtcaacaatcaaagccacacatatctctacccattaaataatttttaaatttttatcaatgtaaaaaacaaaccctttaattctttatgtggtatttttataataaagggggaaagaaagagagataagagatagtagtttataattgtctttaatactaattaatataataacgaaagaaaattgtgatgatagaagagagaagaagaggagtatgttctggggtgagtcggtatttgggatttagtt

SEQ ID NO: 85509 - DNA, 710 bp, Cannabis sativa
  modified_base (655)..(660): a, c, t, g, unknown or other
taatcacattattatgcctattaatgtgaaattgcaagatcattggatatgtggtcgattaaacatttatgagtggcagatatacttgtacaattccttgaggtttgacaggtttacatcagctgccaaagaggcttgcaagcctttttctgtgatcttaccatattatttctctttgttagactttcgaggcctctgcaatgaatcaaagtttagcactatggaactgttttccattgttcctgttgatgggttacctgggcaggtcacaacgtaagttctttctcatgtattatgttatattattttttttttatttttattttataatttactttatggtttttcttttattttcttattttttttggtgttgtcctgttgttgttattcaataactgtcggttgtttgtagcattttttgttgagtactttattaacagcaaacccattccatctactgattttgacgtgaaagttcaccgcgatcgattggttgtgtcgttttatcattatggcataaagaagcaacttgaaaacattgaaagtgaattcgactcacctccaaaccttcagaagaaatgatttattttttttcaaacatacttttgttgctttagttttatggcagtattattggaaattattttaccannnnnntagatttactcacaagtatgtttattaacatcctaaataagaactttcta

SEQ ID NO: 85510 - DNA, 622 bp, Cannabis sativa
ttgggctgttgggccgctcttcatatatgaggaaactaaggaaacaaaccgtatcttacttgtacttaaattaaattaactcatatatatagtttgaataaattaaatttaaattaagaaatatatatgactattgataaatttataaaaaaaacctaatcatatgattttaaatttgatgttattaccgtattttacttgtacttattaatataatttttaataggtttgtttagtatataaaataaatcaaataatatgttaaactacttacttatatacataatttaagttgtaattttttttttataaataaaatataccaaataaaatctactaattaaaaatgaaaaaatagatcgaattttatttaattaactttttagtttttaaccaaaaggacatttttacttcaagaatgtagaagtccaattttttcgagtttcatctatttatcaatttttgtagggaatatacttatttagtactctgtgttttctcaaaaaaatatatttggtatttgttataaatagtattaattatgtggatgtccaaatcttttttttgttaccattaatgtaatcaacattccctttttcttagtttccctttctcttagttt

SEQ ID NO: 85511 - DNA, 1453 bp, Cannabis sativa
caaaaggttccaagtattattagtgcccaataataatgttcctaaacaaacatctataattactcagataaaaaatataatgatattgtgcacgaaaaaatagcacacaataaccagttctttaattaatcatattttttcaaactaggacctactgatttagaaaacagtattgtatcattaaagataatatatatttttgaagattaaagataataatattttgatatatattttgtggaattttttccaaaaaaaaaacatatatggacagaaaggttaattttgacaaagtttaagtccatttatctgattactcatccatccatgtgcgtgtacctctttgaaggatatgatgtgttaaattccttggttttttagttttattttattcactattattataagttatattaaagatggaatccttgttatgctgatatctataatgagaaaggtaaggtttttaacataatctaaatggtaatgcagaaatattatacatataaaagttaattatactgatgccgatttaatataaatatatttctactaattattcttttgttgatggtttgtttatgctagttttatcaagtatataattcttccataatgtcttttttttttctttttcttcccttagttgcgtacatctgtctcccttgaaaattgaggtaaatttatgctgcttttcattatgtagtccccttttacttgatattgtgtacataatagttactagttaggtcacatcttgaaatgaaagccaactacatatataatatttttttttgggacaaaactaatgcctaacaaaaacaagcaaccaagagattacagcttgaccacatgaggttcgctttgggagacacatggcggctaataagggctgcgccactttatacttttggatcctatacttttatctttttatgattgagagtttctagggttggatgtattagaaataatatatagtaatgtttagagaatcaatgaatatgtaaatgttataacatataatattattctaaacacagaatctgtagatgtatctattcactactatatattaataatagtgtgtttactatacaaacaaaaaagaaagtgttgatgattagctctcttgttttctcgttgaaaatctccatgttaagtaccttaattatgtttcttgtcttattgaaaatctctcaaatctaatatttttgctttctaatagatgggagtgggaaaatttgttcttaattggtaatggcaagtacattgttctccattggggcagtttaccaaaactagatataatccaaattcagcaaaactattttatctgacagaaacgaacaaataaatgttacatatataataataattaaccaaagtgtaaaaagacattaatactgacgtttgatatatatgttactgttacctgtttctatacatcgat

SEQ ID NO: 85512 - DNA, 513 bp, Cannabis sativa
tgaaatttgtttagaaaaaaaaaatgctttgaatataaatatttattactattactttttcattagcattttcatggttttaatttcttcttaattttagttctcactcgtattactatacattaattcgaagcaaatggatggtacattcctaaattaatttctgaaactgaaagaaaagaaaatggattcaggtaattcatatataaatatatatattttttgtatattatgtattattctacattaaattaagatcaaatcttcttaaaaatttcatatgaatttcattaaatgttgacacaaatttcatttttgtttcagattgggcaaatcttccatgtcacctattagaattgatttttgaaaagatagaagcaaaatattcattttcatttgcttgtgtttgtctctcgtggcgcgacatagcaatggaaaatcgaagtaagttaatcgaactaaaccatcatctagttccaaagcttttgattccaaatgaaagcgaagctaata

SEQ ID NO: 85513 - DNA, 1384 bp, Cannabis sativa
  modified_base (291)..(313): a, c, t, g, unknown or other
  modified_base (1161)..(1181): a, c, t, g, unknown or other
tataattttataaatattaaattaaaatttatatttagagttatctaaattaggaattttgattaaagaaatatatgttaagacaaatatattaaaataagtatcaaatgaaaatacacctcttaaaaataatgagcttgagttataaggatatttgatctctattattggtcttacatggttaacaccgttaacaccgtaatgatctcaaaatctcaaaagataagtattttgtaagttttcatctctattagactgtcccctacgatgactacttagagataaatttannnnnnnnnnnnnnnnnnnnnnngctcataaaataagaataaccttagctgtcgcctaccgagacaacgtttgattcttgttttaatcggataaaaggttgctagaatggtgtcaattttagatgagctgactactctattcaattaataattcctttgaatttcacctaccgggacactatatcagtttgttgaaaccttaaaaattatttaagatgtgcttgttttgtattttcacatgtctttcttacttgctaaatgtataataatttctaaatgtgtatgaatttataatgaaccatgttgttttctattattaattatagttaaaaattttgagttggtgtaacttaatttgtcgttataataggacaaatcgtaaaggattgacatccattagacaaacataatagtgttagatctcaacaaataagtattagtaaatgcaacatatagttgtacatccaaagatgacaacttagactagtatttacaatatgaaacaatgaagaagtttataaaataagaatgactttgactctcgcctatcgggacatcgtgggattcttattttaatcaaaattatcctttatttttcctcttagttttttcatttagaaattgcttagaaattatatcatggacaaaaggtttatacttcatttgcttatgatgtcttcctattttattttatgaaatcgaatggcgcaaatgactatattctggacattctatcccaaaatgatgtaaatccttaatcttacaaatctcctacgtgtatatgcttacttaggcaacctaaacttagagttatattagtagcagtggttgaagcttgaataatttctcattgtatatttggtataaattnnnnnnnnnnnnnnnnnnnnntagattccaaatagaaattttaaattttagttatctagaatacattggaccatacagtatggctttcacaagttttaatatcaattttttgtcaatggatcgaaactatatgttagtatctttgcaaaagaactcaatagtgtgaaaatgcatcctggtagttgcattaactcgtacctattgttgatgaatctgaaattcca

SEQ ID NO: 85514 - DNA, 708 bp, Cannabis sativa
gatttaggatagaatatcctacagaatctgttgggcttcatggcctttcatccttccaaagattttgtagtgcgacaaattcatcaccgtgtatggtatttccactcctatcaaagctaaacataagcaattgttcaagaatgaaagcacaagcaacattatcaacacaagaacctttcttcaataaaaaggtaattacttaatttttgtacctaacattttaaataaatatttttgtgtacgaatattacttctttataaacccataaaataatttaatttagctaaaactctactggaaaaaattattattgttttatcctatacttcagaaataaattagatatgcatggtttattgattccaatcacacaaatcatgtaaaaacttgatgttgatgatatatatagcagtttaatggaatcaatagattaatttagtaatttgtataatacagtttttgttgatatgtaattaatgggtagatttattattgtcatcttatatatactctttttattcaattattacaataattaatatatttgcatgcaggtttgttttcctaaattggaggatttgactatgatgggaaccaacatagaaaagttatggccagaccaacttatggtatcatcatcatcatcaagttcttacatgcaaaacttaacaaccttagaattggaaaggtgcgataatttgaagtat

SEQ ID NO: 85515 - DNA, 1095 bp, Cannabis sativa
ggccaattcgtttgacttcattattgacacagcatctggagatcatccatttgatccatacatggcattgttgaaaacatatggtgtctttgtcttggtggggttcccaagtgaaatcaaactaagtcctgtcaaccttaatttgggtacttaatacatcagtgtccttatcaaattcagtagttttttttgtcagttttgtgtgtcccaaatacttgtgtgtggtgacatgagacaggtgataaaaccctttgtgggagcacagtaggtggcacaagagagatacaagaaatgttggacttttgtgctgctaaaggaatacaacccaatatagaagtgattccagttcagtatgcaaatgaagctctcgagaggctaattaaaagagatgtcaaatatcggtttgtgattgatattaaaaactctatcaaatgagactctgcttgatacaacagggatctcaaaccaattcataaacactgtcaagtgtcttaagtgttttggtttagatgaatttaagtaaaatagtaatggcatattttgtgtgagttgagttggactgaattagggggtgttgtgttggtgatctcaaagacaatataaacatacataaagtatactatctatctatctttttttcttttacttttgaaatgtaatagtaatgtaatggaataggaatcggaatggtaattaattataatatttggtttgttgttaaaatgagtattgtaactaaaattattgtgtttggtttagtatgagaatgtaatggaataaaatgtatattgaccaaaatattcttattacttttattttttgtaattataaaatatttaaacaaaaagtaaaatagacttttgaatttcttttattatatttttattataatactatattaattttgtaatgaattataattgtaatgaccattacaatagttttttattgttatgaaaattatttcatataatgtaataaacattacaatgtaatgaattataaaatttaaaaaaggaaagcaaacaaagtaatggacatgttgattactattacaattcctaatatcagtcaatcctaatatcaatattcttc

SEQ ID NO: 85516 - DNA, 990 bp, Cannabis sativa
ttatagcaacatgccattttatttgctcttggatttcttgatcaaacaaatcatgaaaggtggttctaatcacagcctcattttattcataaagaagttggtattcctaagaaaattgtcaaagttgaagacatttcgggtttgcctaactttttaatcttttttttctttactctttatcttttattatggttttttgtgcgtaaaccactattttatccctgatttgtctgttttgaatgtttttgagttataaatttagttgtgggacatcaattgtttaatttaactctccatataccacacaaaattgtatgagtttaactgcatatcttctgacacatatatatatatatgattttaattttttgaatagttttatatttttctatttcaatctccttctcaagtttttattctttcgatattattacagattattgttggagatgatagacaccttgtggaggtcatgtgttgtactaaattatatattcaaataataaagtagacataagaaaaatatccttaatacataagttgtttctctaatatagaattggtagattggttcaagtggttggattacttaaaaaaaatgttacaattaattgataaaattttcaactattatttgctgccatttatcctagataatattgaagataagaatattgaagcctttctttttctcgaattctgtatgccctggttcaattttgaatttttttaaattatatgatgcaaggtttgttagaggcttgtcaggatcttcgtccatgtatttccaagtctcaaaattgtctgaagaatcttttcattgctcttaatttggctattagaactctcattgaaaggagatacgtagaactaaatattgttggaccaaaggtaattagtgtaaatttgattgatgcatgatttatattttgcactaaaaatttatcttctcaatcatattttatttatgtattctgcaaaaaataatgt

SEQ ID NO: 85517 - DNA, 2656 bp, Cannabis sativa
ctaatatataaatggacaatcgatgagtaataattcctattcacatcatcaactaattaactaattaattaattatttgtttaccacatttgtcaaaaagaacaaattaaaagaaagattaaagagttttaattggcctagctaaagaccccgtccgtacatgttcaatatggattatatattatttactattatgatgagaggttaattatacatttaggaggagagctaccgtcaacttattcttacaattttttagtgaagttttacatctagaaacacatgttgaaatatttttttttcaattttttttttcatggcagtgttcattatgcttacagcatcatcgatgcaaaatttttaaaaaattgcgaatagtttacagtgtcgaaaatacgtttgaagttttttgaacacgcgtggtaaactaaaatatcaggagtttgttttcggtactgtaaactatttaaaaaatttcaaaaatttacaaggatgatattgtaactataacgaataccgctatgaaaaaaaatacttcggtatataattttgaacgtaaaagttaactaagattgtaattagaggttgtaattagcactcctctatatttatttatttttcttaatgaaaattcccactacattctatccaaacagatcagtctattataaattaattagacacaaataaattataattttttaaagatgtagggtatgtaccatttattaaaattatatatataatctacaatattacacactttaaaggagtattttagtagactcttatatctattttgacatacaaatttttattttattttaattttttttatgatcatatacgtgcgttatagtgatttaaaactatttgtgtaaatttttagaaaatttagaataatttataatacagaaaacaagatttacatattttattatactcgtgagtgtttttttttttttttaatacacttataataagtactgtttaatattatttccttacaaaaaaaaaattaaaatattcttctaaatatcaaaataaatagagtctaataaaaaaaaaagtttcctataaatatatatttatgcacttataatgggtcattgggttgtgtaagctgtgtagatataataatgataataattgttcaaaataataatataaggtaaaataagtccacattttcaattgtggaaatgtgtgggcgtgagaggatgttattaagttattattacctacatatactgggggaccctaattaaaagttgtacatatataaatgaggactaataataataataataataatattgtaacataaagacccatatatacatataattaagtagtgtttggtggctcagaaagttggtgttcatatcatatatatattttatatataatacaactactaccagagatcttattattacaatggattgggaccattaataactagttttggaagctcaatatgcatgggaccctaacaattgaagaatgatcttgtcattattaacctatctaatcacaagtttgatcaacaatttgatttataactatactactatatatacaaatacatatacatatacatgccctaattttttagtttgtttgataatttatatagttactagtttgttttttcttcttcttgccatttaccataataaatagtagcaatttagttcaaaatgtacaaaaatagtagctatatatttgtagagatgtatgtcgtgaatacgaaattgatacgaaaatatagaatttcaggcgcgataaaatacaaaaaatatgaattttgactcgacacaaaaaatataaacttaaacatgacaagtacttgagtacaacacatataaataatttaggttcataggtcaggctgaactttactctaaaaatatggactcaagacagacgacacaacctatgtatttatataagttggattagacttttatatttaaaaatgcataatttgagaatgtatctaccatagttcttactttttttaaactatgttttatccaaaaaagaatttaaagaaaaccctatcatgaggttgctagtagtggttgccacacaaggaaaataaaagcatatcaagggactgaattggtaaatatgaaaaactcgagagtatgtatgctaaaaatcctattttatataaaaaaaaatagtcaattgtattgatttggtttcttattaagaatctaactttttgtttgagaaattaataatatattaaaagaagacgacactcatcactatagtgattaggggtgtgaagatgctaaatatagaaggctagccctaataaaatattggtgcatattaattaaataaatccatacaccaaaaagagaaacatatcctttatataataaaatagtaaagatattttatatttattaaccctaaacaattattaataggaatatacacgaaaaaaagtagtccatcatctaattcattgcaaatagacttacaaaatacattgtctttaattattgccaagttatgtatatattatatgttggcccactttccctactagtaatatatataaatatatctataactaagttttgttccatggggctcgctctaagattttagcagcccatggttggcaaagcatgct

SEQ ID NO: 85518 - DNA, 565 bp, Cannabis sativa
tgtaaaattttcccaattttctagtataattttgtaagtttccttaaagacaatttttccatgtaatatatgtaacatttaatttttaaggagaagattaaacaaacaacttgtgtaataaaattcaaataagaaaaagtaataatgttatacaaataaggtaaaaagaaaactattgtttgtctgtattttttttattttttccgtttcataataaatatttgaaaatgtgaaatgcaaataaggtaaagagaaaactgttataatattatctaattccatacataaactacattttaagacacttaatatgaagtggttgattttatttttggatacttcattgtcattggttaagtttgaaaaatgtagataaagattgagtttattgttttaaaaaaaaaaggcttttttttagagcaccatggtaaaagaaagaaaattggagtgaggtggctggatttgtcaaagtccgacagctcaaggaaggtgatgaagaactaaatgcagccaaagtctcacttggagttcttggggttttctcacagcatatgtcctcgttctc

SEQ ID NO: 85519 - DNA, 520 bp, Cannabis sativa
tcatttgctcattcacgcgctttcttcttcttgctttcagagctccttaaaaacacatcttcacaattagagtaaaagtaaagtgaaaacatgtaaattttcctaaaagtaatacttaaaatttttcaataaatatttattaatattagctattgagtaggcccgaccctgattataggtaaattatgcttgtacttaggacctacttaagtctatagtccgattatttttttttttaattacacaatttttttttatttttttaaaaaaatatcatatttttctgtaagagtttaaaaatattttttttcttatcttccactatagcttgccgttaaacgtttaaaatgttatatatctcactattctttctaggattaattttagtgataaattttttattttagttacaaattttattgtaattaaaagtgaaatttgttatagtatataaatatgagaattcgcacatccactattactatttctgctgcactatatattgacaatatcttacaca

SEQ ID NO: 85520 - DNA, 537 bp, Cannabis sativa
aatccgccgatattaatattattaccggcagaagtccattttagtcgctaatagtcattaatagcgaccaattaataccggcggattcagctggtattacttattaccggcagtttggataattaatactggcggaggtctccgccagtactatagaaaattcttgtagtgacaagctacgttctcaacacgccaaatagagtaaacaatggctgaaagaacatccaagtagacattcttttgaaacctattaatcgtgcttttgtaatccaattatacatacaagaaatggtgcaaatatggtatgaatacctaaccaagctaacaaggattgcacacaatccatactaaatatgtattcaaaaaaagaggtggttatgggaatcatctcatacaacagatacaacaatttatgtaacaccttaatttatcggcatgccacgtatgattttataagctagtttaatactaatagaataattaattattaaaaactgtgataatattaaaaacttgagtaaaataaaatactaaaaa

SEQ ID NO: 85521 - DNA, 507 bp, Cannabis sativa
acatcccttctagttgaacctataccgtttctagcttaatcactgctagtggcacctaggatgttgcccaacttcatacacttttccccattgatatttgtcacgccatactttccattcccctccccaatacccaaacacttgattcactttactggccttttacacctcatggaaattacactgtaaactcaagctaccaccatgcacatagcttagctacactaacagaaccttctcctccagactcttctacgcaacataaatggtgaaaatctttttggctccttcctattccctccaagatcaagcactttgcttgaagggcttacaatgatgcgctccccacagatccaagcttcaacattggtgaatcattcataatccagtttgctgccgctgtcaagtcgttgaggagaccctaacacatgctctttttggttgttcaactgtccataaggtatggaaactaacccccttttatgaacatattactaaatattgttg

SEQ ID NO: 85522 - DNA, 1101 bp, Cannabis sativa
atctttggttttgtgtttgtctacattagtgggagagagagatgaaaaataaacatatgagactttgtcattttagagattttgtgcttaatttatatttgcataaattgatctaaatgacatgcaataatttgagaaaaagcatttcacacacacacacacttggagtaatcaaaattacaatgaaacttgttcttgaaaattttacaatcattggataatctttatttgttttttctctaagctatgttcattaatcaatctttaagaaaaatttggagatcaccaactttagtgtctgttaacacagattttcgttaactaaaaataggccttttcgtaataaatttaacacagaaattatgaacattaataaagtataataaatataataataacaccagggattttacgtggttttgcagttaataataatatataatatacaattaataataatttctctccaagatttttttcgtcccctttttctgtagaatctgcccctatttataggaacataggctagcagttatttatattcaaattttaattacatgatcgtttcatgaaacgtgagatttgatcacgtttcatttaaacacgtgtggataacaattgataaccgcataactgtttatcattcttatcttcaaggcggttgacgttgatttggacaatggtatctcgctttgcctaaagatgaccaatgatgacttggttagtcatatgccttccagcaatggcatgagcaccagtgtactgagaaaacttaagaactgctctttgaccataaggcctcgcagactggacaatcatgttctacgtatttccaagttgatacagttagttattataatgtggaaaatacgctaagtatttaacagatgattcgtctcgtcagtattctcttatgtatagcgaggtagatgcctcgctatatattgtatgtggttgtttcagattacttcacttattctttttaaccttgtccttgaatctgcgtcttccgaggctggatggtgtctcgtcaatacaagaattaatagtttgggtatcattgtctcgcttaagactatacagtcagcgagttatgaatat

SEQ ID NO: 85523 - DNA, 1141 bp, Cannabis sativa
  modified_base (39)..(60): a, c, t, g, unknown or other
gtccccatactagttgagaatatactgcttgtaagactnnnnnnnnnnnnnnnnnnnnnncaattataattctaaagttagaccatgtaatagataacttttaatgtgattttctctgatttttagctcttgcaatcggacgactggtgccatggctaaaacaaggtccaaaaatcatggaaaattgaaatctgctactaaaaaatcaaagcgaggtacttcgaaaggtgtttctgatgctgagcggactgagttcctggagcaaattgatgaaatcgatcctcttgaggtctcggaggaggagatatatcagggagaagggtgattctgtgatgtcgtcgatccatctctgatatcccccaaatccatgactgaggcgcgattgggacaggatgcggatggaaatgatgttcggactgattttgctcacttcctcaaggctaacaagcaatgtaacagtaacctaagacaaggtatgagttctatcccccctattctgcgatccaatattgtgataagaaacttggagaattcttttaaagaaacagattagggcagtgggaaagttaagattactcttgatgacattgaagaggaggttttgttttggaaaccctcaatggtatgttatgtgcttggagttaatcctccactgcacgttcttgagggttttgcaaaaagagtgtggcaggataaggttgatagagtgaaagttttgtcctatggtatcttcatcattcggtttcattttatagagtatagagatcaagtcattaatgggggttatgtcttttttaaccgaaggccagttatcatgaaaccttgggatcctaatgtcaactttaagaaagaggatgtgaaatgtgttccaatatgggtgcaactagaggacttagaactgaagtattgggcccaaaagtcactctttaagattgttgggcaattaggaaaacctctcgtggaagattctattactagggaaagggaaagattgaattatcctagggtattagtggaggttatcatggaccaacaactaccagatatattagaattcgaaaatgaatatgggatgaatacatcggtgggggtcaagtatgaatggaagcctataagatgctctcattgttccggaattggt

SEQ ID NO: 85524 - DNA, 582 bp, Cannabis sativa
tgcgatcatctcaatgaaattttcagggcgcgatcctggacaccaagaaatcgcgatgacgacgagccccgtgatcccctcatgggcgatcaaggcactcgaaatgtgaacaacctgactaatccagtcaacccaccgactccaccagctgcgaccacaaaagtactaatccatgccaacatagatgcagttgctgctatactggtggtaacacagaccaatcttgtcttaccaagaggtattaaccaagagagcctcttgcgagcactaaggatgatcgagcagtagagaaagtacatttataagttccacgggacgtcgtcctttatagaagaagtgcgacaagcaaggctcccgaaaggttttaggctatctcaatcgctcaaatacaaaggtactactaacccaatcgattatttagataaatttaatacgattatggaggtagactaggtaccacaactggcgaaatgctggatacttgctgcaaccttagaagataatgctcatgattggtttagccaattacctgaggcctcgatatcaacctgggagacttttgtagacctattcttaacgcac

SEQ ID NO: 85525 - DNA, 1027 bp, Cannabis sativa
aagaattagtcacaagctcaagcaatatttacatttttcaacaagttatgcacactaccaatcatgtattagaatgtggaaaatcaccaaaccaaaacacatatgcctcaattttttttaaaacaagcaaaataaaagaaaagaaaaaaaaaaatattgagaaatttgcggctaaacccctttaagtttcaattagtatacacttaaccccctgttctttatttttggtggcaaaacccccttaacttagcttctgtttgcaaattcactgtaacagttaaatttcaatgtttaatgccaactaggatgccaacttgtattgtcactgtgtacataaatacagatggcatgtttttattagtccaaacaattttaattattttaataactttattattttaaaattacaaaagtaatgttataaattggaaaaaaaaaaatcaatatcagattgtttgttttattcaaattgacacattaatgacagacacaccaccatcatcattaacggaaccaccatctccatcacaacccaccaccaaccattaacggtgccaccatcaccattaacgacaccaccatcgaccgccataacaaccaccgcaatttatttcgaataatctcaaactcatattcaaacacaaactaaaaaaataaattgaaaaacactatcagatacaaaagaaaaaaaaagaaaaaccccaatcccaatctcaaacaagagcaagaaatgaagaaaaatagaaagagaagaaaaaaatcactaaacctagatctgaaccgctctacactctttcccctccaccaacctgtacgatagcctccatctcaaatctccattgatgtcggcgagaaaacggaggccacaaatggccaagaacccgactcacacgattctttgtcaagatgatcggagtaccatcgactccacgaagatccataaatctcgatcttgtctctttccttgatctgtcgtcctccgcctccgccgtcttgcacctttgacttgtgctgtcacctgcgcgag

SEQ ID NO: 85526 - DNA, 886 bp, Cannabis sativa
tatagcaacttacatagaaactacaggagaaaccactttaaaaacccacacattaaatttgaaaaaaaaaaataataaaaaaatagtatatgaagtaattttcttatttacttttacagttagagttattttaataattttatgaatttttatgtagatttaagttgttttattaattattatatacaaatttgtattacaatttaaattgttctattaattattaggtgatttttttttggtaaaaataataaaaataaactcctaaaatataaaatataataacccaaaatatatatatatttatatatatttgtcttttcatggataggccgaggtgattttatgtaggtgcagtattattaattaatcagtaattagttattatttacctatctaagataggccgaggtgaatttatagaggggaaaatagtaagtagtacatgatcaaaagaaattcaaattaattaggtaagtaaatacttaagtaactatctaagtttacaaaaatatttaattttaatttttgatggtaataatatctaagttataattttaaaattagaaaatatacttattgttatgtgttaagtgttaagtgaatgatcacgtgcatgataattcttaattagtctaagttattaaatttttattttttatttaaattcatttaaatatactaaaaaaatgacatgtaaatattgagttgattaagtaatagttggtgctctcacttcggtgctctccctctggtgctcttccttattgagttgatatttggtatacactatttaaagtattaaagaatattttgttaattaataggatattctgttaaagttaacgtagatattcaaaaatatcgttaaaccaaaaattctgtt

SEQ ID NO: 85527 - DNA, 940 bp, Cannabis sativa
agacctgttagaaccacaacaaggccatcatatttgagtgattatcactgttttttatcatctaacaatctttctgttgcttctcaggacagtatgccagtcactgcatatcctttgcaccaggttcttgattattccaagctctctcccaagttcagatcaatggcttttgctatttccaccatccaagaacctacttcttttgaacaagcaaaaggtatccctgtttgggacaaggctatggattctgagattgaagctttagagaaaaatgacacttgggttgtggttcctcttccccaagggcaacatgttataggatgcaaatgggtttataaagaaaagctgaatgctgatggatctgttgaaaggcacaaggctagacttgttgctaaaggatatagccaacaagaaggagtagattattttgatacttttgcacctgttgccaagcttgtcacagtcaagttggttttagcccttgctgccattggttcttacatcaacttgatgtgaacaatgcttttctccatggagatttgcatgaggatgtttatatgactctacctccagggtattgtcataagggggagacaccattaccacaaaatgcagtatgcaaacttaagaaatcactatatggattaaagcaagcatctagacagtggtttgaaaagttttctactgcattgttggaagaggggttctcacattctgcaacagatcattccatgtttatgagacactctccaacaagcttcattattctattggtttatgttgatgatgtcattgttgcaagcaataacattattgacctcaacaagctaaaaaccagtttgcataacaggtttaagcttaaagatcttggagatcttaaatacttccttggtcttgaagtagcaaggtctaacagaggcatcttcatttctcaaagagc

SEQ ID NO: 85528 - DNA, 928 bp, Cannabis sativa
aagagacatctttcaacaccaccagtattagcaaaactaataactaaagaggtgttgtaaatctacctagccgtctcagaaaatgccataagtgcagtattaattcaagtagaggggaaaaactagaaaccaatttactatataagtaaacggttactagggcagaatcgaggtaccctccacttgagaagctcgcactcaacttggtacacacctcaagaaaattacgacgttattttaagtgcatcccatcaaagttctgacagaccaacttctacaacaagtattataaaaaccggatgcattgagaagattgataaagtggttgatcgaattggggcagtttgaaatatcatatcatccttgagtcgccatcaagggtcagactttagatgactacttaatggaaggagtaaactcaggagaagactccagaataggaatagatcatgaagtgtggaaagtgtttgaagatggtgcttcgaataagaatggctcggggcaggtgttataatggtatctcctaaaaactttaagtttcactatgcattacggtttcaatttaatgctagctgtagtggccagattcgaggtgcttgcggaggtggcaagattgaccacatctataatgttcatgggaattccagtcgtggttggaacatggacattaggatctacagtcagagggtcttgaagaagactcgatgatgcagatggtgcaattggagttttccttgtgttaaccacggcgtttgatcagatatgatatcaacttgctctcaatgaaagcaccaaactgttgaccttagatttgaccaactgacaatagatttgtattaaactgatgcttgccacatgttacataattagaactagaaagtaaaaaaacataaggatttttattgaggttacaaagtaggaatcaaag

SEQ ID NO: 85529 - DNA, 541 bp, Cannabis sativa
atatatgtagtagtttggagacgtgttagacaaatgtaactcctatatgtaggttaatcatcatacattttattcacattaattatatttaaataaagatatatacaagttattcttgaaaataaggtgtataatcagggccgtctcaaatattttaaatgtcttgtttaaattttaaaaagtaggcttctaacataaaaaaaatatataaattgtaaataatatttttaaatattatcacattacgaaagtatattttacataattaagtacccaaaactcaaataattttattaaaattgctattaatttcaatacaacttcaagtcaatatcaacattctatttaaaaatggccatcctttgaacgctttttgcagcaaatacatcaaccaactcttcatattttatcgtctcaaaatcttattttcaatctctatcgatgctaatcaattaagcctttcttgtaatattagtttttgaaggtctagtcacttagccttgtacactagtggcaatacctcatttgtttgtgagacttt

SEQ ID NO: 85530 - DNA, 1256 bp, Cannabis sativa
ctcttgaaaaataaccattcactttgagtttgttacaaatacctcaaagctctatatagtatatacaacattgaggttaccttggcgtgggtcatgcatagattgactcactagactcccgacaaaagcagtttttggtctagtatgtgagagataaatgagctttccaactagctgttttgatatcttcctttgtcaactagttttcctttaagcacttggtctttgttttcgagttcgattggagttttgctggccttacaatctagcaatgcagtttctttaagaagatcgagagtatactttatttgtgatacaaaatacctcttttgctccaagcaattttcatacccaggaagtatctcagtgttccatgatccttgacttcaaactcttttttcaataatcctttaagtgacatttgtctccttagtattttagccagtgactattatatcattcacatatacaatcacgatagtcatttctccatttcttgtgtgtttaataaacagtgtggtctgttgtgtgtagccgagacccttgattacttttgaaaaacaattgaaatgcccaaggagattgtcttagaccatagattgtcttggttggctgctaatgaaagtaaggttctgatagtgttgagtttagcaacaggagtgtgatgagaacctgttacagattaataagcaagtttccaaaccacaaaaatagtagcaacaattgttaggaaaaacaatggaacaatagcttgagtatcatgagaatggggagttgttattgaattaatcgaaaacttgagactagtgtctcttacagtggtagagagcaaaagctctccatgatgcaaagagattttactccaaactttgcataaccaaaaaaaatgatagttgacgaggggttaccaggtggatgggtggagagttggaatttcaaattcagaaggaacttaatggatagagagttaccaagccttgtttcattgatgcaaaaggaagccttttctttacatttcccctgggtggtgcgtttgctgcaaaggcagcggagaagatgttggccacctgttcgtggattgcaaatatattcgacgattatggagatatgtgttggcagagtttgaattgtcctgggttatgccaaggtctgcttcacaattgatagcgtccaagctaaccggaatcaaacgcagattaaagctttggaaaacagtgatcttagcaacaatctgggccgtatggttagaaagaaat

SEQ ID NO: 85531 - DNA, 1602 bp, Cannabis sativa
  modified_base (60)..(66): a, c, t, g, unknown or other
attatgttatataaccggttctatattagttataatcagtttgagttattttgtgttatnnnnnnntattcattatgttacagaaccggttatatttcaattataaccgaattgacttattttgtattttgtatttttatttattatgttatagaaccgattctatatttgtttatatttgagacatctacttttggtgacttttccagtgaatttctcggtgaattttttaggcgacggtaacttttctggtgactttccggcagtactaactttttcggcgactttccgacaccagtaattttttcggcgaaacttattattgttttcaaaatatgggattctttcttttttttttacaaaaatgtggcgtaaaaaatctcatatatttattaaaaataaaaaaaaaatcatgatctcatgatattatttatttatgccataaaaaataaactattataattttcctgtaatttctacataaaagttttcacatacgttctgcattggatattattaatcaattgatcaaccaaaatattttacaacaaaaatcattaaaagtattttggtatatatatttctcaaaggaattaactactagcaacgagagaataactcaatttatctgaaagagcatgatatttgaattacccacaaaagatggatgacggctggtacttcaaatagattcttagtcttcgcgaaacaatggatgaagctagaatgtgtcttgcggtgaaagggaataagcttagagctaaaatgtactatgacttgttggtggaggtggacaaggttgattatgctagagcagtttaggataagcttattgtgcctaaacacaggttcctattctggcaaatagctaatacccagcttcttactagagatttcctttctcagattatgaccatctcgagcactttatgcccagtttgtaaggtagagttcgaactcatgaccatctattttttacttgttcatttgctaaactggtaatggttgcaaacacttcttggcttggagagtatcagtggcctaattctattgaggatttgttggaaaggtgtagaaaagggatgaagaatctccaaaatcgaatcattattaatgcaatcttggttgcgactatgtataacttgtggaagaatagaaataggtgcattttttatttgtgttgtactgctccgagtcatttgagcttgaatattaggaaggaggttcggttgagaatcttgagcaaggggccttttaaagcttgtcaaaagaacaattatttacttaatgtaatttataggtggtagcttttgttgtagggctgctggctgtgctactggtttgttgttgtggcctcttgtctttgtgtgtatctggcttgtttttgaataaagattcctctttctcaaaaacataaaaaaaaaaagcatgcaaatatataaacttaattttaaccaatcacattcctatttctaattctatagatagttaatgtccctcttttaaaataataaaacaaatgtctatttctactttttaatacctaaaatacccttcattatataaaatgtattatatgttttattcctttaatagaaatta

SEQ ID NO: 85532 - DNA, 1748 bp, Cannabis sativa
gtgtgacgctcgttttcacgagtagtcggtgaaagagaagccaagctttgggaacgactccagcctcaggatgaaaagttgcattgcaataagcggtaaaacataagaaattcagttcaatagcaaacgcactgcgttgagccaccatatgaaagaaaaaaataaatagaaaccactggcatttgaaggggaaggaacgaccaaggattgtagcacccatattgggatatatggaactcaataatagacatttggcgaaagacttgatagagctggaaatgaaggatcatgacgctgcactcgatatggactaactatccattcatcaattgctaaaactatttggtcgcttttggcaacaaaggccagagactagtttactttcgcaggagttaagatggccttatgaactcttctttaatctcatccttaaagactagctagctaaggaaggtatggtgtcaagcattgttggccaatgtagtgcaccaagcagtggagacactactaacaatgaaaaacatgcacattgtctatgaattccaaaaggtctttctaaaagatataccggggatacccttagacagtgatgtacagtgttagctccaagagtgcttcaattttgaaggctccatacaaaatggaaatttacgagctgtggaaacccaaagtatagctacaagaactcctagacaaagggatcattagaccaagttactcaccttggggtgctccagtactcttcatcaagatggaagcatgaggatgtgcatagaataccatgagctcaacaaggtgacaatcaataataagtatcttttaccaaggattgacgatctttttgatcgattgcaaggctcggctgtgttctcaaagatagatctaagatctgggtatcaccagctgaaggtctggaaggaagacatacccaagacagcattcagaacacggtatggacaatatgagtttttagtaatgtctttcagactaactattgccccagcagcctttatggatatgatgaatgttcaaggagtacctagataagtttgtggtcgtattcattgacgacattcttatcgactccaaaacagtggaggaacatgaggaacccctgaggatgactctaaaccaacttaaggacaaccaactagacgccaaattcaagaaatatgaattttggtggcattcctaggccatatagtttccaaagatggagtcaaacaaagatcgaaccggtcaagagctagccaacacctaagactataagtgaagtaagaagcttctttagtctagcgggttactatagacgcttcgtcgacggattttcctagatcgtaactcctctagccaacttgactcgaaagactcaaaagtttgtctggtcagaaaagtgtgagggtagtttccaaacacttaaggacaaactaataacagcccctgtattatgtgttcccaataataaggataagtttgtggtgttttgcgatgcatcaaaacaagggctgggatgcgtgctgatgcaaaatgacaaagtagtagcgtatgcctcaagacaacttaaggagtatgaaaagaggtacccaacacacgatctagagttggaagcagtagtttttgcgctaaaaatatggaggcactatctttacagagaaaaatgtgaaatttataccgaccacaagagccttaagtacttctttacgcaaaaggaactcaacatgaggcagaggcgatggctagagcttgtt

SEQ ID NO: 85533 - DNA, 2880 bp, Cannabis sativa
gaaaataaatcttagatctattttcttactgaatatcagatttaagatttaagatgtacactattgtgatggagagtgactaaacatgacttaccacaagttcgattgaaagtgtcgccaaagctgggaagaagtaggcgtcatcaaggctagagaagaaatgggtgtcgcagacagtggcagagagaaggggggcatgtggggtcatttgccctccttcaactttttgttcatacaaatttttaggtattttacattttgaccttataattactttttatctatgtccttacatatatttatatttgttcccatacaatttatactttttatttttatctcacatacttttatttgtattcttatgaaatttatattttttacttttattcttacattatttatttttattttcacataatttatatttttttaataaaaatcgtatattttatttatgcttcaaatttttttttgcgcccactttaatatttgactacctctgccactggtcgcaagtttggggatggaacaggcgtcacaaatctagggtaaagtaggcattgtttgggctagggaggggtgggcactgttagagagagagagatacgatttagggatggttgggtaattcgcgtacttccattgttgtagtaggggagtctgagtaattggtttaaaaaaaaaaacaagaagaagatgtggtggtggtatctcaaatgaagaagaaaagaaaagaagatgaaagaaaatgaaaaaagaaaaacaaaacaagaagaattagatgaaaatagaaaaaatatatgaaccattaaaatttgttacgtaagcaatttacgatagtacttaattgaaatttttagataaaagtataaagagctaaatgaaataaaaatttagtagaatatcaaaatataaaaaaatacaccaatataggagaatttcctatagagatattgaaaaaagaaatgaaaatagatttacttcacctacccaagcccaaaaataaaagaatacaccaatataggagaatttcctatagagatattgaaaaaagaaaatgaaaatagatttattagaaaatagaagaaggagaagagaggagaggaggagtcgatgggacaaaagaattaatagagacactacacactcacacataacactaaacacaaataaagcataggcgagtagtcaaaaccacacacatgaaaaagtaccaaaacccacccagactcgcagagcaattattacccatccccgtttttagcaatttaattaattattcaaattataaaaactattcccatatttaatcgaacgtaccatattcatccaatcagccacgtgtaccatccttaacaacaaggccccatctgaaagatggcccccaccgatcaaatcccacctcctcctcttcaccactctccactactatgataccaaaatatataaccccaattttgtttctcttttttattatctctctcaaaataaaaaaaataaggacacaagggtattttcgtaaatagatggcgaaggacatttttagcaacttttgcttgaaatgaaagttgagagaaagaaaaacacccaaacccatttgtgccttttcctttcttttcttttgttctagagagagagagaaagagttagagagagaaagcatgtactactgctctctgctactactatggaacttcactagcgccggagaaagaaaccaatctctataaaacgctataacttacaacaccccatcacttgattatctctgttattcgccggtaaaccacttttttacgtaccctttcttttttcggcacactactggttttccggcggtatttcgaaacaaaaatttagactatggctgaacaccggtttcccggaaacctggacccaaaggcagaagagttcagacctagaaaccctagcacaaacccaacaaaccaggtactcttgttcccgccaccgccaccaccaccaccacttccgcaggtttattatccgtacacatctccataccatcatcatcatcatccacacatgggggaagtacaagtgttaccttacggtgacggaagcatgggttacccgcagttctcttcttgtgctccggcagcgtacgttagcgccgagtcggcggtgggaccgactgcagtgactgtgcgagtcccggcacctgccacgtcagctatatcgactcgggcgattttactgagctctgtaccgtgtgaagtgagcgagtcgattgtgaggagggaattggaagcgtttggggaagttagaggggttcaaatggagagactctatgatggaatcgtgaccgttcatttctatgaccttagacatgcagagaacgctttgagggagattagggaccagcacatgcaacaacagaccaggcttcgagattaccatttcatgatcagtagtagtaataatactactactaatactaatatacggaattctgggtttgaagagctcaattgggcaacctcatcactactactctctcctcccccaattcccccaccggcgcctggactcatagctggtcgtcctgtttgggctcagttcgttattccgaccactaactccgtccaagatggttacaaccaaggaaccatagtaattttcaatttggactcagagatcaccgcctctatactccaagacatctttcaagcttttggtacgaactttcttttttatttttaacataaaacaataataataacatggtcgcttttaatgtatcctctaaatctttaaaaacacttgaaaaaatgatatgtatgtcttgttttttatatgtcggaatctatattatttagactttgaatttggtttgaggggtctattgtggggttatta

SEQ ID NO: 85534 - DNA, 1060 bp, Cannabis sativa
ttgttttgatattatttttttgttgtttttatgtagttttcttattactttttgtgttattttttatagaaaaccgtaaaattataaaataaaattctttaaatgtaaaaatataattttcttacaaaaaaatagtaccttatctaaatattaaaaaaatgggataagttataataagtttgctacaaattattttgtgtaattttttttaaaaaaaatcaataaacatgcataataaataaacaaggaataatcacttattaccatgaggtctcggaaattgtcaaagaccaaaaattatctttttctaaagaaatatttgtaataatacaagataatctacaatttaatttatttattcattttataaaaaaaatatcccaaatttatttaagggcaaatatcatttaaaattttatgttttataaaaattattaattataccctctattttataaacactatatatatgttacatataattaattcctccaacaatgaagactttttataagaataatgaactttaattgttttccaaatatgtttacatattattccatgtaaacaaacatataagtgaaaaccttttaaaaaaaatataattttgtataatattcatattctacaaacacaatagtatttagcattattaaaaactatttttttttttcaaatgaaagaaattaaaaaagataatacgataatttttggagagtgaacaaaaattcaaaatatctttgtttagctagtgagtataatttttttttttctgaaaatctttgagaatgatatatgtttaattataataattgggtagaaattattttattacatgtttttattaataggagaaatattttgaggtcaaataaaaatatataatgaatatatatatcattcatattgatgatgttcattaacaatattttaatttcttcctatagtactagagaatagtgatactttttttttattaattattgtatacaataatatgatatatatatatatagggaagttctgatgtagggccggcccattcttcctcatgacatga

SEQ ID NO: 85535 - DNA, 882 bp, Cannabis sativa
tttatgttttgttttcataatctttattgttgttgtgtgacgaaattagtttttgtttagtttcataatgttcattgttattgtattatgaaactagtttcgatttattttcagtatttttgtttagatgaaatataattcctctaataaaaatgcaatgaaagatattactaaagattttaagtgctcacactgagaagaaacttcctccatatcaaaaagaaaaaaaaaaagtaaattgatccataaagaaaagacaggtttaatttagcatctctatgggattttgaataagggtgttcattaaaattaaatttttctcatacataaaagataggtttaatttagatatctatggggcatcaaggtgtctagcaccatcatgaggtgacgccttataattaattaacaatttttttataatttttaataaaataaaataagtgggactcgatattgaattgcaccaataatgatattacacctagggtcagtcctaaaatatatagagtttaagaaaaaattaaattttggggtcttagaccatctccaacggataatgtttattcttagttaaatttagcccaaaatatactataaagctatatttcgtccaatttttatatttgtgctccaatgcacaatatgcaaattagctataaagtaaatactgtcattaatgctagctcatcgaaaatatatgaaatgattaattttatttatataaatataataatattttttattaaaaaatagtattaagaagtgacgaagagataattaaaaaatgtagtatttattgtgggctaacatttggctcatgctatcttttgtgctaaatttggcacaattttttaacttggaccaaatttgacacacatt

SEQ ID NO: 85536 - DNA, 755 bp, Cannabis sativa
aaacaaactttttttaacagcatcttatcgataacctatcgagaatctgtcgataaataatcaaaaacatacatttccaccaccacactagatcagaaaatactataaccactaaatcctattcagaacctgtcgagaacccattgataatcagtatgcactcatcaaacatgacgactaaatgactaattactactatcaagaacctatcgagaatccatcgacaatatgtcgataatcaaacttacataaattaaaagaaattatcatcaaaatgaaatatatttcaacacaaataatatataattgatcaaactaaaaaaaaccaaaaataaacattttttattaaaatcttgtcgataacctatcgagaatctgtcgataagtaatcgagaacacacataaccaccaccaccacactagatcggaaaacaccataactaccatataaaaccgaccataaattaagaaaaaatcatcaaaataaaatgtatttcaacagaaataatatataatctctctaaattaaacacaaaaaaaaaactaaaaacaaactttttttaacaacatcttgtcgataacctatcgagaatctgtcgataaataatcgagaacatacacaaccaccaccaccacattagatcggaaaataccttaaccaccatataaaaccgactataaattaagaaaaattcatcaaaataaaatgtatttcaacataaatcatatataatctctctaaattaaccacaaaa

SEQ ID NO: 85537 - DNA, 1009 bp, Cannabis sativa
aaattagacaaaggtccttaaatttaacaatctcaatagttcatggggaatttttaacgaccaaaaaaattcaagagtacgatttagtacatgtcaaagtttagtgagaaaaatccaaaataaatagggtaccactacatttttttttttaaagaaggtaccaccattttagtaacctactaaatttccaaagttattttatttttatatatggtttgatgacggtgcaataatttaaaagattacagtacattcaaaacctccatttcagttaaaaccagctgcatattattttatgttggaaataatttatttttatgattaggaaaaaagaaaaaacctattatttttttgtatttcaaaaacaaaaaccgagcgggaataaactcaacaatacaggcatcttcttgtctgtctatatcaacatttcaaattattattttctaatttattactgtacactatcgaagatttcttccccaaatctctgcgataatcctccaatgctcaccattatcttacgatcttctcatttctgaaagacccagccattttggatattatacttcggtactttccactactctgcttataaaggtatataatttatagtatttaacttcatctttttcttccgttttctcacttgccaaattaatattggtcttactgttttgatgctcgagtgtttttgcatttctctcataactattctatcagcttaatacttagttccatatattttgtattctgatcagatagacttataatttcttgattaccctctttttttttcttcctaaatttaggcatgtttaatggttttcttgattagcagttttgcagattttatgttggttgagattattggaatttcaaatatctactgtaaattccatgttttttttttttttttctttttttggatatttgctggccattattttcattttgttttaatgtgtcagttgaatttttttagttgtttaagatacagggtaagaaagtg

SEQ ID NO: 85538 - DNA, 985 bp, Cannabis sativa
  modified_base (919)..(926): a, c, t, g, unknown or other
agctcaaaccttgtccaaacacaatcaagccaccaaacaactccaaatcaactcaaataacactaactcaactacaaaatacaaaatcaaacactatataacaccacagaatcctaaccttagaaaaaacatgcaataacttaactttgagcttaagaaataacaaagagaagagctatagattctaccttggattggatacgctataaacttgataaaatactcagaaccaagctgaaaatctccaaacccttgctggcttctcgagagtgagagagagaaagagggtgaagagagaaggtttatgtgtttccttaatttattcctaataataggtaaatactatacttatttaataatactacttaaactttgaatattaacatactaaaagtcactaaaagacaaataacctaaatggcaaaatgatcattttgcccttgcataagccaaaagtatacttgtcacctaagggtagattggtcattttcaaaatctcaaatattctcaactttcccaatgtcttactatatttccctgctaaaactaaaatactaaaaccataagaaaaatgtgattcctatcagccaaacgcgcgttccaatattgttgggcataaaatatgaaaaacatgaaatttcacatatagcataaatagcaaaccaagaattcaaaaatctccataaattaataaatcatacttagagatctaatttcataattaagctctaattatcttcttatttatcatattaaaattaagtggtctttacatatcatgtgcttgatttgattgttcttgtgcttagctttggcgcttgttggaaaaatgaataagatttgtaaatgtgactatttgaactttgttatacatgcttgatagattagagaattgataatgttaattccatttttggcnnnnnnnnttgacaaaaatattttattaattattgtatatttcggctggtatgtgtttaatatggtt

SEQ ID NO: 85539 - DNA, 583 bp, Cannabis sativa
agcttatacacactgatgtgtgcaaacctattaatattcaagcttaaggaggttatgaatactttgtcacttttattgacaactattctagatacagacatacttacctaatggccaagaagtctaaaacttttggatagttcaaagacttcaaggctatggctgaaaagcaattaggtaaatcattaaagacacttcaatcagatcatggtatcaagtatttaaattcttgatttaaagactatttgttggaagaagggatcttgtcgcaacttacaacacagaacacctcagcagaatggtgttatagagagaagaaatcgggccttgttagacatggttagatcgatgatgtgttactcatcattgcaattaaacttttgcggatacgcacttttcgcggctacctacttttttaatatagtactcttgaagagcataagcaatactccaatagaagtatagaatgggacaatatccattaatctcagcacttaaggcaagagatttgttatgagatggatgtgtcaatttcttagccgatgtggtggatactacaaaagaaataccaatgggatcagaa

SEQ ID NO: 85540 - DNA, 999 bp, Cannabis sativa
cagttatataaatgattagaggtaggagagcattcccagatgttggttttggtttgtctggactgaaactcacatggtgtcttagaagcaagaagagtataatcctccgacccagatggctgtttggatttgtctctcgaattggctcggtctcttttggagattttgctacccatatccaaaagatgaaattctacaaaaccatgaataagtttttcttaaaatggtcaacttttgagccagtgaatttttctacgagttgtatatactatatttagccttataagacaaaaggagtctcaactctcagtcacctctatttgaacttatcacatgccgtaatctcaaatctgacgcgtgtgcatctactgaccatggctgacgcagattcctgaccatttaatctgggacttttgagggcctcaccaaacgacttgtcgtttcaaaacctcaaaagagaagttgtttctaagctttttttcaatatttcttgaaaatgattttctctttcacttaaatataacttgatgtattttgcaaattagtacactgtcagctacatttagcaaattagcacttttaataagcttttattcgttgcaataaccacgagcttataaacattgattgattctcaatctgtgacattacaaaaggcaaaaataacgcataacaaattccctgagaagaattggaatttgaatttgaataaaatgagtacaaataattcatgcagattcttcattgtttgatttgagatagcttgattggcgctagaatttgactatgacaaaacagttgcctatcttcattttcagctgaccaatttcttcattagagcataatatagcattagcaagtacattttatagcaaggtgagagtgtgatcatcgattgatgattctggcaaaattttctggctagaaaagctgcactacgctgcaaccatgcttccctgacaacaaacacaggctaccacaatcccgagcacggctccg

SEQ ID NO: 85541 - DNA, 3823 bp, Cannabis sativa
  modified_base (2571)..(2572): a, c, t, g, unknown or other
tcctactacgagatgggaattggcctcctgttcctgagatgaactccaatgaccctgctttagatggatcaaaggaaagggaaataaattttcaatgtcaattggagaatgtgcaaaagaaaaatcgatgaacttgttttgaccttcaaaaagcaaacatccaaaacccaactaccgaacttgggcaaggattggagtagcgtcaagtccaggcctagctgggcaaggcctaagctatatagcttgactctcttttcacaaaagatggcaattttagaggaatgaatgttgctagaagaaattccgtgaacgcgaatgccatggaatacgtcgaaagaatttaccatgtttcccagttccaaatcatagacgagaagttgggaaccagagcctataagattaaagaagaagagaaatgaaagaaagatggagattgaattgagaggtaatcagtctaagtaagaaataaagaataatgtgaaattgaaagcgtaccagcaaggaggtaaggaagagaagaaagacgatgcgggaagaggagaagagagagtgctgaaatttcaccaatgtattggctactttggagacagcatgaatcgctctgctgtagctctaccgccatgattgtcttcttttcgttacagttaacaaactctaaaacccttcaaacagtggtaaaagaaaacagcactgactgactgttgtgcatttctctgtgtgtgtgagagtgagactgggacaaggactattggtcgtactcctcgtgtatgtatgtagttttagttaaaactattgtcgtttatagagtttatttgtagtggtaagtataaatataataattgcacaaaaaagagaaaaaaacgattgcggtgagcgtggatcgaacacgcgaccttcagatcttcagtctgacgctctcccaactgagctatccccgcttgatgctaatacttactgcagtttatgactaatagtttcattgtgtaattacaaaagggaaatttgcttttttttttattacaatgacccaaaactttattgatgaaaagtaaaataaaatatattggtcatattagtataaatatataaatatagatctaaagaataccttggttgattcaaagaaaaaaaaaatatgaatagcagaagcgtaccttaatccatatagtggtgatcttaatccatttaataaagatgatctgtaacgtcctactagaataggcatgttattgtgattttaatttattggttcatccgctaaattaatagagtcacagattcttgagatccaactaattatttcctcaggatgtttttgatgttctccgtgagtcatattatttctctccatccatattgcttatgaaataataattagtctttcaaataaatttttctccacaatctcatatgcatagatcattactttcttaaaagataaatcttccttcgcctcatgaaggaaagggcaatctaataacgtccaaattccttgagcttagggacaccaaaatattgcatgtgaatttgaatcacctctataaccacaaataggacagttattatgaggaacaaccttacgccaaaacaagccaccattcgaaggtaaaatctcatagaaacctcgtcatgcaaaatgaagaattttttgcagaatttcctccaccatattgagaacacctcactagaagaagaaggtaatccctcatctctggtcattgccaaattataaccactttttattgaataattaccgttccgtgttatgttaacaccagttatcctcgtgctcaaaaggacttaataggatcgataagatgagttcggcattcggtgaattaaaagtattattcaccttacaaacgcccaacctcctagagggtcaataaagttctgaaactgtgatcacaataaaggaggattttatacaaggaagaaaagatgtcagtcattgtaaccaaggatcattaaataccctcgtagaaacaccattaccaatacacaatgccttaatcctttcagtaacaagtctcttcccatacagtccctctccatgtcgttgatggataataacccttacttacctccaaaatagaagagtctctaaagtatcttactttacgcacttgagccaataaagatgacagtttagttaaaattctccatgcttattttgccagtaaggcttgattatattgattgaaccttcaaaaacctaatccaccatcacttttaggttgtagcaatttatgccaagctctccaatggatactctgtcctgtatccactgaaccccaccaacacaggctatcaaacttttaatctcttcattcggcccttctagaattcaaaagcatgacatcaaatatgttggtgctgaaattaaatcttagtgcaagtgggagtttgttggattttatgtcctaaataaaactcattttaatataatcagatttactgattaataaaaaatcagaaatctttttatgttgcatagttcacatgatttctatcatgattataagtttaatgtataaattctattgaatctagaacatatagttattcatnnttatagtgttgtcaacacaatagattataatcacgattatatgtttcaaagtttttgtctcataatttgtcacagggacggagccaggctttgatggttagggggccaaagtgatgatagcatgtctacaacgccgaagtttcacgactaagagttttagaggctatttgacttcataacttagaaactgttatctgtttattaaaattgaaaacagtttttaaaaacaattttttttgtctaatatgttatcttttatatttttgcttacatactcggattctagatccagaaccaaacccgaacccaaatcggatggattcatgtcatgatatggtgttaaaatattaatttttttagtaagaaaaaaactaaaaataattttaaaaaattcgtgccaaacaccattaaatttttaaaatgacaaaaaattattttctattctcacttttgaaaatacaattatgaaaactgaaaacacaactaaacagactcttagtgaccaaaactcttttttggtggtgcatcttaatgaagatcgattatttgttagtgattgaataccatatttaagactattaatttactataaaatgttatatttgcaacaataattcaaaattatactttaataaattgtctaactcttaaaaaaatttcaaagtgtgtttcatatatatatatatatatatatttgacaaaaatgatctgaatcagtcaaaatatgaatatattgctaatcaaaggaaatatttattttaaaatattcatattttattttataatgataaactaataaagaaatgaactaattacatgatttagtattttctagtaagacaccttaataatattattcatattttacagtataatggagatttttttacgaacttatattttattatgtatctttaaatattttattttattattctttgtatattatataagctataatcatcatattttattatttatttatcttttatgggatccactctcattaatattcacttccattcatcaattccaactaaaaatcctcattttttcactctcattacataggggcatatatatatatatatatattgaattatacattgtatatatgttctctcaaaaactaacaggggccttggtcccctaactatgttgtacatagtttttgatttgtcagtacactagatttaaactgacatgataatcatcgataaagtttacttacaccttggattagtgttatgt

SEQ ID NO: 85542 - DNA, 511 bp, Cannabis sativa
taaattattttgttaattgctatatgggttgttatgtggaattctgtaaaaatataaaaaagaaattattttaaaatatatatattaaaaaaaaaaaaccttcgtttttatatatgtatattggttttgtgttgtttttattggagtttgtatttaattaaaaaaaaattgtaaaattgtacaaatttatttttattggataaatattaaaattgacccatactgcataaaagtttattgagaaaattgtactatatatctctttaaaattgatgcttttaattttaatcttctttcaaaatctattatgtttatttcttttttcaatcattctaccaattttattcctgtcacttcacgataatttccattcttctttacttaaaattttgtcccaacttttacacaaacctatacatccatctccaaataatacaaatctattatgtttgaaattttgtcttaattatgtgagggtgtaaaggtaatttgggtataatacttataaaaa

SEQ ID NO: 85543 - DNA, 686 bp, Cannabis sativa
tgagtgtactgacttggttcattgttgtgaattgtttccatcattcccacccaatcaaatttaagccaagaaccaaagattggtctcacatctccctctttgtgaattcccgtagctctaggttcctgacattggcgcatttcatggccaattcttccacaattaaaacacatatatggcagtctatcatattgaaattggagccaaattcgccgtccttcatgggggaataggtagcctggaaagagtttggattgaatggagttccgaactttgaatttgaaaaaaccattgactgcaattcgattaacatccgcttcttgaatgtcaataatttcccctgccattcctgccagtcgcgacatatttgatttagtaatggctttaattggaaggtttagtattcggcctgagatggtgaataagcatagagtcgtttcccaatccgtcggtatgccctgaatcctttccaaaatgagaaaaccagcattaagcacccatggcgatttgcccagtgtcctttccaaagatatgttcgatttgaacgggagaaccaagaacattgctgtagccgtggttttcttgattttcaaatcccagtcggtttccctcaaattccagagtttgcaaagaatgttcttgagtaaagaacagctaaacaacttcattgtgcaaagcctgccaat

SEQ ID NO: 85544 - DNA, 529 bp, Cannabis sativa
atggattgaccacctttctgaacatgagagaactgtcctttaagttgtagacgatgagcttttgtctgagaggcgaatttctgttcaagagcacgccagacagagtgagaagtgacatagtttgcaacagatgcaagcacagattcggacatggaggagcgtaaccacgataacagaagctgatctttcttgcgccatagagcgtattcaggatttggagtgttatcgacgaggtttgaaggcggtggaaccccggtgaacaagatctcatcgagatcatggccgatgacagtgggtgtgacctgagatttccatgaaagaaagttagcacgatcgagtttaacagtaagagatgaagacaaggaatttgagaatggattccaagatccatgagcagcggttggtggggcaggagcctgagttgtaggaacagcgttgttcacggcagtggcctgaggatcggaagtggacgatgacatggtcgagtccagactcctgataccatgtagagaaaccaaagcaggacaaa

SEQ ID NO: 85545 - DNA, 2391 bp, Cannabis sativa
  modified_base (407)..(411): a, c, t, g, unknown or other
  modified_base (901)..(902): a, c, t, g, unknown or other
tccaagctccggttctctgatcacgggataagatctgcatcccaatcacgggtcctagtcttgtttcaattcatgtcccaagtcagggtcttggtttgggtcttggtccaagacggagactggggttcagtctgggtttcgatcccagttctgggtcccaagtcatgttcaatgttctggtctgaatttaggtctttgttcgggtctcgagtcctggttcgggtttggatttagattttggagccaatcgcagactggctctttgaccaagtctgggtcttggtccggttacagttttgggtctatgttcttgtcttggtcatggtttattcttcggtcctaatctgcttctagtttcgattcgagtttcaagtcacgggctacgggttttggtcgagtttggatcnnnnnctgggttcgggtcatgatttgagtgtgtggcaaggttcagttccaggtttcggtctcaggtagggttcgaggctaggtctgggtctaggtcctggtcccggtcccgttcaaagatcttggtcccgttctaattcatgtttcggtttttgtgggtctgggtcttggtatgtgtccgggtcttagattgagttcgagtttgggttcgggttctggtctatgtccttgatctagacactgagtagtggtcgggtccaagcatcgatccggaatcccaggtcccgacgtgggtcctatgtccaggtttgggtctatggtttggtcctcgatcccgatcaaagttctgaaacaaatttctggtcctagttcaggggcccaattccgaggtctgtgtcccccatctatgttcaggtcctaggtcccgttccgggtccaagttcgtgttcgggttcgatccgagtttaggtcgtggttttggttagggtccgagttnncatcccaatcctagtcttggtttgggcttcgggtcccaggtctgagtctggttattgggtcttgggttcggtcccggtgtccaggttcgagtcggagtgtcgtgttccgatttgggtctgggtttgggtttaggtctgattcctggtctgagtctgggtttgagtctgggtccaggtccggatcctggtctgggtctgggtttaggtccaggtttgagttcgggtcccaggtgcggttccaggtctgggtctaggtcagggtcttgttacagatctagcttctgtgtttcgatcctggtctgggtctgggttttggtctgggtgtcagtcttggtctggttacacgacgtgtcaaggcacgacttcaggtcacggtttgggtttggagctaggtctaagtttggttctaggtttgggtccacgtcctagtcacggtcctagtcttgtttgatggtcctggtcttacggtttttgtttaggctctattttcgggtcctaggtttgggtcaggggccgggtttgggtcctggtctgagtcccaaatcaagttcaggaccgacattggggtgcggttctaggtctcggctctaattttgtgtcccaagtctggttccatgtttgagtctgagttcgggtccaggttcggcatcgtgtttaggtttcggttgggatctaggtacgggtttctgttcgggtctaggtctgggttggagtttgggtcctagttcggttacggttccaagtctaggtctaggtctgattacggttccaggtccaagtccaagtcctggttccgaacctgttcccgggtaccagtctacttccaatttcggttctaattttggctcacaaggtacgggttcgggtccaggttgcgatttgggactgggttgaggtctgcgtctagtttcgcgtcccagtctaggttcgagttagaggctgggtcacagatccaaacaccgactacaggttcggtccaagccccaggtctagatctggatcctgatctcgggtctcggtcaggttccatttcgtgtgtcgagtcacgagttggttcctagatttaagtccgggtttggggtcaggtcttgggtccctgtcctagttctgttgccccggtccgtatctcgattcttggtctaagtcccggtttggctcccattctaggttcaggcatgggtcctagtcgaggttcaggtttgagtctcggtctgggtttttatttgggtttgggttcggttctgtgtcttagtcctggtcctggtcctagtcctagtccatttctagttccaattgcgtttcggagttcgagtttgggttcgagttcgggtcggggttcgagttctagttcgagtttgtgtttgggtccagatctcggtctaggttcgaataaggctctgggtgtgggttggggtcctgggtttaggtccaggttctggtccgagtcctatgttttgatctcaagctgagtctgaggttagttctgggt

SEQ ID NO: 85546 - DNA, 767 bp, Cannabis sativa
gattaattactaattattattttttttcttatatttaaccatttataataatttataaattggatttcaaaatttattgattttgattaatatttactgtcaattccactagtttttatgtatgtatcattgtattttcttttagggtttaacatatcttctaccatcatcttcccacagtaaattgagaaaagaaattctgatttttactggtttcacgagaagtttggaaaatttccttggaatctacgcatcttgtcacggtagagagtcaccgatcaaattttccaggtttctctttccttaattttcgactcatagtttgatcttttatcatataatatattgcttatataatagttttgatttgatgtctggttgcgttttctctatctctatctctttcatcttgaaagtttttgttttttgtttttaataaattatacatttacatcattaaaaccaatagcaaattttattttaaatataaatatcttaaatatttatgtttaattaagtttataagatccaaaaaaaaatgttaaaaaattttatattctcattttggtttttgagaattttttgtttttgttttaaaaaatatatggaacaatccttcatttagaaaatatctttttttttttttggtacaatagggttttttatttttaattttacaaaaatatattttaaattcatttgattttatgatacatttcatacttcacttgcatgcttttgtccttgcttcaccatttaaatttttt

SEQ ID NO: 85547 - DNA, 622 bp, Cannabis sativa
gtaaaataagttccaacaattattacatagaaaatataaattgacactttatttataaaaatatattcataaggtgtgggcaacatttttgtcgttaatgagcttttatttactaaaatatcacttacacacactctatgtatattgtcacctcaaattgcgtcatctttttcctttttttttttcttattaatttctttttatttttagtttctgtttaagtttttagtttctctttccttttttttttttaatttttcgttcaaaaaaatcattcttccacatgatcaaaacctacgatcatacccatttcaagcaaataaccatctctaaattcttcatccaactgtctccattttcattcagtttttttttttttttgtatctcacaactgtctccaaggacgttggtgatgttaagggcaaacaagttgatttaaagggtgataattttttcaagggcttaggccaacttgagattgatgatgatcaagttgttttagctggcttggagactgttgaaaaaataaaggtatggttctcattgaaattttattttttgagattatgggtctgagtagttgcttcatagttgcttatatgtttaattcaagttgtaaaa

SEQ ID NO: 85548 - DNA, 966 bp, Cannabis sativa
cacacaactcttctttaaatttaagttactaaaattctcatttttcaacagtatagcataattaattttaggttaatttaggtttatgtcccttaaactttgacatgtaccaaattatatttttgaattttttaagtcgttaaatattattctcaaactattgatttaatattgttggatttaaaaatttttgtccaattttattaacaaaagtctagcatgaatgaaaatttattacatgttaaagtttaggggatatgattttgtaaatatcgaattttggaggcaatttagtatatggacattcatcatattagcaaaatccaataaaattagacaaaagttattaaacccaacaattttaataatttaagaaaaaattttaatggcaaaaagttcagaagcataatttggtacatgtcaaaatttaggcggcaaaaatcttaattaatcttaattttaatagcggtgaaatatttaagtccaaaaattttaagactatttaataatttaaatttttttaacatgtggtttgaactacaatatcaaaatttaaaatttcaaatcatagaacaccacaaaaaattcataccccattttttttagtgtgggcaaattactttaaattaagaatttactgtaattcaattattgttaaaatctaacattaagtttgactttcttaagacatattaagtttgattaaaatttaatttattgtaattaaattatgctcaagtgaagagacaattagcaaacttgtttaatccaacacacaatgatttcccaactgttcttttttacctatctatcctattaatccggggtccaaacataacgaccatatacaacggtaacggtaatatgattacacaaattggcgccaaaatccaaacaataactatgatacagaacaaaacacactttgtttaaaaattaagcacattcatttgaaacaaaggaaga

SEQ ID NO: 85549 - DNA, 536 bp, Cannabis sativa
aaattagtccaaatttaaaacatgttaaaaattgtatcaagtttgacataaatataaaatgaattaaatttcttttaaaaaaaaaatgaattaaattttacactacaataaatattattttttatttactcttttgtcactgatatgactagttattggtaagcatgtttacttagagttattattatttaatcattaatttaaataataataaaaataaaaattcaacgcatttggtcatatttttttaaaatagttttcaaagttttttttaaaataaaaacatgtttaagaaaatatcaaccaaatacaaattatgttttgaaaacttaaaaaaaataatagaaagaaatgtcaaatatattatccttaaaagtaactttttttaataatatattaagatgatatatttataatttagagagtattaatctttattctatagaaggaatctgaattggagaattgaaagttaaaaatttattctaatttccatctatcatgcatttctctccttcaatgttctttctctcacc

SEQ ID NO: 85550 - DNA, 650 bp, Cannabis sativa
gaaacccctattacaactagcgctgcaaccactttagaaacacaaaccgtaaatttgaaaaaaaaaaaagttaaaaaaataatatatgaggtaattctcctctaaaaattaatgtaagtcggaataaaaattctaataatttattttaaattaaattgtttgaaagaaaattatcatctctaatacatattgtggttgtattttggatgcatacatatatttgctcctgttttgggtaacccctctctcccccttttcttttcttcacgtctttcaaaattgattgaaaataacattttataaaaactccatagtttgggcaaagttttcttgcaagtcttccattcaaggttggccatttcattagtttagttcatcctgaatagcgacaattgaattgactaattttatttatttatttatattttgccattggcttgactaaaattgaaacattgtttttttttaagaatgaataaaaatttcattaaaaaatagtaagagtgaaatacatcatgaatcatggtggaaattctattaaaattaatttattatgcactctaagtacatgcactactaatttatagttatgaatattaattaaggacacttcagaaaaattaaaaagtaaactaacacaatcctctagc

SEQ ID NO: 85551 - DNA, 702 bp, Cannabis sativa
ataaaatttataataactattactggaaaaatcgccagagtagatatcagtcctgaaaaggttactgaaaaagtcatcagtgctaaaaaaatcgttagaaaagtcatttgtaccgaaaaagttgttaaaaaaatcaccaaaaaattcatcgatgccaaaaaaattaccgaagttgtcatcggtgccagaaaagtcactgaagttgtcattatcgtcagaaaagtcaccggaattagatgtctcgggtataaattaaaatagaactaacacagaataactcaaaccgattataattaaaatagaactggttttataacataatgaataacacaaaataatccaaaccggttatcattaaatagaaccggttctataacagtgatataatgaaaaataaataaataacacaaaatgactcaaacagattataattaaaatagaacaggttctataacataatgaataaaaacaaagaacacaaaataactcaaacggctataattaaaattattttgccttaccattttgtgaatcttgtgttttaggaaaataacataagatgaagtttactccggcaaggcacacaactaagaagacacttgaatatgtgcatggtgatctttgggggccatacaaggtgtctactcactccggtaactaatattttctttcaatagttgatgactatagtaggtgtgtttg

SEQ ID NO: 85552 - DNA, 552 bp, Cannabis sativa
ggggtgaaggaagctttaagctggataaagactcagtattttgaacgagctcaagtagaatttaatagtttggtggttattgatgacatttgaagttctttgcatttagattatgattttggttttattattgaagattgtaaagcttttttggattcttttaagttcgttttatttacattttgttaaacaatgtgtaaattgagctgatcgtgtaagaggcttcaatacctcttgattaatatagatgattttatttaataaaaaaaaaaccactggtgaagaagaagttagtaaatactccaattcaaagtagattctttatgggcttaggcctatgaaactttgggccgcccaagtctgtacagaaaatgggccattgggcttacaaaaattttgggcctcgattaattgtttttattggaaaattacatcttatttcatgtttcgaaaatgattataacaataaccttttttttaaaataaaaaaacttacaacatgaaaaacacataacaaaatccaaaaaaaaagggcaatttttaataatatac

SEQ ID NO: 85553 - DNA, 1590 bp, Cannabis sativa
gtccggttgtaattccaatgcctcataactcaaaatatgcattggatcagatacgtattttctcaacatggaaacatggaatacattatgcacagctaacaacgatggaggtaagggcaaccgataagcaacttgcccaaccttttcaagtattacaaaaggtccaataaatctaggacttaacttgcctttctttccaaaacgtctgattcctttcattggggacactcgcaagaaaacattgcctccaggttggaatgtaacatatcggcgtttaggatccgcataacttttctgcctactttgagaagctaccattcgagctttaatcttgtctattgcctcatttgttttctggaccaattcagggcctagatatttccgttctcctgtttcgtcccaatgaataagggaacgacatttcctaccatagagcagctgataaggagccattcctataggactttgataactattgttgtaggagaattcaatcagaggcaaatacttgctccacgacccaccaaaatccatgaaacatgctcgtaacaggtcttcaagtatttgaatagttcgctcagattgcccatctgtttgaggatgaaaggccgtgctaaatttcaagttagtgcccatggccttctgcaaactcatccaaaattttgaggtaaatttagggtctctatttgaaacaatagactttggtaccccatgaagacgggcaatctctttcacatataagtcagcatactgatctactgtataggttaccttgaccggtaggaaatgtgctgactttgtaaagtgatccacaacaacccaaactgagtcgtacattcctgtggttctaggcaaaccaaccagaaagtccattgcaatgtcttcccacttccattctggaagtgttaatggctaaagtaatcctgcaggtcgttgatgttctgctttaatttgttgacaagtcaagcacttagtgacatagtccaccacatcccttttcattccataccaccagaaatatggcttcagatcttgatacattttggtggttcctggatgtaatgagtagggagtagtatgagcttcatccaaaatttctctcttaagctcagtgttatcagagacacacactcgtgcttcaaacaataacattccactatcagagattgaaaagtccttagctttgtttgctaagacatcttctcgaatcttaaccaattcaggatcttctaattgagccgctttgattctttccagcaagtatgactgaagtgttagtgcaatttcccaatcacaagctcaatatttgccttagacatatctgaggctaactgaggaggaatcattaccaaattaaaattctgaccaggtccttttcggcttaaagcatcagccacaacatttgcttttccaggatgatacagactttcaaagtcatagtccttcacaagctctaaccacctcctttgtctcatattcaaatccttttgggttaaaaagtacttaagactcttgtggtcaatatagatctcacacctttcaccatataagtagtgtcgccaaattttcagggcaaacaccactgctgca

SEQ ID NO: 85554 - DNA, 968 bp, Cannabis sativa
agtgtaaccttggagatggtcttagagcatctctaatggtgcaccataatcactaaatttgtgtaaaattgttacaccatttcactctaatgacatattaaattatgcacagtgtaccaaattttgttagattttgaatttataacaatttggtgtataacttttttttttttaacattctaacccttattttattttattttaaaaataatcttatattttagtcctcaaattaaattgtattacaaaataatatttgatttaaaatacgaacatatttgaaaatataaaataacaataacaaaaatactaatattaatatattaaacaaaataaaaatacagcagaagatttctaggtgaaatcttaatcaagacttacgaacatgagactcatggaagactcaatattcataaatctgattagagttggtggttgtaaggttcttgagaacaataaaccaataaggtataaaaaatggatgtttatcaatggtgtttgaggttttaatgtcgattgagtatggtggactcaatgaaaaattaagatgaaggaataagtatggtattcttagctgtcgtcaagtaggtccaaaagagaaggtctagaagagaagaagattcctacatgagcctcttactcacattatataggttgtaggatttgttagtgatcccaacatgttaggatgtctcactaacaaatcccgttcatctttaataatcaacaaaaaattacaagaaaataaatatctacaataattctcttgtttttaggctaaaatcccacaaacattgagaaaatagttattttcggctaaggatgtaccaatttgaaatgaagtgacaagggatgtcagttctccgcttggaattcataatattgaaaacaaaaagttctaaaaatatgtgttttggattgccactgttagcatataattccacatgggttgtggcattgtccttcaa

SEQ ID NO: 85555 - DNA, 1072 bp, Cannabis sativa
tatgtgtgtgcatttttggtggccccctaggggcaatttggtctttttgacccttggtttatgattattaaaagaaatgaattttgagaattaaaaatagaattttctagttttctctccccctaacccgaacccctctctctctcttaaaccctctttcttttcaatcttgatttttgtgtgaattgctttgaatttggccaaaaattgaagcttggtgttggtgaatctttgagcctagctttggagtgatttgaggtaacttttatagttttaaatttttttaatcttactgaattttatggttgaaagagcatgaaatagattgatgatgatgatatgttgcatgttggtgttcttttgttaatttgagcatgtttatgcttgaatctttgatgtggtgcttgattgagctctagatggaattttagggtatttctcatgtcttgaattcaggttattgttagtgtttgttgctggaaaattaaggttaagctatcttggaagttatagcttttggttatgaattttgttaagtaatgttcaagattggagcttaattttgtgtattggtgcaatatgaaattatgagatttattgttggaattgatgcatgaaatatgtatttttagctctctaaaatttgttagcaactctactttgtgatttgagagtttggttgtaaattgagatgatttggttgtgaattgttgctaaaatttgagttgaaacttgctggttttctgggtttggaacccaggtgccgtggcatggctttagcatgctgcgacccacccctttggatggaacctgggagttggttccaagagtcgcggcatgggtgcatgccgcggcccaccctcgagtttctgggcagattcaagtgcaaactttaaaaattcataactttgtgatccgaactctgtgttaggagttctatatatcgttggaaagctcgtttcgagctctatgtgattatctgtattttgaatgccatgcatatactttataaatatgaaatcaggggttaaccctatttgtgtaaatcccagaattgtgactatgattaccg

SEQ ID NO: 85556 - DNA, 1068 bp, Cannabis sativa
  modified_base (213)..(215): a, c, t, g, unknown or other
  modified_base (487)..(502): a, c, t, g, unknown or other
gtaagactgtgaagaatccaatcaactgaaggagtgtcgggctcagatcttgataatactctgtgacagaaaggatacaagggatagatatctgagtggaatgaatcatttaattccactacaaccaacgtaagatttcttgaactttaaatgtgtttaaattccattgttttagaaattcatgtttatgatgttaaacaacatacatggtannnaatctagatcttggtaaaataatcccctacatattcatccaccgcttgatagatgaggtagagagctttcttgtccctctttcttgaatctcttaaggcatctcgttgagcttgggaaagagcaacatcgtcttgctccttatgacctttctcaacaatatctagctcatacatcttgagctcctagtagcgcttcatatcttaatactctaattgtcatagttgccctgttagaaaaattaatggtaaacccaagatcaatttgtatatannnnnnnnnnnnnnnntaatatataataattaggtatgcgtacatgattgatccataacaattatcacattttgatttgatagtgcaatactatcaactaagttttcctccctagatctctaaatcagaagtagtttatttatctgattatcaaaagtatataattttgatgtgacaatatgtatttatagagttagggatgggacttagctacataagcctagttggactaggcctgctcatcaaaggcttcagttaaccagaaaagcccacacttctgcttcacctagactttacacacagatgatataagcctattaactatggatcaccaacaatatgggctaatacaacaaagaactaaacaatcaactcaagttttaataaaaccaataaaatttaatgtaagcccaaataaaaaatctaacatgctcttggtaagcattggaacttggaagtggatcattcctctacttgtcatttttcttcacaaacttggccttagtgttggaattattttaccaggaccttaaatctactcacaagtatgttgattaacaccgtaaatatgaacttctaaaa

SEQ ID NO: 85557 - DNA, 623 bp, Cannabis sativa
aaaaaggcattgttctcatcccctttacataaccaggtgactttgcttctctatctcaagaaactatgatacatcttctcttgggtattaaatgtcattgctgcctctttttcagtctgttgataggttatatcatgcggatgttcctgagcctgatttctagcttgaatatagagatcctttgcttcgggatagttcctcccaacatccctaattctctctctattaaacctcttgattgtgtgcttcaatctcataagcttcaagtataagcctgtcatgccctctcttcctatctgtttgtgccaattatcaagaacctcacttttaaaatctggatggtcagcccaaaaattataatatctgaaaggtttgatcccaatgtccacattgggagtcatcgaaaccacacaaaagtagtgatcagaaatggtctcccaactatagtgagcttttgtcaaaggaaagctatcattccaatcttcattcacaaaagtgtgatcaattttagaatagatcctctttttcccttcttggttattcgtccaagtaaaacccgaacctgttttaataagtctatccatgtgaatttgtgcaaaccaattggtagagtcccttatatc

SEQ ID NO: 85558 - DNA, 914 bp, Cannabis sativa
tttaattcaaacgctaaaccctttccatccacgtgtcactgttcggttggtccacgtatattgagcaaaatcaggggcaacacatatataataatatatatctttaaaaaaatttataaatacaattaatattctaatgtaaaaaaatagtaatttaaaatctaatacatatgatataaatatattttaaaacttaatagatcaaatgtatatttcaatcttatatttaaataaaatataatttaaaataaaatgaaatatttctttctacatacaatttttttttctttcattaaatttattattttatttattttaatatattattggagacataaaacaacaatattttattttattttcttgttagttatgaaaaaaaatatttttaataaatattagataattcaatatttaaaagtaatcaatccaaaataactgatccaatctgcacttttacaaattggattggatttgagctatgacacggattgggttgaatctaaaatataaaattcgcacttagtgtatatcgaatgcactatgagtaaaatagtacggattagattgaatgaacactctagttatctcctcttatctctctccttccacccacctctccctcctactagacaaaatgtttaattaatactttaatattagtctgattaatgttctaatttttaagtttgtaaaaattattattttaaacaataatatttttaagcttaaaatataaataatatacatttattaattttaaatctatatttaatttggacactaaaaactaataataatcaactcataatcattttatacatttagataggttaacccgagtaaattgataaaattattagattggttacattttttcttttcttaattaagtacgttacaattagattttt

SEQ ID NO: 85559 - DNA, 667 bp, Cannabis sativa
ttttatcccacttttttagttaacaaaaataaaaaagggaataaaatatatattgagactttttatcccacttttagatttggcgcctcgaatatggagcaaaatttttttcagacaagggccttgtttagtagaacattaaaaaagaaatatcaaaggtaaaaaataagttcaagattcgatttttatgggttagccaaacgaggattaaggtttttagggaaaccttttatctcgattattagttaaaaatcaggataaaaagtgtttccctaaaaacacttctcccatctcgcgacagatcatcacacatattatacacaccctcgatatatcctctgctattaacctctcgccaaaaaccttcccaaacccagaaacccatgcccaaacccagtgagcctctacccattccaaaatcgcccaaccctaatagctcaaacgattaaggtatgattttcttctttattattttcccctcctttgcattttaaatatttaattatctttgcattttttttccaccatttttttctaggtttacaagaaaataaaatctgatcatttttttttttggtaataatgtcttctagttcagggattatttattatgtatcattttttacctttttagttcttaaagatttgatttttataatatttgaat

SEQ ID NO: 85560 - DNA, 734 bp, Cannabis sativa
ttttttacttatacacccaaattaaaaaaaaaatgggacttaatgaaatctcaacaaaagcatactgtaaaataggttaatatgaaattaaacagatgtcaatgagtgaaatctcatggaacatgggcgcaaacaaagggacttagtgaaatctcaacaatttgtaaccacaccttccatattaacattaataatggaaaaatggggaaaattatcttgggtattgaaattcataaacctagatagaaactaaacaaaaattttaattgccacatagaacattcattagaagaaattatatcactttgtcatcacgcagctcttaaatttacatatattatacatatataaaatttgggttatcagttgaagagttgcttgagtaaacaaaattgctattctgaaattaaaatagtaatagtgatgttatgttcaaacccacacgaaaagtatgaatttttcaaactcatttgttttagccctctccttaagatcttgaattaaagttggttagcttgtgattttgataaccaataatttttctagcgattaaaaattgcttggcctatattttttttcctcattctgatttttccgtgttcataaacacaaaatcaacaatataatttacactctgaaaaataaaaaataatataatttaactatcattttaaactctattttcacacaacaaaaaaaattattactcaggatgtagatgagatgaaaaaaaa

SEQ ID NO: 85561 - DNA, 500 bp, Cannabis sativa
agatcctggtaaaataattgcaacacttgcgccattattggtaagcaggatatggagcaccattgattagaagtcgtggtggagacaagttagtgactaggatttcgtcaagatcatggccaatcaccgtgggaagaactagatttccatgctaaaaagttcgtatgatcgagtttgatgtttagagaagaagtaagagaatgagagaaagggttccatgattgtactaccatagcaggaggatgagcaccaggatcagatacaccgtgtggagacgagttgtcgccagaagaagccattgacagaggtcagtggctctgataccatgaacaaggagaagcagaggagaatagaaagagaaagagtgacacaaggaatgcttgaacacttgcctcaataatgaggacttactatttatttataatgcaacagtattgtacaaatacataacaagaattctgttataaaaccagaattcgttaaatgtagaaaagaagacc

SEQ ID NO: 85562 - DNA, 508 bp, Cannabis sativa
aatataatgtgattacattgtaatcttattcacatcacctttaagaacaaactaaatattgtaactcgtaatttgattctgttacaatacccattacaaccaagtaacaactaagtatgagcatgcacaaaacttaatacacatttacttagaaccacatttctcaaagtgttacattaggattcggcctcgattttggtcttgaacttgagctcgacttgagtctcaagctccaacccaagcaagccccgaaccaagagctagaccctagttttgaccactatctaagtggctttagtctcgacttaagcaccccaaactcaaattcaaacccaagtcttcgaccaaagaattttttttttttaaaaaaaagaaatgttgttataccctctgaacttagaaatgtatcaaatgatacttcctgaatttgctcgttaaaaaatttctttgaattattgaaattgttagatttaagaatttttacctaatttaattcaattttattatt

SEQ ID NO: 85563 - DNA, 1151 bp, Cannabis sativa
tcaatgatgacggagacaattgacgtgggtgtaaaccaacatctctcaaggttttaaggggagtacattcacagccgatccccaatccaacatgatgtagcttacgcgaatatcagcaaccatacacgtcacgttgagaggccgattatgtaaagaagctcccaactgacgatccttatcatcaaaagttatgcatgccatacaagaggtatgcgtttcaagtgatgtaggtttcactggttctattttctccgtataaaattcaggacttgtcaatgcgacaataagtgcatttcaacgctcaggagacatttgcagtgcatcataaacgcttaaaacagtagggatgcgctttagatgagccaatatatcatattttgctcgcgtcatttcatcttcaccagtgcttttgcctcttcgattgtcattagcaaattcttggttggccaaagatgaaggcttttgaaggtcttgtttggctttttcaagctctttcgcttctttttccttctttgcaaaaattttttgtcgcatatcttgcaaggtaatttcatctacctctttttcactttcaagtgaggtagattcaggatcttcttttgtcaacaaagtcatgcagcaatctgacacactgtcatcacaaccagctgtcttgtcctgtaactcttttggtaaaaactcctccagagttactagatttcattttggttgtttgaattcgtttcttttggaaatggcctttcgcctttagatccttttcttattcttttgatcctttatatctggtctaccccaaaatttgactccggagtttccaaatggtttccgagatggaatttttgcaggttttttctgagtacatgtttgccatgtactttccaaatcctcttcactatcataccagtcctcccaaatttctagattaggctctgacataagctcatacaacgtaggaatatttgggtttcttggctttggcatttctgagtgggcttgaactattgtaacttccttgtcaacttcgaatgccacagaaattatgtccctttgtgtgggatcatttggtattttggtcattctcagtaaatgaggttgtatttatcgccgctttcccaagagaagagtcaatctcaatctcttttctcttgatc

SEQ ID NO: 85564 - DNA, 1992 bp, Cannabis sativa
agaagaaggtttgataatatcttttgaggttacttcaaccttcattttttttcctttctgttttgaatactaataaccttttaagttgctataaaagtctagagtagcaatgtgcatatatatagtaaaagagttgggtgttatgttgattgtaaaaggttctcctctcttaatgtcttacgtatagaactgtgagcaataaggtctatgaagaaatcaatgggacaaaagaaagaaaaaaaagtccacttcgaacatgatagctcatatggctatagctggatacgttgtaattaaaattaaaattaagccaatgaattacacatttccgattatttcaaaacagaaaaaaattacacatttccgattatctgaaaaaaaaaaaaaaaacttgatgctaaagatatatctattttgccccttacctaccaatgccctaattaatttcataatgaattgataatgagaagtgtcttttctcctatgcttgtaggataagctaatcatcaagagtcttataatacttttaaattaattaatagaaaacgttggacgtgacaattctcatgcttatcatcagacatatctaagtaaataagaaatggttactacaaataatcatacttttagttacaacaaaatttgtaattaaagataaaaaaagttattgttaattataaattatcattattgtgttgtgactaaaaatattaatcagaaaaattacaatttgttgtgactaaatgtatttttagtcactatatttgttgtgactaaaactaaattaataacaaattgtaattaaatattatgttttagtcacaagtaactttttgttatgactaaaagtcaaatttatgttgtgactaaaaggttgtcactaaaagtatcaattttttgtagtgacaataaaatacctacactatttcatattgctattagtttaatttcatcaatccatgaactacaagctcttgtttcattctttgtttattatatttctttagttttttatcgtttattagttttcgaaaatctcggtaagcacatagttattaaatttctcaacaactatctattattgccagttacaaaaaactaacattatgctcaaaactgactatttgtaaccaacacctattccaccaagttttacgtcgatggcataggtgacccaactaaaaaattttacccttactatttaaattcgtaagcaagaaaattttatttttatctcattaaagaacaaaagccaattaagattcgattaaaactttaaagcatctaaggctaatatcctgatttggcaaaaccaatcactaatttttattgtttaattaatttgaactgatgtttaggaagacttggcctattctagaccatatcattccacattttcggtcgctaacttggtaaaaatttttgtacctgaaatattgaaattcatttgttgtagcttagtttctttcattcttgactttattaactctttaacaatgataattcttttgcaatactaacttcttttttgtgaagtaatatagctccaccaattattatttttcaaaaaagtaatcaaattttattagatttcaaattcagctaggtagcaagtcagatgatcagtatataaacacgatcagtaaccaccaatcattatttttggtacactatatttatgtttatatatttataatttccttatgaaacaagttgatacttgtttgttgtgtgatcttgagaaagaaacccacccctacttgtttttcactggtgattatagtcataatatttgtaaacagatttttgactcggttgggcttcataataagaagatgaagcttggcacttgtttgaaatggatagagagaagtagacactccatgttccacagggaggtctatatatagcaactgtaaatattataatttattgtatttgggatgcaagaaatattgttctttgggatagcaaaatatatattgtccatac

SEQ ID NO: 85565 - DNA, 578 bp, Cannabis sativa
tcttatgctataaatttagcataagtgaaattgtgtattgtatttatttttaatactctaaatgtgaaatttttgcttaacagttacccactagagaaatggttatctccactaggtgcgtttgatctcttccagtgtatgtagaagatagagaattctaagtagatttaattgatgtgatacttggaagatgcaaagagtacattcattctgttagggggttagtttgttttgtcgaaggaacaatgtcctaacaatatgaaaaaaaaaagaaagaaacaaagggtatgccctatgttgcggttctaggatgtttaatgtacgtgatggtgagcacgagactggatatagctcacgctttaagcatcctaagtcggttcatgtccaatctgggcatggaacattggaaagctgttaaatggttattgagatatttgaagggcacttggaattatggtctgacatatgcaaaagaaaaaggagaattggagttaaaagggttcgtggacacagactatacctcaaataaagataccataaaatcaaccactccctatgttttcttgacaaactggaac

SEQ ID NO: 85566 - DNA, 1546 bp, Cannabis sativa
  modified_base (42)..(60): a, c, t, g, unknown or other
ttttagaagttcatatttacggtgttaatcaacatacttgtnnnnnnnnnnnnnnnnnnngtaaaataatttccaacagttaacccaccgcaggctgcctagaatttggaaaaatggtttgcagtaatgcaagctagaattaatgaacaagacgatgagatcagacgtctgaggtaggtggctcctgcccctgctgtgctggcagagccagtcgctatcctaaactcgatggaaccactgtacgaaagattccgcaagcaagaacctctactctttctgggaggtccagatgtgatgaaagctgaatagtggctgactgttattactcaaattttgatttttatgggagtcaccggcaatggcagagtaactttgcaatattcctattctaggaggatgccacggtctggtgggatatggtggatctttctcgggatgtcactaccattacttgggaatattttcggaatctatttaatgtaaagtattacaatgaggcagtttgtagcgcaaggagaatacgactgttatagagtatacaacccagttcgataggttggccttgagaattgtgctaaatgacttcagtaagaaagaaaagtatatggattgattaaactctaaaattaaacacgaactgatgatcataacaaatgataacaccatctatgttgacatggtgggaaaggcactatgagctaagggcatagctaagtgcattcaagagtcccaagggactccgtttgttggtggagtactgctcctcctacctctggttatggtaggggtggtagcgaatcgaccactgattagaggagaaaggaaccatttgcacctgctggcttaaatcggaacaagaggttttgagggaaccagagttgtggcaactatcaaggtggttccaaaacctaatacactaacccaaaatgtcccaactataagaagcatcatctgggtgagggtaaagggtgaggatgtttccagtgtggtttgcctggacactataagagagattgcccacaactaaagaaagaagagcagaagatagaagcaaaacccgcttcagccagggtgtttgctcttacttaggttgttgcagaagctagcccctcagttgttatagttcaactctcagtcaacaactcttatttctttgtaatatttgatttagctctcagccagaatttttgataaattgcgtagaccatttgatagttatgataaggggtttggaaccctactgcctggtggagaattagttatctctaaaaggtgggttaggtctatgccggtcagaattgaggattaggagttaagtgttgatttagtataattggacttaacgaatcttgatatcatacttggaatggatttcttgtccaagtattttgctagtattgatagtaagcggataatggttatcttccaacccgagggagaggaaccatttgtgtttgtgggatcagtttagggatccaaaattccaataatcttggtattaaaagctagagatttgttacaagatggatgcctaggggttttggca

SEQ ID NO: 85567 - DNA, 5182 bp, Cannabis sativa
  modified_base (5152)..(5156): a, c, t, g, unknown or other
ccgccggtaataactatatttgttgtagtgagtatagtgtcataagtacagggggcgaaaaagataattattcttttctttattaagcatatatcattattcattttaattagaattttaacttttgtttaattatacacaaatttgtaagtttttttagttttatttttgtcttatttatattgtctatatataattaattgttgttagtgtaaaaactctataaatagaggtcattcatgttcatgtgagtgaaaactctataaatagaggtcatattattcacttgaaaaataagtagttgaaattatttgttgtggttagaaccttgtgaggatatgctcatctttagacactaggctgagtatatgaggcttgataaatccttaagagcatttctaaagtttccctaagtgtccatatgagggaggaaatgacttttaggaaaaaagtccttgagtcttggtcatgctttttgtgtgttattcttcttcttgttctctatatttcttgtaatcttgatgaaatacttttatttgtattttgagtattttgattgtaatcctcatgttctctcttgtaatgagaacttttccaacagaacctctacctcaagacccaaatcccaaccggtaagcatcccaaccccaagacccaacgagaaagatcctaacctcaagcctcgacaacaacaatctaaaccccaagccccaacgatctcaggtatcgctctcattctcctgtctcttctctatacacttagatctcatttttatatttcttctcttttctctcctctcttttctatatgccaatatttgtaaatgtttagatattttttttttgttctaggtttcgtcggcaggacacgggttcggggtgttggtagtagtggccagtgttgtggtacaagggtgttaatgtagttttctttttaatatttatagaaatataatatgtatttttgtatattgtaatttgatttgagatttgatccattgtttatatattttgggttttcatattcttgtttattttgatttgaaacggtgtgtgagatcagaaatggtggtggttacttatttcagttcaagtctaaaaattgtggatgagatctaatttatttatttttatatatatttttgggaaattctacaatgcacccccttaaaatggatatatttataacacacattctcttcaattgcatcaaactataattgacgctattgagtcccgactttatgttggtgacatagactttggtcctaggaatggacagtaaaagtataaatgtcagttaaaaatagacacttattcccttttttctagtagtgaattatgaaaattcaaatgtatgtagttacaaaaaaaaattatgtacgcagtattggaggggtaacaaaatattgagaaattttataatgcgtcctcttaaaatggatatattgatacatctttatctgttttagcgcccgaaataattttttagtcaaattttttctcatgatcatatacattatagttatttaagatatcctgcaaaattttaagaaatttagaaaagtttaacacgccgaaaattacattcaaacaatgtattgcacgcgtgactattttattttatacgcgtgtaaaatagatggtttgaacattattttctatattgtaaattatttgaaatttcttaaaattttgtaagttatcttaaatagttataacgtacatgaatatgaaaaaaaattagactaaattttttttctgaatgccgaaacaagtcaaaaggtgtatcagtacatcccttttaagagggtgcattgttgcattaccccaaaatatttaatcttataaagtacaggtgcatatgtttttccatagttgtagatatagcatgtagatttatgttttggttaatattgtatatttaaaagttcaatggtacaacaataggagctggtgggatggtcttctgtaaaggtgagcagttccatccatttttcttgctataagacacattaaaatatttcggaacccaagtttcagacttggattttctttctttttgaagcactctctgattcttctcgatttctttctttgcttctctagctttttcccaatttttgctcatgattccttggctcacctcactccaaaccatagctgattcactttgacataccccctaacaaaataaataaataaataaataaataataagaaaaataagaaatgcacacgaataaatggaaataatggaatgactatgtaatgttgttattacatttagatctttcacaatgggagttttaagtcctgaagtgatttcttttgcattgtacaaaactttgacctcgccatttcttaaatccttcagcgtgacacttctgcatcaagaattaaaaatacaaagcaatagttatgatcatgatattattttaaatgataatgagaaacaagatactaatagttgaaaacaactatttatacacacttatcccattgcccattgatctcaaatagttgtctattagaagaggaatcaaatatctttcctttgattgttctaggagttcctctaagtcctaaaaatgattttcctccaaaggttaactcagcttcaagacctgtttcatggcatcttagccaatcactacctccccactcaactcctggtggaaagaatttgaataaaaggcttggggagttcatcacataagtctctccatgattcataagcttcacctctctttgtcctcgcatcttagcttctattaaagtacctgcaaccaaattcattattcattgtaaaagcattttccttctaatagatcttcccaaatatgttcaatttgtatattataattaacaaaaagtattaatgaaatttataatatatttttataaaaataatatcactcatgattttattaaaattctacttaaaaataataaaacgaaaaaaaagcatgtattaacaaatttatttaaaaattcgataaacttgttaaaaatacaaataaagaaacatgatctattatttaattttaataaagactaaattaaagtaacactttttgttttattttgttatttttttttgttttaaatttaatgcacacaagttagtgttttattataaattttatacatatatatatatatagtatttttcaatggataatactaattgatgagaattttttaaaaataactattttaaaaatattaatttttagaatgagattttaatctaataactgataaaaaatgaaaaattaatatcacagatacaaacaaacttgaggagaaaaccacgatcctaaagccctgggaacttagcccaacgcctagggtgccctggtgctgggtcgagcacgcaagttaacaatcaacctagtgcactggttttgatcattcaaatgtaaataatgctccaagcattctcatcaaaatggttaaaaatgaggtaggagacctcttcttgaagttctagaactttggaagaatcaaaacgacatcccaaaagctctgaagtaagcaccaagcacccaggttgacaaatggcctagtgcgctgggttctgcttctaattttgtttcaattgttcgtcttgtttttttacaataactgagagacatgaagtcagaatagccaaattcaacacttcatattttcacatttttaataaggtgatttactcaaaaattgagtagttttgagtctcttgttttcgcagaataacaacatctttgagagttgatgaccagcttcgccaaaatacaaaaatggactaagtgatatcaaaatatcacttagacatcaaaaaatacataccctgcacgttataccactcacccaacatccaagtcaacatcacatgtcaacctaggcactaggatgtcaacctgggcattgagcccagaacaactttcagtaaaatggccataactccctcaataattattcgatggacactattcaacttgagttttgaagctatttcaatgctttatctagtcatgtctcagatttcaattgcaattctgaagttatctactctaaattttacccccaagggagttacaaatttaagctacaccttacccagagcgagttccgccatcgcaactcaaactcaaaaaattgttgataaacgtcaaaagttattttttaccattagattatcatctacgatcaaaaatatcctaaatttatttttccatattttttagattattttattcacatttaataggacctcatttacctataaaaagagagcttctctagctcatttttcatattcagaaaatgtagtcataaggtcaaagactttcaatctagtttctctatctgaaaattagatcatcaagacttagccatttttttgtaatccatctcatgagaattaaatctcgaagtaaaggtagatccattattgtcgtgatatagggagtgaagtactataaattattgtgtctctctatttatacttaacatatatctcattctcgccaatctagcgagcagatgtggcttagaaatttttgtctagatttatcagtcaatagtttggtactttcattaagaacaacaactcaagaaagtcacttacaagatggttgaaacatgctcttcagtatcgacaaagaagccccaaaaattagccagaaaactgggggaacaccagttattaaaactagaactgggactagtcctacaccgtaggtgctaggagtaggcccaagaattaactctacaactcgtcccccaaggccaccaaattctctcggtattagaaccaacgaaaaaatgccacctagagagccatacgttgagttagaagaccttgaggaggtcgatcctcaggttgaataagcttagccatactgtggttgatctacaaaatcaactacgagactctctcaataggcaactcaaaattagttcattgaaaagtggcggaacatcgaaagccaacgagctaagtaggtacatttgagagctaacttgtctcaatggatttgagaagcctatcattttgttgcgggactaccccctgtaggggtcatccgagttggtaagagaaattcccttttgaccaactggtcatgtgggaagtagtgctctgttaggttttatgccctannnnnaactccatttcaatgtaatctatttt

SEQ ID NO: 85568 - DNA, 571 bp, Cannabis sativa
ttttttttttgtattattatagaagattggttttttatttaacaatctgcttaatatgattgatccgttatagtagttgaaagaatggaagttgaagaatcgtagttgaagaatctgatgtattcaaaaagtggtggtttctagtgactcatttttcctaccaattttgttaggtttgactaattagtcatattattgttccatataaattttagtttctagattaagttttattttaattaaatgtattaacttttgttttttgaaaataagcgtattcatgtcattaaataaacaaattggacctctccgtcattacataaaagttccaccggaaccgagtcaatcggaatagaaccgtacaacttgtgagtaaaagctcaatttaccatattatgagcagtaaaattacaattaaatgtattaactttaattgcttttttctttaacatatctcatatgttatattatatatatatatattgagtattccttttgtttgattatttagttctatatttggtttgtttttttgagtttggttgccttgtgccatatttttagctagttt

SEQ ID NO: 85569 - DNA, 870 bp, Cannabis sativa
  modified_base (795)..(807): a, c, t, g, unknown or other
aataaaaaccagccacctaagcccgttagtgagattaccaaaataccatttatttcataagttaaacaataacaagcctaggggtaaaatggtcaaaagcaataacctcgctcaaaaccgatattctatttatcacaaatatttattccactaagaaaaaggttttagagttacccatgtgactctaacgaccatccattgcattttttatcgtcgccgagcaaaaattataaaatttatataatgcatatttaacttaagtaatactcttagagtttaataaaatctccgaaattgagaaattataactctaatgcccatttctaataatgtgacccataacataataaactcatgcataattataaaaatctcaataattaatgctaattgtctttactaatccatattctaatatgcggtcattacattttgggtaatcgtaatacatgtatttatgcttaagaatggactgttgttcgattataaatataaaaagaaaatagtgaaacttaaacatgattttcattgatgctcacatttttttttttaaataattcttgtgaccttttactaatttgaaaattattcaaattattcatggtaaagttgtacgtctccgcttcaagcttccattgggcccttacacccaaggaatgaatggctcttatacacgagtacgtcactggctgcttcatggagtgacgactgaccctacagaccaacactctctcacgtttcctgagaaaacttctcaggatgtcacccatcctgaaattaccccaggtcaagcannnnnnnnnnnnnagttctttcgtgatgggctactagaaaagaagatgcaccttgttgttataggtagtaccaatc

SEQ ID NO: 85570 - DNA, 1076 bp, Cannabis sativa
agcaattatccatactatttggctttaaccattttacatgtaagcggcaaaaacgacatcacagcagttgaactgtggcaaaaggagacaaaccaatggaaggccatgcgtagagtgtatggagcagtttgggacatggcaaatccaccaaggggacccatcacattgaggtttcaagctacaactaatttagggtacacttattgggtttactctaccaatgccatacccaaactttggaaggccggggctgcttatcaagccaaagttaagctcattatcgctaaataaaattaatatccatacaagaattaattgcttattagattgagatgtatctcttcactacgtacgtactataattaagttttagttaatatatagatgtgtagagaataagtaattgtgaaatttgtgtgtttcgtttacgtatgttttattattagatgttgttttccttttcaatgctttaaaagataataatgggtccattggactttgtacgtactttaattggaataatagagattgcatcatcaataaagcttttgttattatatcatataagtttttgctactaggcatattaggcgcgtagatgatcatattgttgaaggggctagggtatgtataaatggcagcagcttgtcaaagtaaaaattatgatagtcatatctttagagatgttgggaattggaatatggttgcaaaatttctaggttaaatcggtgcatcagatgtatattaaagagtatgattggtggaattacaaagctcctcctttaaagttcctcctttaaattctaattggtatattggagaaaagttggtaaggtaaacctgagtttctagcattggattataaaattgttgaggtgaacaaggaaataaatcatagactggtatgggagaggctacagaccaaagaaaggctatttcgattttgtgttttgcaagataataataaacattatttcagttttcaattaaactattaatcatgccaatcaatttttctaatctctctattataattaatcaaggcaaaacgttcaataattaaatctttttaccaa

SEQ ID NO: 85571 - DNA, 523 bp, Cannabis sativa
gtctggtacggtctctcaagcttcttgattggggctttcttcagtcgggtagtgatggaacattcacatatggaaacttattccttggaacctgaggatcgaaaaaggatgttcattttcggtatgggatttgtcggccactgttttgctcaacagctcaagagccaaggatggtaaagattcatatgatctctttgtttgaattgattttactgtgttaatatatttagaaaaagtttccgaatgttggagcttctgaagtggattatcagggatgtgtctggtacttgcacaagcattatgaagaagaagcagcttgcagactggggatttgataatggtatttaccattttgacgcaaatgagccagagtgagtgcacgttcacatttcacttcataagtttttatgttaatttattgatttgtattgaggatttagtgattaaccaagcaattttagtagatcattgctgttaatccattgtggataaggtaaagtttatgtctgtggttcatatcttc

SEQ ID NO: 85572 - DNA, 1603 bp, Cannabis sativa
gacgcatcaaacaacgaggctaaatatgaagccttgatcgctggcttaaagatagctgaggtgttgaaagtcaaaaatctcatctgccattgtgactcgcagttgattgtaaatcaggctctcagggcataccaggccaagggcctgaaaatggctaagtatctagagaaaattcagaagaacttagaaatatttgattactttaaaatcgagcaaattccaagagaacaaaacactattgctgatgccttggcgaaactttcgcagaataacttggaagaattgaacttggttctagtggagatgctgaacaaacaaagtatatgtgaaaaggaaaacgtggagatgatagacagttcacctacatggatgacccctatcatcaactatctgctcgacagacaacttttgactgacaagaacaagggacgaaaactcttgtattcagtgcctcgatacacaataattgaaggcaaactataaagaagaggttattcgatgcctctacttcagtgtgtattccctagagaaccaaacgagatcattagagaaattcatgaaggctattgcagggataatgcaggttgccagagcctatctaaaaagatcattagacaaggatattattggccgacgatcaatcaggacacccatgagtttgtcacaaagtgtgataagtgtcagaggttttcacataaacctcgcgtgccgccaacggaactcgggatgatgacctcgccttacccatttgctatatgggggatagatctaattggggcattacctacaggacgaggacgagccaagtacacagtggtagcagttgagttcttcactaaatggatataggtcaagcctcttgtttccataacctacaaaaaagtcctcgactttgttgtcaagaatagtgtctgtcagtttggaattcccatgaagatagtatttgataacggaacctaatttgatggcgacttgttcactgagttctatgagaggaacaaaataattaagagcttttcttcaatatctaggcctcaggcgaatggacaagtggaggctattaaaaaaatcttgaaggatactatcaagaagaagttagatactgccaaaggcaggtgggtcgacgagctaccacaagtactttgggcccacagaactaccaggaagacatcaacgggacacactcccttctcgctagctttcagcttggaagcaatgctacctattgaagtgaacatatcgactcacagaagagagttttataatcaagaagaaaatcaagaacttttaaagttatccctggatctactcggtgaaaaacaatctcagtcgcaagtcaccaatacagcgtatcaacactgagttacaagatattttaacaaaaaagtcaagaaaagactattcaatgttggagacttggtgctaaggtgggtatttgcaaacacaagagatgcgtctgcaggagtgttcaacccaaactaggaaggtccatctgtaatcgaagcaatagtaggaatcagagtttacaaattggctcgattcagtggctcgctaataaagaactatgtaagaaccattattttctgtagtgacaaattatgtc

SEQ ID NO: 85573 - DNA, 836 bp, Cannabis sativa
tttgaaacctaattatattccaatactaattagttacttttaactaaaactataccttatatgtgctaaaatatcatgagcgcactggaactctttaaaataagtttaaccctatcatgagttgttgtagcccaactacttacttactattgacctttaacaatagaataaccatacaatcttatactatattaatcaaccaagttttccacttccaattgaatgaaatttaattatttccaagatattggtttttgtctaatttcgactcaggagagtgctttcaagaatttctgttagcggtcctctaggttaagaaaacttccaatatatttgtcaaaattcatagctctcgacgattttatcttttaacagatttattatcattctattgtcaagccacctcttttgctcaaaatcaacatattttgtgattttttttcttaatcattttttaagacgacacttgaacatacttattgttactcaaattataactacgcaagtgtacgtatttattgtagttaaatactcacacaagtaatgtagattcacagggaattgatattgagtactacttaattagatttgtgtttctatttggttgaatcaaaaacaaggttgaaaaaataattaatagaaaaataaaagaaaataaaagaaacaatgtttaaatgaaattgactatgaatgaaggattaggaatatgaatcctgttatttcaatcacccaattgttaatgtaaaatatcaattttttccctttaagtgatgacagattataaaaataacactaactcttctcagatcatcaaggtcttaaatcatatattatct

SEQ ID NO: 85574 - DNA, 995 bp, Cannabis sativa
ttatttttaataattatactattaaataattatactattttaattattaattcaaataaaaaactaaaatattaaataaaactaacactacgtggcttggcacgtaacaatcacctagtagattataatgccgaaaatttaaattatccaacgtacataaattaataattatacaagtatataaactacaaatttttatggggcattatactaacacccaaattttttattaattaaggcactactattttttttttatttacatcaaatttcaatttttaaaatttgtattcatttttttcttttctttttttttttaatattttaataatacatatataaataaaatatattttaaatattaatgaaaaaattaaaaaaaatatataaatgtaaaaatattatcttaaaataatatttatgagaataaaatgatttttttattaaaatatgataaaatattttatttaaattaacataaacttataaaaaaatattaaagaaaagtatttaaataaagacaaaataatttatctttgtcgtgtctttatatatttttaggtatataatatatctttgtatactagctacgtaagagaaacgtgcatttgcatatttgcttaaatattgcattgttattactgcctataataattactataatctaagtaataataaaaaaattattatatattcactacaaaaaattgttatttttagtgatagctttttagtcttaacataatttttttgtgattaaatgtgacttttagttacaacaaaatgttacttgtgactaaaatatagtatttggttacaagttgtcactaatttaattttagtcaaaataattgtgactaaaaatatatttaattataataaattgtaatttttgtgattaatacatttagccacaaccttttagttacaacataagaataataatttataattaatcacaaatccacaccgttttgatgtgactaagtaaaatt

SEQ ID NO: 85575 - DNA, 1181 bp, Cannabis sativa
tcggttaaaaattgataaaagtgtgttgagttttgcctatcactaacattgcgtgttatgtcaaaaaaatagacaagtatttttttctaacaagttttcatgagggggtgattattaagttttttttttttggctaatttattagaaaagcttttataattattgactaattttgtttgatttattgactaattttcttgtttaaaaattgaaatatatgttgagtttatttttataaggaaataataaattattttatttagtcaatattcataaacataaatagtatattatatatatatatatatgatattttaaaattgaaataaatttaaataaatgtgttttattcctttatttatttatttattatgatcctgtttgaattgaaatatacggctaattgacttattagcggtcaaggagtatttgcgagatgaatttgactttgaaggagtttagatttataatactgactagacatttcgtctacaccttttctatatctattcaaatagaatttcggtcatttataatgaatttctgtaagaaaattaactaatgagttctctttgtgttcaaaccttttgagctctgatttggagtatccattatctctataaatagcacttaaaccagaagcaaaatgttacatcttccatctctcttggaaacctaattgttgttccaatcttatcttcatgttttttgtatttgccactctattttctttctgttttgaatgtttacaagttgtattattcattagacgttgatacaagctttgggagaagtcttgttttaaagtctctcaccaggaagagagcatccgttgtttgtttgacgagattttaatacatcaacgtctcaagaaatctaattagaagagtggattacaaaagatattattacaatatattaagaggaattcttatattgtatatataagtcaaatacttttgtaattatttgagactttactaatagattttattttttaggcgtggtgccgtgaactagtaatatctaaaagatattgataccaattataaaaatcttgtctgtgactttactttctgtattattattctaatctttaaattttggttctgatcaaacatattttgattatgataaaaaaaaattataacagttttgtattatttaaattgtttgttaaa

SEQ ID NO: 85576 - DNA, 591 bp, Cannabis sativa
ttcttctctatttatttattttttgaagtacaaaagaatcaaacgaaatcctacaaataacagatgttttaagaaaaattaaaacagaaccacatggagaaacatcaactagaaaacaatgatccattaaaaaggtcaactgggtgttaatcaaacaattgaaaaacacaaaatcgatcaaagggttaagaataaaccttgggattgatagtttggagagtgacaggagaggaagaagggtttgccatggcaatagcagaatcaagtacagttttgaatgagaggaagcgtgattgggaagaagaaagattggtatggttattaagataacgggtgagagcgtttttaagcctgccagctgtgaattttcgcatcgtgtcgtgtctcaccttttatgttccaagcggcaattttttttttctgaggactcgaaaaaaggaaaagaaacttgatcctaacacttcctccaaaaatttcacgcaatattgaaacaccaaacatatattcctttctttcattccattacttcttatacgcaaaattacatattccttttggcatcaattacagaaatgctcacaactacatatc

SEQ ID NO: 85577 - DNA, 1943 bp, Cannabis sativa
ataaaataaaatatactcttaaaattattctaatttaagttgatctgaaattaaaatttctaactttaatataattttctatttaattaaatttattataatataaacaaataactaagcatcttgaataaaataaacttgaatattaattctaatttaaaatctaagaaaaatattctaatttaagttggtctaaaattaattattaaattaatttttaacttaaatatatttttctccttaattaaatattagaaaatataaattagttactagaaatttttaattagaatatttcattaaactaagtgtgttttttctaaattaattttataataatctaatgaaaaattaatttcatttatttaaaattaattatgttgctaatcaattttagttaggtgaaacgaatataattagcttaagataattatttaaataagacaaatggaccttcacaattagggtgattcatgtgagggagagctgggttcagtatgttgtatccactactaatggccccctaactctcacacaaggtccaaaagagaaaaattttaacctttcattaaataattgttattaattgaataaacccaattctaattggacctaaataaaactatcaaggtgatattttaattttagcaacctagtctatttaaatatctataattaaatgggctttctatatgcatctaagtccaatagcaaatatataggctcatatatacaaattaatttgtatgggtcctatcatgttactaactttatcacagatgaaaaaaattacaaaatttacatgttacaaattatttatttaatctattgacaattggactatgattaaatttagatcattggatctatcaacaagttaatcttagcaatttaaatcaaataaataataaatttgttaaaaaaaaatttcagtaaacaattaaataaacaaacaatcatgtaacaaataagaatttgagatatttattaattgtataattaaattactatttaaataaccaattaattttgaaaaatttagggttgttgaaacaacctaaaatatctttttaaaatttcaaaatttaaactatattcaaaatatttcgagtttatttgaattattttatcaaactaaattaaatatgtaataagataaataatatgaaataaccaattagatatttttcatatcattttttgatcttataatttaagaaaattaaaataattaaataaactaattctaaaatagatttggttaggcatttattattttaagaataaattaataaataaatgataattttcaaatttatatgtcaaaatatctcattttaagtcttttcaaatttctacaaaaatatctaggttatttaaatatatataatattatttataagtaaaatggtataatataataataattatcatttttctaacttatgatttataaataataaattatatcatataataaccaatttatgaatttaaaaattattatggttaggatatctatgaaaatatctagattttatttgaaatttattgttatttaatttatcatataagataatttgaatataattttaatttaaaatatatctaatattaaaatatttaatcttattattaaatattctgtaaactttaagaaattaataaattttcaaaatccaaccacaattcaaatataaaataactaatttttccaattcaaacttcaaaatatcaaaaattaataataaactattaaaacaattaaatattattaattttaaattttgatatttagtttcaaatattaaaaaataatattttatattaatatgtagtgatttgaaatgaaaaaaaaatcaaacgttggtgaaaaaatcaccaaaattggaatttttggggtgaaaacacccttggccgagactgatgctgcaagcagcctc

SEQ ID NO: 85578 - DNA, 698 bp, Cannabis sativa
gtttgttatttctttcttttttctcttctctaactctagctttctaactccatggctgaatttcatattgtaatggtggtttctaagttagctatgagctaaccttttttatagtttgaactgttgaagaaccctatgtcttagtttagtacttttcttatgcaaatattttagtaaaaaaaatctcatgttcattcaagtgttttatgctaatttcttgttgttgattggccaccaatagtttgatgttgagttatgtttaatgttagaatggttaaatacaatggactaaacttggatgacacaagttcttaatcttgttagattacgttagtgataacataggaattaatatgttatttccttgtgtcacatttgagaattgtgcttggaaatggtattcttgagcttgattggcataggaatatgtttgattaggttcaataaattgacaacatacaatttggaagagttttatgcactttttctgaagttcttgttaacctaggatttttgctaaaattttgctagcgttttagtgtagcaaaacgcacaaattttgctagacattaggggattcaatagttgaagcctttcacattttagtagtttacaactcatttttattttcattgtgtagccacttttgagttaatttaccatcttgctagtttatttagttaaagcattaatcattc

SEQ ID NO: 85579 - DNA, 851 bp, Cannabis sativa
gagcatagacccgttggttaatgaagatagttgtactgggttggacgtattgggaggtgggccgagtaaagttaaaaatggtttgggccgtgttgatattgggccgagtaaggaagtatctaattgccctgggcctggtaagacttttattgagaaaaagggggataatgatgttataatgggtgggcctggccgagatgatgcttttagagataattgggctgtagggcctattaatttagtggggccgaatttggagaatggtttaattaataaggagggaggggaagtcaatagtgggccttgtgggaatgagtttgctacgggagagggtattacggcccaggtggcttttccttgtggggccgagctttatggtgatgaggataaggctttagctcatttccttaaagcccaagaagagttactttatgaccttaaacattttggcaagttggacttgtatgaaatcaagaaaattggtggggatattggggtgaagcccacgtcggaaactaatgagcgtactactcctttcaagaaaaggaaatttgagggctccgcttctctttgtacccgtcctaacaaaattgttagacggaacctggaggttgttagagacttcccttgggacactagggagagagaccttgggtcgaaggtggaatttgatgatctttctgaagaaccttctgaggagtcgagctcgccgagctgtaataatggtgttaggaggagtcatctgattggctcgttcataattgaagaatctggatccagtctttccgtgcctttggttacccctgtggaggagaatgtcgaatctcctccacaggagccatgagaggtgt

SEQ ID NO: 85580 - DNA, 2776 bp, Cannabis sativa
accatgttagttgtaaacttgagaaactctgcttcagttcttgttaaatcaatgattttaacatatgtatgtttgtgattgtaaatgtttctttttacttatttctcatgcattcaaatgtcttttctttattttttttcgaacacattagcgttttcaagatttttagattttgcagtgcctttaatctcattgggtgtttatagttctgtggacgatattgtacggttgagtaatgaattctattatggtgacagggatttcgaaagattgatcccgagaaatgggaatttcataatgacgattttgtgaaagatcaaaagcatcttcttaagaatatccaccgaagaaaacctattcatagccacagtaatcctcaaggttctttacccgattcagaaagagcggctcttgatgaagaaatagagaagctttcgcgtgaaaaatctcagctcgaggaaaatatttctcattgcaaacagcagctaatggaaaagcatcaattggaaaatgtgtcacagcgggtgaatggcattgagaaaaggcaagaaagtttgcaatcttttctagagaaagctgttaaagatccagctttcgtagattttcttgttcagaagattgaatccatggatttcggagcatataataagaaaaggcgactgcctgaagttgattactcacaaccagctgttgaaaatggttttgtggaaaaccagagtagttcaagaaccgaattcgggactatttttcaccaagacttctcaagtaaactgagattggaattgtcaccagctgtttcagacattcacctggtttcaaatagcactcagagttccaacgaagatggagaaatttcgattaggaaaatatctgaacccgaacttagaggtgcacgagtaagaacagaaggcctcttccttgcacccgaaccattagagctttcagatacaggaacatcatttggttttaaaatggattcatctttgtcacgaaaacaggcaactaatggaacccccggcttgcgctcattgcatccacatttgatttctagcgaagaaggcgacggccaaatctcttgtctgttaaatctgagtctagcatcttctccattcgaaggaaaccacaacaatccttattcagctggtgtctcccaactaggtcagagtatcaagaaaccactcgaattaaggttcggtgccattccaaaagaatctgatattagagtctccacgatgaagaaaaccgtgcttgatgaaggtataaatcgatcctcttcccaagaggctgcaaatactaatcaagggtcagtagctgctcctggtaaagcaaacgacgggttttgggaacagtttctaaccgaaagaccaggctgttcagacaatgaagaagcaagctctaattatcgcgatccaaatgatggaagattaggtaatggattatcaagaaattctaagaatgtagaacagcttacactttgaacaccgaaataggagtcttcgatcgatcggtgaaggtaactaaaatcctaaacacattgcctaatttgtttgatgtttaacctaaaatccatttcttggtccctactatagattgtgtttatggccattgaagtatagaattgacacaagcattgtacaaatttattaagtatatcatgtaaattttttcaactctataattaggtatgatcaaggtttcattttacatatacatataagtacttttcaccaatccattgtaatttgtaagaataattttagttgatttttatggtttgtaacatagttcagaagataatattagaacacaattactgataaaatttacttagttgagttgcgaattagatttttttgaagatattcggcagaactgctcaaaatgtcagtagataatgaaactcggtgtccccataataaaacagtgcagtttcacctctatttcgaacctctcatgcataaaagaagattggattggaaaacaaatatggtgacaatgttcatatgtgctcgaaaattcgtgttgacctccaatttttcagactaaatgatgatccaaattagaaatattattgttatttgtatgtctacattagtttgagaaattttctccttcatttggtaagttttcctataactaatacaattttttatgggaaacaaaaaggacaagaaaataaatttaaaaagtcttagaggagtgtgaattacaatttttaattaattttaacgtttgaaatcatatgttgaaatatatctttttaatttttttttcataacgatattcgttatagctacaatatcattctttcaaatttttgaaaaaaattgaatagtttacagtacaaaaaataaagttcttaatatttcagtccaccacgtatgttcaaaaaattttaaatttatttttagcattgtaaactattcataactttttaaaaatttacaatgatgatattataactataacgaacactaccataaaaaaatcgaaaaaatattttaacatttatttttgagtacgaaaattaactaagagattgtaataagaaattgacaatatcatttctaatcttttcttgactccatgcatcctagtataatatctaattatacaatatgtaaatatatttatatttaataatatcataacccaaatcaaatctagtgtgaaaatatatttggcctaagacctccatttataaactattgtctcaatagtcaaatactaaatccaatgaatatatatatagaaaagtaagcatttttctatatta

SEQ ID NO: 85581 - DNA, 736 bp, Cannabis sativa
tttagtagtaattaatccaatttcctgtggttcgacctcacttgcatgagtatactacttgattgcgtgcacttgcgtagtaattaataattttcgtaacatatataatacataattttattaaaattacatgtccgaaatctcgtgaaattatttttaaaatattataagttatttcattcaggccaatctaagcggtaaaataaaatttctacacaatttcatgttagacccaaccctcgtggtctagcttagtcggaatatgtaaaattcgtctttaaaactctcgaactcatggctgactcgacactgcaatacccttgtccgcataatagagcccccgtgagtcaaggcccaacaagatagaacaataatacagtatgaataattataataatcacattttacacattacgcctctgcgtatataactgtgctaccaaaccgtatatcacattttctcataaataatgatgtcattgcatctaatatctatataataaacatacgtgttacatgatcacccgtctcttttacagataaggccttaataagatttatctcgattttagttacctagtctaacctagttatgccttactcgcataactcttctcttttattcacgtaatatatttttgcatgtttattcacaatttaaacttaagctaataaccctaacttataatttcatataacaatcatgtaacatacaatcgcgccatcacgttatact

SEQ ID NO: 85582 - DNA, 625 bp, Cannabis sativa
  modified_base (210)..(214): a, c, t, g, unknown or other
agataatcatattaggtcataatcaatagaaacaattgaagtcgtagccctagtttttattaactgttaatttccttattaatttaattgcttcttctttcactatttttataattttctagttttgatattttcttaaattttattcaaccaaatagaagtaagagtttaattttaacgtacttaactacaatcctcgtgggatcgacnnnnntcttggtgagtttactacttgtcacgatacttgcacttgcgtgtgcaaaatatcacaacattatcctcctcaatcttgatgatgaggttttcaggaaagtttcaaatgaagacaaggtaaaacacccacttgagaaagtgggataacatctttctccaagctctttaaatctcctccaagcagaatagaatggctcattgtgttgttggataaaatccttaggatatatcatctggatttaccttgcatgtcaaactcagcagaaaagcattagtaaaataaaaaataaaagtaaattagtactaaaataagattttgaaacaacaaaattagaactaaaactaagaagaaaaactaaattagaacaaaatttaatttttaataatattaactaacaagccccggcaacgg

SEQ ID NO: 85583 - DNA, 1555 bp, Cannabis sativa
ttatttttctaaatgagtgagtatcaatatcaccttaacattatcatctatatattaagactaattagagtttttgtcttttaaattttaatatgtattagattattaaaattattaaatttataaactgttatttaattttatttagttttattaatgtagtaattatctatatattaaattatacccttcgaattataatatttactaaattatgttcactaaattttgacatgtatgtgcattttaaattttcatccatgacaaattttctttaacaacattaaataaaaaaaaattaaatttaacaatttcaattagttaaaatatggagtttaattcatgttaaaatttaaaaacaaaaatccaaattaggcatatattaattatgacttctttttttctttttgattagtgataagtaagtacatgaacataaattataattcggctataataaattaatattctgctaataattcggctatttatgaagaagttttttttttttttttttttatgaatggctatttggaaagtttagatgaataataatgacaatacaaaatataacttttttttaattaaaattatttatatatattaaaaaaaaatctatttattaaaatgagttggacttaattgacaccctttaaaagttgttcaaacacacttttatctcttttgttatcttaaaatttttgcataataattaatataggatgcagttatttaaaattatttataagatttgttaaaatatttttaatactataaaaaatattaaaaaaaattaaaattgataaataatataaaataacaataatatatagtgaaaaaatagaataatttataaaaatatataaataatttataacctaataatccctattataatttaggcaatattctttttcctttccagcattgtaattttttggcagtatatagcatatggtaataaatttaaaattattatggagagaaagtagcatagaaatatgtgctagtgcgttacatataattgacagttcatataattaatgctcttaattacttaattactcttaattaattcatctcatgcagttacaacccaaataatttatatttccatgaactttcttctgttttctctgtcaatttttatgaaatcttcttatatgtgcagttaccttttcatattttagcattgttattagtcatcaaatttccctatattttatagatgcattttatgattagttagcgataatttttaaaaattattttttaagttatatgagactcgatacttaattacaccaataacagtatgatatcgaggagggtgtacgccagtagtaccttttagcaattctcttcatatttatattaagagaaatgttaaaagggtatcagtggtgcctaataccctcatacgtgttaatatcgctattgatccaactaaatatcgagtcccatataatttaatataaaaacttttaaaatgtatcactaatcaattacaaaacgagaaattcaaaaaatgacctagcaatgcccaatagcaatt

SEQ ID NO: 85584 - DNA, 1000 bp, Cannabis sativa
ttttttctcagatttgaaggagatttgtgcgagttgtttgcctgaccatggatcggaggtgcacaactcgttggaattatgatggctacaacatcgatctggtctgcggcggctatagcctataatctgatctagtttctctattgttttatctttatttgttttttcagaattgtatcatatgtattttttgtaataatcattgattttggtatagttttaatgaattttgatatattttttttaataaattctgtaatggattatgatatttaaatttaaaaatatattaattttatttattttaattaatattatatttttttaataaaaattaatactattatatatatttaataatttaaaaatatatattaaaaaattaaattaaatttagataatactttttccaacagttgtaaatcgtcatttaaattgacttttcccaacagttataaactgtcttttaaagttccgcatttttatgacacccacatagccaacggttttaggaaccgttgggaaatagtataaatgacagttataaactgttgggaaaagccaattttgtagtagtaccaaccttgtaataagtatttacatctacatgttcattctttttcttaacattgtgagcaacattacccttaaaagagcgcaatgtcaacttaaaagactctctaccccaacagtactcgtcccatctaccactgttaataatatcaatttcatccctactaatctctttctcctttgtgttactaagaaaaaaatagtgcacaaaatacaagacaacatgctaaagcattgtcatcaccccacatacaactcaaaatgacatcttcaatagatttttcagtaatctcttttaacaccatggaagcatgagtcaataatatggtttgattcctgaacaaactcggatttgttaacatctgttaatttcatttttggcatatttaattgacaaaaatattttattatttaatgtatatttcgg

SEQ ID NO: 85585 - DNA, 975 bp, Cannabis sativa
agtgatgattcccttccagcttagttaaatagaagtaaatggatgagctcttgttcttagatcactaaacatcatttagaggtagctaagtgttttaaaaagaaaaatacgttgaggcgctactacaaacatatcttttatttttgtttttttttctttaataaattaaaaatccgaagataaaactattttaattgccctatcatcgcttatttagtcaaattttaattatattttcggtatttgttaataaacaaagttaaaaagggtttaattgtcgtaaaagggaggggattttgtaggaggacctttgtcttcggtaagtaacaaattaccgaaaacaaaggtgtgtatcatcacaccgcgcaaatcagtcgacctggccagtttattacacaccctcagcccttttgtcgaaacccttaacccacgacttacgcaccaccctcaaaaccctcaacccgctcgctcaaaccctcaaaacccacgaccctcaaaccctctcgatcgctacaactacccccaactcttcctcttctgacgacgacgaccccttcagttactcttcctctgacgacgacgagtacgctcttccattgagtctttgaataaccatagcgaggcagagaaaagacgcagggcaaagaagcattttctggtttgattttcttgtttcttgtttgattttctttatattctgtcattttttctataatattttacaattaaatttttggctttaggtgtgtattttttagctgacgaaacaatcctatccactcctaccatcctgttttgccacatccaagcagctcttaggctctaggattaatatggtgtgctagaatatagtaaataaaaagttatctgagtttctgtattgctataattctttaacgttgggctactgttctattgctattgagataaattgtgatggtaaggatggtcggtcttatcatggagatggagagt

SEQ ID NO: 85586 - DNA, 2068 bp, Cannabis sativa
tcatgctacacaatttgataaagttttagatattcctccatataaattttacccttaaagtggttcatagtcttctattaagagaggtggagcaattcaatacgaaggaatttcgagcaaacattgctcgttgttgcatttattttagtattgaagcgttcactttgattacctttttggattgtatggaagattgtaataaaatagattttactaagattaaaaccagattattggcacttcttttcgtggtgttaatcaaatcacttaaaaatctcttgaagatgcattttcggattgtcaatggattaatgtgtcaacggtataatgtctcatatgcatttctattctatttatatatctcatatgtgatacaactataaatcaattgttgtgcaactattgaaaaaaaaaagacagtgtaacaacaaattatttggaggtttgtattaatgtcacatattaatatgtcaagtatgatgtttataatattaattctatttatatttatcaaatgtaatacaactttaaatcaattgttatagaaattaaaaaaagaaagacaatataatagtaaactatttgaagctttgcattaatgtgtcacatatgatgtatcatatacattactattaaataaaatgtttttgtctaactgcttgtatggcatgtctcttctagttgtgatatttttggccacatttgttgcatttattcatgtctctagtaagagcatgagtatatggcagtttctctttttagattatgttgcaattgtatgttttatctttcaagttcgccatttatgacttttattgttccactttaattagactttcatttataggtttcacttacatgtttaagtgtaataatcagatattaaatgtaaataaaaccaaaaaataatgataacaaaattgtatagcaactaagatattagtaagataattattagacaacataaacaacgtacatgcaactatttacgaaccatgtatttagataatgttacgaaaatatttaatcaattatttttaaatgattaacaacaacttgtaggttgaggttattttataaacaatcaactgtaaaaatagtgtaaatcaacatcaactcaaccagcgttaaaatatgaataagcttacaatattagaattatatttatgagagtcttgtgttggattgtctatgtgacatacctgttaataacaattaaaaatattgtagcatgatcaatgtgtaagtattgctatatcaattgtttgagcgttcataaaactaatatttaattatacgacaattatattgtattgctataattgatataggaatacttacacattgatattagttttatgaacgctcaataaattgatatagcaatacgacaattataaaactaaatttaaccaaagtattatttttatgtcctcaaagtttgatcttattgttcaagatgttaggaatttacttttggcttaatcttttgttgagttatgttttgttaaacgatctgcaaacaagttggctcattgttttggcaacagactcgtatttctctacaggttgtgtgcttaagttggaggattgttcctctaaagtgcggtctattgttttgaacgagtttattaattaataaatcttctgatttatttaaaaaaaaaaacaaaatatactttaaaaataaaaacaatattctgttaaatttaacggtgttagtagagttaaatttataattatatataaatataaatattatttattttagattattttaaatatatataaatattaatataatatttataatattattattttttatttttaatattagaagtatatttaattttaatattttattatttttaatattcggagtaagtttaattttaatatttttaaattttatatttattttttaaaatatttttaaaacattaaaaaaaattaaaaaaataataagtaatttctttttaatttataaaatttaaaatacatataataaaaataaaaaatgaaaaatataaataaatacacctaataataacctaatatatatata

SEQ ID NO: 85587 - DNA, 1498 bp, Cannabis sativa
ataaatcacttcagataactaatcagattactaatcagattgtaaagggattttaaaagggattttatttagggcacaaaacccaacaagatcaacttatatgacatcataacactaaagggatctacttagtaaagtctgactttcatttagcaacttccatctcagagagcaatgaagaatcaacatctgataattaccaatgattgtggaagttcttttgggctttacaaatacatcaaaaggttaaattatttgcttggaaggtcattcaacaagcattgcctattgccactgccttgcacaaaaggaaagttattgattcaactatttgcacaaggtgtaagagtgcttcagagtcaatatggcatgctttattcatgtgtaagcatgcaaaatcggtttggaagcaaacaaaatttaacactgatttctattgtgctcatggtatgtttaatggagattatttcattcatctctcgaaaactatggacaaggctgatgttgaactcctaatttgcctaatgtggagcatttggaatgaaagaaataaagtacttcatggtggagtaaaacgtgctccctctgctcttgcaacacaatttatcaattatttggataattatagatcaataaaataaaaaggtaaagacaatcacaatatttctttgtcacaccagcaacacaatataacacctgatgttatgcaccagcaaccaacgaagagaattgtcttggaccagcataatcaaacacaccaagttgtgcaactctcttcataccatagagcatgtcattcccaggatttattcaccaacagcaaacaacaatttctgagttgcattagcaaactcaccctgcaatcaaacactccatacaacaacatgttgttgcaggttacaacaccagactaacaaataggactccatggcagccgcccaatataaattattttaaaatgaatgtagatgcgacagtgaatgataaagaaaaagtattaggaattggagctgtcattagaaattacaaaaggggagttgtggctgcattatccaaaccagtacaaggttgttttagaagcgatgaaatagaagctaaggcactatttcatagtcttaattgggaaaatcaacaacaaatcttgatagcgcaggttgaaatcgatgctttaagagtgtcttctgctttgatctcttcacacaaaaacttatcttgtttttcagatttaattgatgatgtacgctgtcttttgtccttttttcctgaaattactcttgctcatgttcgtaggaatgctaatcaagctgctcatggcttagcaaagtatgctctagggttggatgaagatgtctgttggatgggggaaattctacatcctattttctctgttgttgtaaatgatctttgatttaataatagtgaaaaattctcaaaaaaaaaaaaatgctatttaaattaatatattagaaggaaataattcaattccaacttttttttt

SEQ ID NO: 85588 - DNA, 1136 bp, Cannabis sativa
ctctctctctctctctattttggcgtacgaaatcagagctgaaaaacctaatttgtatcatgtttaaacccaaggaaaaagatcgctttgaaccgaaagtgaacgattctcattccacaaaaatcaatcctctgaatcgttctgaatcgtgcgtaactacccattatcgttcaacagtttaaataataatatttacaaatataattactaaaaataataatcacaaatattattatactcttataaagttaacacatatcattattattattatgatctttttgttttgatggatgatgtaatattttatattatttaataattattaatttttttgagcaattgtgtctcatcaatcatgttgtaaaaaaggttatgccttacttcactcacttgttcaggtgacttttaaattttattgagaatgtgtataaaccttctatttcatatttttcaatattaataaatttttttttaaaataaaaaaaggtaatgacaaaattaattgtttaaaataatataatttttttgcaacctttaaaatggacagagaagtacaatatgatatattatatatattgacatttgtatgtgctatagcttttgtcttttaaggataatcatcttctatcaaaaaagaaaaaaataacatatataaaccatttgcatatataaattcacgtaattcacttaaataagaaaacaatatatatatatatattttatatatatatataattactcaatttaatcatagtttgaaggactcaaatctcatttgaattttttttaatcatattatttatcattattaaatgaaaaaaataattaaaaactaaatataagtaaaaaagaaacttgaaaggatgaaagctataaaaatcttaaaggatacaattttgtaaatagtaaaatgaacaggaatagtcactacttaaaagtgaagttgtatacgttgcaacataatgaaatacatataatgtactgaaaaattatataaataaattgtgcttcaggaccaattgtttataataattctaaattatttattttaaataattatatttttatcatctatttttgagcaataaattgtattatatattaattaatttattattataattttttttatt

SEQ ID NO: 85589 - DNA, 507 bp, Cannabis sativa
aaattcagttaactgattcatgatatctgcagccgtgagagtgtttgcaaagcttgtcttcaaggtatcaaccatgatagataggataaagtatcgagcttcattgttagcattctgccaatgcttaaacatttccttgaatgccttggttgcattctcacctggttgctcaggagcttcttcagttaacacaaacaggtagttttcacttatgagagcaatattaatgttctctttccttttgacaaagttagttccagtgagcttattgtcggttaatagtgacacaattgggttgttcatagtcatattagatactacaaatatcaatagatagaaaccaaataaggttcaatacaaaagcatacacattcaaaaattattaagcatttagcaagtaggaatgacatgtgaaaatacaaaaacaaatatatcctaaataatttccatagtttttaactcaatcacataagtgtactgttcaggcgagagtcaaatatatcacta

SEQ ID NO: 85590 - DNA, 1618 bp, Cannabis sativa
atatgtaggctgttttaagatctccaactcattacctttgggcttgataaaattctctccagggattgggactgctttttgcctgcagcaatgtcccacactctcgttcaggaatttatcatccagaagtttttgaatttgagtttcctacagaatcaaccatcccgtataaaccaaacactttaaaacccacttctaaattagggttgaatgatgctcgggttaggttacacatagtgggaacccaccaggaagatattgctagtcgatacaggcttttcttgcaagaaatctttgaaggcaaacatcaattcttgagagaagcagcctggccagaaccttccatcgtgtccttcattcctatggcaaagcctttgtttttacccaacgtcacgattgcttttgaaccaggtgacttggattttaaaattatgcctcccaagccacgtacatcaaagactccccaggaccccaacgtcacctttgaggctgagttgatagaatcgaaggtgcgatctatctcaggctacacggacgatatgctgaagacctgtgggatcgaacttgggcaatcatgccaagttagattagtacaagagggtgagtttagttgtttccctccagcgtgtttttcaaacagtaacccgaggaccagtggtgagactagtaccagtggttcgactggtatgggcgcctggagccttgaacatatcattgtaaaggccacacgtcctcttcgagattacttcaaggactacatagatcaccttggagtttccccattccagctaactcccatctcctacaagattctcgctagtttgaaagtcttgtacaattttctaaactgggagtgtcccacactagtagagattgagtatctttactcagttaaggccattccatcaaggaagaatgctgcagtgggcctctactacctcggtactcattctagggagcctaaaatcattgtggacttgccaaataaagtatccttcaaggacaactttttctgcacacctggtctttcccccattggcacaaccacctttcgcaaactttgtaagttattgttttcctcttactcatttatatcaatccttatttttcaactttttgaccaatgttttgtttgttttgacagctctcttgatgaggcctactcctaccccctagatggttagtaggcacaggctcctgataactctctcctatggtctttggtcatccgagttccctttgaacgaggccaacctgcgtccggtgggccttctcgctgacaaggaatatacttgtgattacagcattcccaagtatttttcttggcagcagattactgttctaaaaaaaggataaggcttgggatcccttggctcaagcacaatatcttcaaaacactgcccctcgggatgcccatgcaggagcatcccgaggtaatcaatgtggttggtctcccactgtacttagaggtaaacgttgtacattagtcaccttccaagacttccaacttaatttttatatttgggattcccttctcgtggaccgcattgctcataagtttgaaaacaggtatcctagtgttggaaattattttagcaggatcttagatctactcaca

SEQ ID NO: 85591 - DNA, 509 bp, Cannabis sativa
ttttatatatctatgtaccaaagttccatgaaaagcccatcctttacaaaaacttggagcttagaagtcatcatcatctacctaccatcttttatatgtatttgtatgctgcactatacattgatgatgaagtgcatgaattgggtatcataattttcttgaccaattaacctattgagcctttttttctcaccaacttgcactactccaaacctctaatattaaccctaaatattacattgatcatgaattaattgaatataaataaaatatgacttcaactaataaaaattaattaaatttatataatttatattatcctgaatttagagagtggaactgactgttcttactaattcaggaaaatgtggggcctttaactagaactgaaccattaagaacttactcttttagtaactaactagcttgctccaactgttgtgttaagcttttatgtttatttaattaccttccgcattccctaattttaaatatatggtataattaat

SEQ ID NO: 85592 - DNA, 1432 bp, Cannabis sativa
  modified_base (42)..(48): a, c, t, g, unknown or other
tttatagaggtttgaccctcttagttagcgggtaatgacctnnnnnnnttttagttgtattgataccagagataatacaacttagatcactatagtaataggacctgaagtgcctctcttaagaatacaatgtgagaatcagagttgccaaatctcaagtgagaatagagtaatgggcaagtaagagagagagagagagatgagatgaattattagacttagagctttaaggcttaggatttttgacttagggttttagggtttgactagtgttgtttatatagtagagcttacatccctaatattccttaaaaataggtaaataaagctattatttacataataaattaataaaatacaaatgatcaaatttcccctcgaaaatagggaagttgttgatatttccctttatttttgtgggttgttaaggccaaatttgtagtttgacttgcggtccacgaatgaaagctgcacaccaaaaacttgcttaggctaaaggcttgctggccatgcacctgcagagtgtatgttggttggccatatggtgtccaaaagttggtcatagggtcggccaggggtgggcacccatatggtgtctaaaagtttctcagcctatggaggccataaagctggacaagggtggctagccaatccccttgaggtggttggtttgtcattttgtcgtccctcctatttactcagaccccttgttggttgaagtgctaagtagatgtcttagccatcttattgacaagttatactcccacgcattgatgttggccacgtggacatgccacgtcaggtgggaaaaaattgggataaaatttgtccccaaagtctttatgtggataaggactttccagcttaattgggaccaatgtagccttaactaggcaaatcttgcagtataattagcctttgaaatattcgctcttgactgtctgatcacattccttagtagtatgttaactacattaatcttctgtaagtttttttacatgttgcatggaaaatgagaaggggtcccacaaaagctatttaagcttatgggagggaaatcacttcttcccacatttcattctctctatacaaaaagtaactcttgaaagctcttccgtctctctagaggttgatgcccatagtgctccatctgttgagattttagcgctattttgacgattcaagcttcccattttcttcatcaacggtttctagtagtgggtcagctttcaaatcccgttattcactagtttatttgattttgccatggtttttttaagcttttcttcactttgaatattttccgattcccatgttgattgtaatctttttggtattttgatccacatgaacgttttaggatgtataatgtgtgattttctaacgaaaaagattcaattttgaccatcattgtgattcttgactctttgag

SEQ ID NO: 85593 - DNA, 712 bp, Cannabis sativa
cgggagttggaatggtgatctttcaatagcgtcttcattcatccatgtgccatacatagggaagaaggagcccttctcatctttaatgacagtaggagtcttaaagcagaatttcatgtcatgggataaggcaccacacttaaaacacattttaggcagtttctcgtattggtattgtatccataaatccttaattccctttcttctcaagtaaaatccggaaaacaaaggtttatcaatgtcgaccgtaactctgaatctcaaagtgcccataccaaaagatcctcgttcaaaattcttttcaatgtgtcgtggtagctcatagacagccgaaactttacctgctagttcttgtaggtttgttttgttccaataaaagggaggtatgctttttagacgaacccagagaggcgtttggtcgaagacaacctccgccggggttagccacgagggccagggcataagaaccagtaaatgcccacaaaccagccatggccgccgaagtagcacgttatcagcatcaaaacttgattgaaaagtgaactgcagtagtccatcttctctttccttccaactccacccctctagcgagctccaggcattattcaaagatacctggattgctttccgtcctagtctggaaaaacagtacaattttccgagcaatactctatttggggtctcgctgtgatcaacttcccccggatgaaga

SEQ ID NO: 85594 - DNA, 586 bp, Cannabis sativa
cccggaaataccaataccgctaaagcttcacaaaaataccccgaataaattctaaattatataaaatgcgactctcgctttccacagcttccgaacacaatcacagaaattgagaatttgcataaatagcataataaatatatatgcattcaaataaattcccataatcataatattattaataataataaaatcttaccacctattttagttgttttcctacttgactttttaataaactaaggatcattgatattagttgttttcctacttgactttataagcttaccacctattttactctcatttaggaacttaatttaatgctagtagatgataatggtaccgttaaggaagaaagtctttattaatttagtctttctccctgtcgtcctctattcatgaatcgtcatgggatcggtccttgtggtgcttcaatttaatctataaattataagtgtcaatttttgagcttaataattgttaaaaaaattaaacttaggtatatatttataaccattagttaaatttactatttataccgtaaattataaaaaaaaaaaaaaattattaatcactcataagt

SEQ ID NO: 85595 - DNA, 663 bp, Cannabis sativa
atgtgtatataataggaaaaaaaataaaaaattgggccttaaaaaaatagaggctttgtgcaatggcccaagctgtccaatgcttgagccggccttgtaacttagtatcatattatatagaattaatataaaaggggattgttaaaaaatatatataagaaaaatacagaattaattttgaaggaaaaaataccaaaattatagaatttagaaaataataaattataaaaaatacatgagaggggataaatcataaatattttgactaaaacttacaaatttataactttatagaattgtcaagcatttataatatatactaattatttaaagtatattatttaaaattagtcttttttttaaaaaaaaaaaaaaaaaagtatttaatgagtcacattgacggtatagaccaaattgtttttaaccacgtgcatattttctttgttaggtaatggaagttagaaaataaaatcaaataaagaagtaccttattttatttggacttttaattagctaattttcaactttgtgtaggaaatttgtcgtcttcttcatgtggataaatatatattgcataaattacacacataaccttattttaattaattaatgcacattactttattctaaaagaacttcttttgttccttcaaaaaaaaaaaa

SEQ ID NO: 85596 - DNA, 657 bp, Cannabis sativa
  modified_base (67)..(70): a, c, t, g, unknown or other
cgtaatatactaaatgataaaaaaaaaatataattgttcaaaaatatatataaataatttattagannnnatatttaattagaccaataacaatatacatatacaaaaatacccctcgtgcctcttagcatttattttaaattttatacacaatttttttttaaagaaaacattaatagtattcttttatatatgaaaaaaaatagtaacatgacaataaagtggatgttggggagcccattattaacataagattgaccaggtcaaatgtaaatattagtcaaagtacattaatataaaaagtaatgggagaatatattacacttttgtaccattaatcttttccaaaatatacaaattgcagttgatcgaagaatgaggctgattttttatcgaaaaactaaaataaaataaagaattgagggtgattactaaggattttccatctcattgtctcattttggtagccttaattggagaggcttttagtttttggattagttatatcaataaagaattaggacattgctaccatgccctggcacaggacgaatgtaactagaggctcttcagtccgctgagggagatgatgatgaataggcttctattgttggaagagttcttgatccgccaatgatgatgaataggcttttattg

SEQ ID NO: 85597 - DNA, 769 bp, Cannabis sativa
ttaaaaattttatatttaataaatcaaagagttctttattaaacaaagaagaaaaacttgcaaccttagcatatcttcttattttcttttatttattacatgtcataaaatgtgtgtatctaactgtttaaaataagtaatattactttagtttgagagaaatccttcagttgctattggtgtctgaataggaggaacatgataaactattgcctgcccctaactatagaagcttgttgccactgtcctctcaaataatgagagataaagttcagttccaggtaacctcaacccatatatcctccgaactcacacactaggcctgactgttcgccttctaacctatcctatttataaatacttagggtaagatattatggaaaaagtgggattagatccataaaaaagattattaaaataaatttttattgatccactaaaaatagtgcaccctaaaaaaagtgatttgagattgtgaaagtgggtaaaatcattgcaaatgaggctttgttacgtaggagcaaaggataggggatgaataaaaagtttaattaaaaaattctttattatagtataccaatcttagcaaaccacatggatgaataaaaagtttaatgggaagtatgacaatgtatttaaatgaaaagttctttaatctaaaaatatgacaatgtaccagtagttcaccaacctaaacattcattatactaatgaatgatagcactaacattataatgtaaagatataagtgcactactactgttttccc

SEQ ID NO: 85598 - DNA, 1932 bp, Cannabis sativa
tctctctctctctctctccattaagtgcatgatgtaaaagctttccattattgctcaaatatgcatgaaggtgaagtgggtagtttgccttagagaaaattaaaatagacaacttatattattttatatttataatttaaaaagtgggtggttttgcctttgagaaaaatagagaaataataaaatacaaataattttaaaaaatagtcaagaaaaataacataaataatttaagaaaagaaggtattgattaagactgagaaaggttatgaccaatgaaatttcccccctcttccacaactctataattataggtgtaaaacccaaatttcttaagcctacttagacatatattttgtatagtatttttaatattattattttaaacttaatattaatgatgaaatctactggcatgttctataaatttttgtgtttctaatataaattaagctaataaagacttatatatggggacagtgacatgatgcaattaaccatgtatagacaacttgtcccttaagaaaagataacgtttttaatagctaaattttgaattttatgctttgaaccaataataattaatggatttaattaattttggtttttaaaataagaaaaaaaaaatagaattaacacacggtaataaattaactaaataaattgactttgctcgtgtaatatatagctagacatcattatatataacatatatatatatatattttctggtgaatttaactttgttactatttattgattattagtgtaaaaaggtttaatatatgtaattgttaatatatttttatatataattaagcatcaaacactcactttcagtaatgatgttacttgtctcgaattgaaaactacttaactatttaatttacatcatgcattattacacctttgggatttattttattttatatttgaagcacattttgtttttctatgtatgtatacaagatttgatggagttttcagatagattttgctgtttttatataaatatatatatatattgttaaacaaactatataactgttcatatatatgtgtgtctatgcatggtagtttggatatctcatcctacaatttaagctataatattttacactattaatttcttgctatatatatataaaaagcaaatttaatatacaatacaaagttattaactgcatgttatttttaattattaattttcttttcttaattcggcttggttaatttgtaaaaattaaattatttaatatatatatatagctttaattaatttctgttttctcacatatgtaacagttaaactcttgaaaatacaaaaagttcatgacaatgacagttataacaaattaattaaatttacttatatatagagagagaataagatgatttattagtttgtgattatacttagtaatttttagagagaaagatcccttgatcattatacttaaaattattgattgattatatagttacttccagttataaatctctcactagctagaaaaatattcttactcaaagacatcatcaatgatgaattaagatgtaaaatgtatctcacttaatgaaaaaaaagaaaaaaagaaaattgaagtgtgagctttcggtggattaagacagctgacgttatttgatttgattaatataggctatgggattttgcctattaataatattcttgctaaatttttgggttttgttttttgaaataatagagataataattaatagtaaatttttgggttaatttcttttctcttttacacttattatatctccctaaatataattattttgatattgaataatgtgtttcatctagcccatgacgtggaatagctagtaattaactcaatatgttatattatttatcaataatataatgtgtagattaaatacatgtaacaaactaatatgtaa

SEQ ID NO: 85599 - DNA, 979 bp, Cannabis sativa
gaggcgtttttggggttattttgagttcaaaatcagagtataggttctgattttaggttatgttcaagcctgtggttatgggttttgatgttcttggttgttaaagcttttagaattgaaattgttatgattttgctctagttttgagctttatctttgttgttgttataatctgaattttgatgcatgtgagctttgattttgagctttaaatgtgtgttttagctatctgttatgatagttaaattatgtgggaaatgattttgagatatatgcatggttggggtgagtttgggtgagttttgatgcattctttgagctgctggaatggagtttctgggttttcaacacaggcgccgcgacccgctcgtgtggatagattgcatgttgaacttgttttgttcataacttttgactcgagactctgttcgggacgttctttatattgttggaaagtgcattctgagctctatatgttaatctgtattttgaatgaaaattttatattatgtggaagaagatttaaggattaaccctatacttataaatcccaaaaattgtgactagtataaccggcacttggtcaggagcacccggagatttggaatctccacgtttgcagtacatcagttaagacagtagtttgcacgtagagttaagcgcgatggcgctcatgttttatataatgattgtgattaattgagaaccaggattagggttattaccctaaaatgagcggttatatggtctagggttattaccctagtaattaaaagattttgagtgttatgccatgcttaatatgttggaataaagaattacgcgcctaaggcataattaagctagactcgataaactagtaccttaagcataattaaatgcggtctagagttattactctagaatattatgaaagtaagaaaatgatgatgtatggtaaaattgttaatcaagtgaagacatgagttagggttattac

SEQ ID NO: 85600 - DNA, 512 bp, Cannabis sativa
gaaaaagaaggaggaagtgtattctagtttattctaatttgtttccttcaagattaaccttatttacattaataaaatataacttatattcaaattattaacattcaataaaagacaaagaaacttaattaaaatgaccaatttacccccttaactgaaaaagataaaaatatgcccctcaaggggtagtttggtcattaccaaaccccgacaaattcctgatactatcgaatcaaccaaatggccccgccattactaaattttaaaccatatgaaggcatgactctgtattggcccaacgtcgcttcccactgctatcgaacacaaacacaaaaaacaaaaaattcacatatagcataattatcacatgttgaaattaaaaaaaaaaaatatccacaaatatgcaaatcataaacgaataattaattatcataaataaaccctaattatttgacaatccaacatatcaaattaggcagtctttacataagtgtttctatgcagggttgcct

SEQ ID NO: 85601 - DNA, 594 bp, Cannabis sativa
ttatattttctttttatcacttaatttttatatatattgttaaagaggttggccaaatatcaaatgcctaaaatatccttaccgaacttaaccaacttaactaactgtcagttatgacagttagtgttcaagcatttcacctcagtcacaacattgatatttaaggggctgattttcgagaaagaagagattgagatagaatgagagttttcaggagtgatcaagagagaaattaagttgcccttgagtgttgtatttggagtgacatagtgcatggtgttcactgccattagagaagtcgattactgaagctttgcttcccaatttttgtaattgtacaatcttgtaatctctcttttgaagctcaattaataaagtctctcaaaagccataattgtggctgtttctggccgaggatgcaggcaaggtaatctaccattatcttgttcgaacctcgttaaatcgtgtgtgtttttgatacttgttaatactagtgatttctggttttacttggctgcaatacattaattgagttttattggtttccattgatcttgtgtactctgtttcctgttcttgccgaggtgttgtttc

SEQ ID NO: 85602 - DNA, 984 bp, Cannabis sativa
tctcaaattatggaacataactaataattaaaggcatgattaaattaagatttataattataatatttatattttttattataacatatagctaactaacgattaaaaatttaaaacacttttttattgaaaaatataactaaccaaaaattaaaaaatcacattaaatatctatacataataaaataatataaaattgaaactaaaaagtatgtaacaataatggaaaatatgtctctcttttattaggtttatgtagaaaataaagttaagaataaattgataaaaaaaataattatattaatttatgagaatataatatgtgtatcttttattaggtttatatagaaaataaaattaagaataaattgataaaaaaagtaacaaaaattaattatattaatctatgagaatattgcaataaaatttttgttaacaccatactttaaattaatgatggtgattttggatgcagtatgttgatttttatgtatcaaatatagattttttgatattttcttattgaaaattctataagatatactcccacatgatatatattgtattgattaattagttgataagaacatgaggtgagtaaaagtgaagatgattgttgagaaaagataaataataataataataataagctatgattatgagatttagtgcatattttatttacaaaaactcaaatcataccttttggcaaaatatgtaaagtagaaagagaagcattatatcacataaaagcttttctaggcatgaaccaaattatcataaactttacttacacacaaaattacataattgtatcaattcaaaaatatatctctttcaattttttggtaatttttgcaacaacaatgagaacattgtaatatatatgattaattatctaaaaaaaataacaaaatataaaactatcataacattgtgaataatataacaattacctcataaccacataaatatgtatgatta

SEQ ID NO: 85603 - DNA, 1094 bp, Cannabis sativa
agccgaatattaattgttattttctgaaaaggtcaacaatattgtcacctttgtcatgatgttatataataagtctagacagaacatgcttggatatatatatatattcatataaatatatgtatgtatgtatgtatgtatagcacacacacatacacagttttatccacaaattaaatcgtttgtttattatttccaaccacttgcccaactttacgttgaagattacctaaccttattaattcgaccatgtttcataattcaaaaagtcactacttacgtgaatatatcatgttaataattaatataacaacgatataaaaatgttatattattgtaactctcccacacaaagtgtgaatccaataatctatgcctacgccttttcattaagccctactctacaaaatatttatatatttatttatattttataagttaaatattattttaaatcttgtattttgtaaaaattataaatttgactatctattttgtattttttaaaataatacaaataggatcctaagtttaattctaaataattttttaaaatataactaacttgaagacaattttttaatacaaaaatatgtagaaaaaataactagttttatcataacacttctaggtcggattatcattaagttttattttaacaaaaaatcaattcatggtcttatttgtaccattttggaatatatacagaatctattttttcatttaacaaaatagaaggtccaatttataacttttacaaaatacagggtccaaaataatatttaccctaatttatataatctatatgtctacgattttttattagcttctgcttttatttttagcttttcggagattttggtgcaaagtaaaacatatataaattttttgataaagtaaaagataagaagaaaattggtttaatataccattcgattagaaataagatacttataattttaatatatttttcttccaaaaatacccttgcatttcaaaaaaatccctctctctaactctctcattctttgttacgacaattataaacactacgcaagtgcacacaatcaagtagtatactcacgcaagtgagg

SEQ ID NO: 85604 - DNA, 819 bp, Cannabis sativa
gcttgggctaataaaagtatgaaccttggtgaatgcaatgctaaatgcttaagtaactgctcttgtactgcttatggttacaattccaatttggatggtaataattatgatttaggtattggcactgtagaatgtgaacttatctatgcaatctaacaggactcaatcatagatagaaatcacaagacttgcaacagttaagcaagcctagaggaagagatgttatttatagaagagcagagttgttacagagaagaaaagtaaaacagaaaacagccaaagaaacaagtggcataatagtttgttacaacagtaaaacagctgtattaactaattgactaacgaactctgactattgctaataggcactgagtgtgtcctcttgtttggagatttgttcgatactcgaaataacaaggatatttatggaagagaacaaaatgtgtatcttcgaataccatttttgacatcaggtacatactagtgtagatttaaaatgttgcattttatttgtggggtttatattacacttaacagctaccaagtcttaattttgtcttaggatttcgggatcgaattgagtaaattatggatttctatttccctttattttgcttttctcagatcttaaaggaacaaataatgtgtccaaggtaaagatagcagtgataattgtagctgtcattgtcttcattggattagttttgattggctattacatttgcaggaggagatacattaacggtaacagactcaacactttacttcatttttgttattaacggtaactgagcgttaagagtggtttttttttttttt

SEQ ID NO: 85605 - DNA, 606 bp, Cannabis sativa
attaagcacaaaaaagataaaatagataaataccattttattctttgacttgataaatttacattaatggtcactctcaaccaattttaccatttggagggtacaatacaattgtgcacgaatttattttcactttcttatcatccttatttcaactgtgtatcaaacaaatcagtctccaaatctaaagggtgatgagtaataacacaccaatagttgacattttagcctcactcagtgatttccctctgttctctctctctcacacatatatattattttattttttatctgctgctttttaaaatgattttttctacagctttcgctctctctctctctcttcactctgcattttgaggtataagctgattttcttatatatgataaaaaaattataaaagaagttaggtttagattagattaaataccatgcataattttatcatcaatgaaatgttagtgatttaattgaatgcatatgcttaatgttgttatcgtagtccatttagacattatttgcacataattctactcggtcttatgctttcgtttatgctttcgtttattctcaatttgtagtgaaattcatgcttgaattatatt

SEQ ID NO: 85606 - DNA, 1305 bp, Cannabis sativa
ttatattcatgtaaattaatattgagctttggtccccactctataacaaattaactaaaattaaaaggtctattttaactcgatacaacgttgggtaatgctaactaactaataataccaattaacgttgctttcaatgttggattggatatagcttttgctttcgatgtttagtcacgttttacaaatttcttagatatttatggggcaattcttgaccactacttttgtgactcaataatatttatttgtgcttttcatttctcttttgaggagtgcaaagaaagaaagaaaaataataatattaaacggtaccgcttaacactattttatgtacaaatatcattattgatttaattaagtatcgaattccttccatttcatttaaaatttatgtaatataacttttaaagagtatcgctagctaatcacaatatgacatgtctagaggtgttagacactactgatacccaataacaatgttcttttattaattgatgaaatgttcaagctcacaaagttaatttgcacgttttcaaaattaaatcaccccacatcactacaaaaaatcttatttttaaatcttatttttagtcaaatatgattaaaagttatgattaaaagtgtgattaaaagtgaaattaaaagtgaaaaataaaagtgaaaaaaaaaagtgaaaaaaattgttgaaaaaaattgtaactaattataaatcatcattctaatgttgtgattaaaaaatttgtggctaaaggtattagtcacaaaaattacaattttttgcaactaaatatatttttagtcacaatacttattgtgactaaaactgaatatagtgataacttgtatctaagtactatgttttagtcatgagtaactttttgttgtaactaaatatcacatttagtcatgaaaaatttatattgtgactaaaaagttgtcattaaatataattttttttttgtagtacatttaaataatgttattgaaagtagataaaaatatatgatgactgcaaatactatataagttggaaggaatgatgaataaattttggtggaagtcaagttctaataattagtcacgcgagttagatgtcttgaaaaagactttatgagcatgaacacgatggtgtctatgttgggtaagcaagcttagcatttggtgtctaacgaatcatacaaaaacaaattgctcaacacacaacccaaaaccaaacttcttttttaaatttgtcgtcggttgtggaattagtgagcatatacaaccgacgcaaaccatttattatttgtgtcattttataaa

SEQ ID NO: 85607 - DNA, 1478 bp, Cannabis sativa
ataaccaactgaactaatatctaataggccccctcaagatggagtataaaaatcctttactcccatcttggagacaatattgttgaaaggagttgggaagagtggtttggtaaggatgtcggccaagttgttttgagaagaaacatgactcatttgaagggtcccattgttgatcttctctcgaacagtgtggcaatcgatctcaacgtgtttggttcgctcatgatacaccgggttttcagcaatgtggatggcagcactattatcacaataaaggattgagggtagcttgattggaacttggaaatctttgagtatggatgtaagccatgttaactcacaagtagcatgtgccatggatctgtactcggcttctgcagaggagcgtgagatggtttgttgcttctttgatttccatgagagaagtgaatgtcccaagaagacacagtatccagagattgagcgtcttgagtcaggacatgctgcccagtccgcatcggcaaaagcatgtaattggagaggtgatggtgtagtagagtgataaaataaaccttgacctggagagctttttaggtagcttatgaccggtatgcagcttgaagatgaggaagtctaggtgcttggagatattgacttagtttattgacagcatagctgatatcaggacgagtgatggtgagatatattaatttcccaatgagggatctgtattgttttgggtttgggatgagctcaccagattcagtgctgagttttaagttgggctccattggagtggaagttggctttgagccaaggtagcccgtgtcctgaagtaattgcattgtgaaaggtctttgtgtgacagatattcctttgctgcagcgagcaatctcgagaccgagaaagaaatgtaaggggccaaggtctttaagtttaaactttgagtcaagtgttgtaataaatgtttgtagaatagtggtgttattggttgccacaataatgtcatcgacatatataagtagggcaagaaatgattgttgagtggttttgatgaataaagaatgatcattttgagattgggaaaaaccttgtgagataagtgttgagcttaatttagcataccattgtcgggatgcttgttttaaaccatataagctctttgttaatttgcaaactgcatttggaggtaacactcctttgggagtgtatccttgtggaagtttcatataaacatcctcattgagatcaccatggagaaaggcattgtctatgtccatgtggtgaaggtgccaattatttatggcagcaagagcaaagagtagtttaagtgtattgaacttagctacgggagcataagtgtcaaaaaaatcaatgccttgtttttgtgtgtaacctttggctacaagacgggctttcaatctgttgactgaaccgtcaggattgtatttgattttgtacacccatttgttcccaattacatgttgattgggaggtaa

SEQ ID NO: 85608 - DNA, 556 bp, Cannabis sativa
  modified_base (203)..(219): a, c, t, g, unknown or other
tttaccagaatcttctcgcaggaatgcgaacaagaggcaacctcggactagggaacaggaaatccctcgtgacaacgagagagatcctgagactcaacctaggacaggtgggttgccaccgagacaccgtcaacgtcattcttgcactgatatggaaggggcacatacaaatcccaatagagggcatgtatcaacccgttccnnnnnnnnnnnnnnnnnacgtgatgaggcaagttctagctctggacgtacaagaactcatagtcgatctacgcgaggaggggatagaactcatcacagtactgatcgagagagtacgagcacaactagaactaaaagttactcaaggacgaggtctgtaagtaactatgatccacaacggtcagatctttgtaatcaattgaatcggaagaagcctgacttacgccaacaactcgaccaaaagcaagaggatcctatctaattacaaaacaacgagttggaggacaagtttaggagataccaagatggggaatttgggaaactgcctggttacgactcagacgaggagcccgag

SEQ ID NO: 85609 - DNA, 1013 bp, Cannabis sativa
ccattcaatagaaaggttaagctattcgtagttaaacaactcatgctaagggtgatccaacgattcgcaaaacccattttcctcattacctccccaagaaagcgccattcaacatgatcaaacactttgttcatgtccaattttatggccacaactccattttgaccattttatcttttgctttattgcatttaatggttaggttcatatcctccatgtttgcaccgtcattaagcatgctcaaaaccactctagtgaccaaatcaccagcaacaagccagttttgttaataaaatattgcggacatcctgtctattctaggactcttatcaacactcaccgagtgtaaagaaagttctacctttgcagctgtaaaaggcttcaagagttcttcattcatatcagtggtgattgtggatggaattgaattaagagtgcaatgcagagttgaatcatcaatggcactaactttggaaatatttgcaaaataagcttgaatgacaacaaccatatcagtttttgaagtcactgtatcccctgtctcagtacaaaggaatttaatcttattgttagcttttctagctgaatctttagcatgcaaaaactttgtattgcggtccttgaaattaagccaattaacgctagacctttgttgccaatagacttcttcttgctctagaagatcatctagaattgcttctgattgtttgagtttagtagcctattctgttgagcgcaaaacaatattattaaggttaaccgattttgattattcagcagaaattttcctcttcattttgctatattttcttatgtgccattgctgtaagttatttggacataaatccaagttttggagtacatttgagattgggttatttgagtttgaagtgtgcctgcaacgagatatgatgtccttactctcagggtcagacgaccaaagtttttcaaaatggaatcgactgcgttgtttcttttgttgagcttgagactgagagggtgacaaaactaca

SEQ ID NO: 85610 - DNA, 522 bp, Cannabis sativa
ttaaaaatcacgtaatacgcctatgctagttagggtgttacatatagtcacttgactaccatctccaacagttagataatccttaccaccatactccattttttgattgacattgttggatgaggaagtaacatggttgctgactccactgtcagcataccattgatcactgtccacgatttttggtgaggctatgaatgcactgtgactgcctccactttgctgattttgctgagttttagggtcatgtcccatgtaagattcatcatatctattgtagcagattgcacctgaatgaccatacctgccacaaacttggcaggttggttttgagttgttggaccttcctcttcctcgaccttggtaacctcccctgttgttggatgaaccaccacggtttccagagtaacccccatgatttcctcttgctcgattcggatttgttgttgattttccaggtatgttggctgctactagatttgctgaaggtccagtaccaatcccagatgtgccattgccttt

SEQ ID NO: 85611 - DNA, 544 bp, Cannabis sativa
acacccataaagtttaggatccctataataacagtcagccattgttcgactttcatcacatctggacctcccaaaaagactggaggtgcctgcttgcgaaaccttttgtacaatggttttatccggttcatagcagaaaccggccctgcctacacaacagggacaatggccacctacattttaggagcaggcagtgcaagagcaccctatagcctcagacgcctgatctcttcgtcttgttcattaattttggcttgctatgttgcaaacctatttttccaatctttggtagccagcagtggttaacatctccccaaccacgtgccttgcttcgtgggcctctgcctcagccacgaatgttcgagggaaactgaactccctgaccgccactggatcagaccaaatttccctggcttctcgtgttctgcctggcgtccattctaatagaacaacccgcaaaacaaagcactagcctagtcagatcatggtcaagaataaattactaattactgcttattttagaaattaaaacatgcacctattc

SEQ ID NO: 85612 - DNA, 929 bp, Cannabis sativa
  modified_base (854)..(890): a, c, t, g, unknown or other
cttttctacctcttcttttaatgcttgtgctcgttccttgtctaatagtcttcttttttttaaaaaaaaacgggacggaagtttgggtcaatgtttagggcgtgagatattacagaaagataaatatcaaccatatcttcttgtgaccagggaaaatgtctaggtttgcttttagaaattttattaattttacttcaagcaacaaacctttgccaattttgagtttccaagtcgggatatttgggttgatttttacctcttccaattcttccaccgaccctacatttgtatttgtttccccatgtcggggatccacgtcttgtctccgccttgggcgactccctattgggcaatacttttccccttgcctgaactctggccgaaggcattttcctttttcaccttagtcagggcaaggttatagcatgcccgtgctattctttgattccattggaggcaccctaccccattctttgttgtgaacttcatgcacaaatgaaaaactgatgtgacaactttcaagtcagatagggacggtcggcctaacatgatgttgaaggctaatggaacatcaattatcagaaattgtgcaatcagagttatgctccttggagcttgtccaacagttaggggtagacagatttaccccagaggtgcaacactctggctagagaagccatacagaagttgggtacaagggattaaatctttaagttggagccccatcttctcatatgttgtcttaagaggatgtttgaggaggctccattgtctatcataattcgggccactgtcttgtttcctgtttgtacttccatgactagggggtcattcttgttggaaattattttacnnnnnnnnnnnnnnnnnnnnnnnnnnnnnnnnnnnnnaccctaaatatgaactttctaacacgatgaaataaacac

SEQ ID NO: 85613 - DNA, 1421 bp, Cannabis sativa
agggcaccacacatctcggtttacatttcaggccctccaacatgcttcacttagaagcatactctgatgttgactgggcctccagtttggatgacagaaaatcgacatcaggtttctttctatttttaggtggaaatcttgtcaattggagttctagaaaacaacaagctgtctctcgatcgagcatagaatcagaatatcatgccttagcttcagcagctactgaactagtatggatcacatctttgcttactgaaataggaataacattgcataaacagcctcctactctttggtgcgacaatcaaagtgctcaagcacttgctctaaatccagtattccacactagaaccaaacacatagagttggatgttcactacatctgatctcaaattgcagaaaagaaacttcaagtctgctacattccaacagaagatcaaacatctaatctctttacaaaactcctgtcatatcccaggtttcaattcttatgtaacaaactgtaccttgaatactccaaatacagtttgaggggggtattagtgtacacagttagttataagataagagtttgttactcttcatagctagacagttagtttttcctaactatattttctatttctaactgcttttctattattgattgtattgtactcttttcatatataaatacaatcatctcatagagctgagtacagtttttcactcaaactcattttctctcaaattagtttctcaactgaatgaaataaacaacttattctaattgtaattcactatttcaattgaaggtcaaaccaataaagaacaagcactattgtatcaaacaattcttgtttaatgtttaatgttataacaactactcttcatttttacttttcgatattttctctaacctataacagttacccttaaaaaaatagttaagttagttatataccattaactaaaaggtactattttcaatttcaaagtaaataaacatatcaatattgctaattttgattctgaaattactaataaagtaaacatatcaatgagaatactgttgattctgattctctcaaaaacgaaacaaatagcttattttgattctgattcaacgatttgattgaacattaatccaattactaaataatatgtcattgttgttgtgtggctagatgtacagtcagccagtattcgcaggagtcgaaagatggtacaacaagaaatacccgaacagcgaattcgggaagagtttgaaggtaccactggtgccaacaattgaactaaatccctttcgattatgctttcgaaccgcgtatgtaatgtgtacaacaggaattgccatgttgtttccttatttcaatcaagttttgggagtgtcaggggcattgggtttttggcctatggttatatattttccagtggaaatg

SEQ ID NO: 85614 - DNA, 971 bp, Cannabis sativa
ctctctctctctctctctcagtagcacacactgagtttctggatcacgagctcgattggagaggatcccttttataggactttggacaatgagagtagatgtcataactgccataacaaaaagttagttgtgacagttatgacatgttcgagctggtaatttgcaagattcagtgaatgtggacaaatcaaatgtgaggccaaatataacaattcatccacctttgactttacatttgaattgcatataccgtgtcaagaaagagatgttctggtcttggggaatcttatcagccaagtatgtgtagcaagttcagacatagtctgaactttgctaaaagaacatacttggttagcatgtctgctaggttttctttggttccaatcttcatcacttgaacttcatcttttgcaataacatctctgataaagtgtagcttaatgtttatgtgtttggacctttcatgaaacatggggttcttcattaaatgtagtgcacattgattgtcacaatgcactataatgtcttcaccattgaaactaagttctgatgtgaaacttcttagccaaatagcctctttgattgcttctgttacagccatatactcagcttctattaaggataatgctaccaccttttgaaaattcgatttccaactcacacatccacctaggactgtaaaagaataccatgttatagatcttctagtatcaatgcttccaatataatcagagtctacaaatccctctactccagtagttcttttgttgttgctactgtaaacaagtcccatattcattgtgccttctagatatctaagaatccatttggcagcagtccaatgttcattttcaagatttgaaatgaacctactcaccatgctaagactgtaggcaagatctggtcttgtggagagcatacagtacatcaagcttcccacacatgaggtgttaggctaaaagtagtctaag

SEQ ID NO: 85615 - DNA, 551 bp, Cannabis sativa
caatgaactaagtctaagttgataaatgggatgtggctaagtagttggcaaacaaagaaaaaatttatgtagatgtgaattgcacgatttgtatttctaaacaacaaaatttatgtatattattaaaaaggaaaataataatgattgacaatatggtcacggtaagcaatatctaatatactagtatttctaattctatattctagtactttttttagcctgtgtatcattaatatgttcatatagtttgtacttacattgtgactgttttataatgtttattctttaataaatgaggtccttaatatgtttgtttatctgtgtgtagtttatatgctctgtttaattttcttaatcaaattgtggatgaatgattataggattacttgcattgtatgtagagcttagtattacttgcagatgactgtgatttgctcttcttagctaatatacaatttacgaattgactctatactatgtttcaatacttgattattatccaaatgcataatttgacaatgggagagagtgatttatttacagatgttatt

SEQ ID NO: 85616 - DNA, 781 bp, Cannabis sativa
tttaacttgagattcttttatgaacttgtggcctcttgctagagtttctccaatttcatcagtgagattacaagcaagtaaagcttggatggcaaaaccagtatcccactcttggctaccaaaactctgtcaaaattatttgaagtgtcatttcgatgtaatattttttttgattagaaaaatattttattttagtaatgtatcttgtaaaaaaattcataagtgaaaatttatcaaccaaggacatacctgcatcttcattccatcttcagcaacccacaagtagtctgggattctagcaaggtgttttttaaaataattcccatttgaatcttcaacccaacaagcaagcatacatagcacctgttaatccacatataataattaaacaacaatataataatacacatattttgtattgtaaggaaaatatataatttcttaatttttttttcattattattttaaacaaccttttctacgcatccaattgtaatgtatcgactattctcatcttcataatgaatatgctccattgttacttttagagctttgtctctaataaatttgtttaagggccaacgagtaagaaaaggctcagtacatatatataaactatcccaaagtagatcttgtaaccacggatgaggataatataaatcctcctacaagaaaaaaaaaacacacaaatgttaattatatatttaaaacaatgtatatatagatatatagtttcactattttttggataggaagttgtattatattcaccttagcacaa

SEQ ID NO: 85617 - DNA, 770 bp, Cannabis sativa
tattttacttatcactccactttcatacatctatatatgtacatgtatttgttggagtgtgtagtaatattttaatttgtgtatatgtacatgttattgttggcattgagcatcgtgaagaagttcaataatattctcacatgtagtttttttttttttttttgaaatgattcacacattagtttgtaatgcattaatgagataaatgatcatttttgtaacaaaacaaaaccaaaaagcaagaaagaagaggaagaagaagagtttttgggtcgatgactcaccaaccccaattcaaaaagcttggcgcggagttagggtggagtatggaaggccacattcggagtgggacagtagagggacgaagcagaacatggtaggaaaaaatagtttttttcaatattttttttttattattttctatcaatattttagttttttcaattatttttttctttttttcatcttccctaattaatattgaatctgtaatatatattttttttaagagaacctgtaaaacatactttttttttatcaagaaagagataatctttattaataactataaaatgttttttttctttggtaccgataaccgttcctactattatttgatatttaactactgtcaaaaaacagaaaaaaaaaaaagagtattattggattcaaattgcaattttagtataaatttcttcctaaaaaaatacatttctaattctaagtattacaatattatattaaatatatgcattatataaaagaagtgt

SEQ ID NO: 85618 - DNA, 812 bp, Cannabis sativa
atttttttagttcaatttattatgcacaacatttagtatgagaggttcaaaataatataattaaaggaactattatcacgaagaatatagttgtagggagagttgtaaattgtgttagtacatgagaatatttaatcaaattctcgttaattaggttacattatttggttaaatatagaaatcttacatgttaatttaaaaattaataaaattatttaataaaataaaataactatggtattatatattttaaattttaaatataaaagtaaaatgtatattttttaaaaatatttatgtattagtaaatttaaaatctcattatatttatacttaattaaaagaataattatatttgcttgcaaaaaatatataaacaacccatttttttaaaaaaaaaataagtaaaattatttttctattctacacatttctcttcaatgtttatattacattttttttaattaatttcatcaaaatatttcatcatgtttttgaaaaataaaaagaaatatttattttcatacttattcttaaaatattttttcgaccaaaaaaaaaaaaaaatactgctagcatatatatgttttatatatacttccataatagtcatataaaataaaaatccaaaaatgtcgttgcattactcaaacaaattagcttgatgctaatcatcaaatatcatgtaatggaaaacacatcttatatcaagatattcttgttgaataaaatccacttataaccagtcctctttacaaatatccacatcagcaaaatacaaacagtttaaaaagcaagtaagactcgatcct

SEQ ID NO: 85619 - DNA, 645 bp, Cannabis sativa
aagacaacactacttttgctcaacaacgagatgcagatacaacttatgaggtagtaactatttttaaacttgtttttattttgcatctcatgaaaaaaattaaaaaaattatggaaatttctaatatactctgtcaagctttgcaactttattctcaagatattttaaaagcaatatatcttgtttcatatactaaaattctcattcaaaaattgataaaagatggatggaataaattagttgatgaggtgaaatctttttgtgaatctattaatattcttgtgcctaattttaatgctcattatactgccaaaagaggaagagctcgtggtcaacaagatttcattacagtggagaattatagagctgatatttttaatacagtaatagactataaactgcaagaattaaacaacaaattcaatgataacacaatagagttacacatttttagttcaactctagacccgagagaaatgcatgcatccttcagaattaatgacattttcaaattagtagaaaaaatttacacaagatatttcacagaatatgaaatgatacatctaaggacacaattagaacgttttgatcatgtgcaaaatcttcatgattttatagtcttaataactatttttgattaatgtc

SEQ ID NO: 85620 - DNA, 862 bp, Cannabis sativa
ctgaacatgccgattagcgagtgtcatgagcgttatcttggactcccttcgtactctggccgggacaaaaaagagctctttagtcatattaaagaacgagtttggaagttaatgcatgcttggaatgataaattgttttcagttgggggaaaagaggttttgctcaaagccgttgttcaatcaattccaacctatgcaatgagttgctttcgcttaacgaaaactttttgtcaacaattggaaagcatgatggctaatttctggtggggttcgaataaagatggatccaaaattcattggaaaagatggaaattgctttgtaagtcgaaatttgaaggagggatgggttttcgatcttttgttcattataaccaggcgctcttggccaagcaagcatggagaattttcgaaatgcctacatcattgttaagtcggcttagaaaatgcagatatttctccaacaattcttttttggaagctaacctaggccattctccttcgcttacatggcaaagcatccattggggtcgtgaacttcttctcaaagggcttagattcaaagttggaaatggttttaatattcagtgtggacaagacaaatggatacctggttttactgagtttaaacccatcacttacacaggacctacctctatgttggttgctaatttcataacagaaaaaagggagtggaatatagggctgctggaaaattattttggtcagttagatgtggaaaaaattgtctcaatcccgctgagtttcttccctacttcagacagattaatatggcatcacacaacctcgggcatatatacagtaaagtcaggcttccacttagctgctgccttagatgaacaac

SEQ ID NO: 85621 - DNA, 1007 bp, Cannabis sativa
ctatttatatacgtactcttattaattctagttagtttttttaaaaaaatatgttatcttttttttgacaaaaaaaagattgggatttaaatctcttttttctttttttttaaatggatagggatttaaatctgtttgactggaagtgccaattgggtttgccaccatatatgcacatatgtacacgtgtcatcattttcactctgaatctgatttatgctcctttttgaatgccttggttatctcatatccacaggaaccaatggcaaatatccaaacacagcataacccttctgcgtcaaatcctttacagtatggttatacttctccgaccactgagctgccgtcggtgctgccttctcagccacctggtgaatggccgggtagctgtttacaaaatgcttgagtcttctccgctgccttaactgtcaaataatgagctttgtaaacgatcgatctgcttagccaatggtggcgcatgcttatcaaacttgtgtgtagcttcgtctacctgtcatagtgaatccacttcttaatttgagattgagcaaagggaaaacctaataaacacccaattcacatatatcatcacaatattttcgtttcaaataagcttagtaatcaagatcaagatcaagatctctctctatctttctgtacatagagcaccagaaaacttttcttattcatgtttatatatgctaacgcaggaaacgaaggtcgaaaaaatagatcagactcaaagaatcgttgataagattctcggagctgagtaatatcagatattgaataacaaaaagtattttcttggagctcttaagattgatttggcctgaaaaattgtaaagaaacatttaagaagagattacacgtgtcattattccttcttttagctctccgtgtgtttaccgccacgtgtaaacttttttttttttttaaggatatttatcgattgattagatgaaatgatagcatttttttcttatatggttaaatttaaagatttt

SEQ ID NO: 85622 - DNA, 1015 bp, Cannabis sativa
ttcttatgaataatttgtatgaatttgtgtgtgtactctctggtagcgcttttctattttttgggaatctcttaattccaattggtctttggggtaaagagcttaatcatttttttctttctttctttctttgttttgatttaaatgggtaaaaggaggactgtttggttgatgagaaaaagagagttaaaattaaaagagtgtgattgttgtggccatggctaaaggttgaagagagaggagtttgaggttatttatgactatgttattttatttatttattttacagcatgcaaattgatattattgaagtttatgtttgaaatgtctagtaaaacttacaaaaagaaaagcaaattttcatattcctcccactaacttagtccaaatttatcctcaaatattcaattcaaaagattcttctttcttttttttttttcaaagttatattcatgaatatttttcttctcttacttgtaaaagttatggcaattaaaattgaacacaagaagccataataagttgtaacaaagatgtgcagggagatcatcaaagaatagaatatagatctctgttttgtgtacatatatcattacttgaagaaaacccactttggaaaaggctagagagatgtataacatttacttaagatctctgttttgttagttggctcaggtattttatatagaggacaattttataggatatataaagagttagttcttttcagtttgtacgagtctagattttcacactatctaactattggatttttgagaatttttatgtattccatttcagtacatctacatattgtttttggtttttttgttctcttttctaatacaactaaatttagatggtatgtgtcatctaattttttctttatttaatttagatggtatacgctattcaagatcttggataaatatatataaacttcataattttatgattcatttgaattgtaatgatattattttgtatgaagtggtgaattcgtatgaacactgat

SEQ ID NO: 85623 - DNA, 721 bp, Cannabis sativa
gctattggcatcaagctctctctggaaagtttaacgattcctggacggatgtcccaaactaatgaagcgcaatctcgaaggaatagactatcctgaaccccttcctggagggtatagttagccttccagaattccttttccgaagttgagtcattttccacaagacttcttctggatggacaagctaaccttctgaaactcctttttgaacgacgacttgctttcccgaagactcgagttgagacattttcatttggaggaacgttaccgcaattattaattttgcaggtgtttggaggaagtacttataattttttttttctttttgataaattaaaccaaacatagcatttattcaattaccaaaactctatcatgggtttaaggtttagtagctacgtactaagtgtaatataaacactacaaattactcaaatgagcaatgtgggataaacacagacacaaacatatatattttttttttggataaatcacaccaaagacagcacaaatcacgtacaattataattagttattatcattatttcaggacatgttcattggaggaagtgaaacatcatctacagttgtagagtgggcaatgttagagttgttgaaaaatccgacatcaatggcaaaggcgcaagctgaggttagacaagtgtttgggaaaaataagaatgttgatgaaacaaagcttcatgagcttaaattcttaaag

SEQ ID NO: 85624 - DNA, 973 bp, Cannabis sativa
gaggcaaccaaaacacaaattcccaaaaccaaaaactcactataaaaacaaagaggaaccaaactaggtttaccttgagtttagaagtcacttttcccattttaatcgttgctgaaatctagctagaatgagtaaatttggtttgaatttggtatgggctgttcgtgtttcctttgggttttctcctgagagtgcaaaaccgatatatatatagagagagagatgaggtttcagttttggtctttgtgtaatggttatctctaacaaaaattcccttgtttaatgcttatctcactaacatcaaaagaatagctttctctagaaactccaccaaatggaaaagtcaaacttatggtaaattactcaaaatgtcaaaacttagctactactaagatactaacccaaataattgtggcaccaaattgttgcattctactattactgggcataaaatatgaaaaataccaaaattcatttataacatgcccgacacacctaagttacaatagaatctccataattaataaattatatcacaaatgtatatttctgacaataagtcttgttttggtataaatgcacatatataacataaaaagtaattaaatcatttttaagctccaaatttctatgtctacatatgtggtcattacaattatcctcccattaaaagatttcatccttgaaatctaacatgaacaacttcggatattgagccctcatgtcagattctaactaccaagtgacttcctctaccttgcaattcatccagagtactttgatcaaagttatggtcttgttttgaaggactttatctttttctatcgaggatctaaattttttattcctcatgggacacgtctggatgcaacttgagggtttcataaatcaaaacatgagtcgattcgacatgtacttttttagcattgacacatgaaggacgttatgcactactaacaatactggaggcaag

SEQ ID NO: 85625 - DNA, 688 bp, Cannabis sativa
atcattttattatttcttagttttttaggtatatagtaggataaagatttgcactattttcttcattaagtattgaaatatcattctaatagaataacttttccgtaacattttgaaaaaaaaattaataatattaatttatcaattttttttaatgtattttaaattttattctattatattcttattcctattcaatttattctcattgttatttctttatttttattcttcctaatcaaatgtagtcttaatctttccatcatggtcattaaatttgatacagtaaggattcagttttggtaaaaaaaaaaatgaaaaaaatactaataaggtttcaattttaattaattatctggcttgtgaaatttgtaatgtccatttttatttgggagtgttgaactactcatgatattatgacatgttctctctatatatatatataaaaaaaaagaacatttgttatatttgttatctatgaactttattttgacaaagttgtaaaatgtttgaatgggcagataaagatgctatgttttctggaaactttacatttacaccattgaagaatgtgaaggcaaaacacgtttagctaagatgatgcagatttaatcttttcaaagtttatgatacatatttgtttattttttttttcaattaaatgaatcattattacttaaaaaggaaa

SEQ ID NO: 85626 - DNA, 506 bp, Cannabis sativa
tccaatttattttattagtttccatccaaaataaagaattaagtacttttgggaaagaaatgcatcgacgtggaggccaaaacggggacccagcccccaagttgacataggcgctgggcctggtgcctaggttggcactttgttaacctaggccatttccatcagtagtgtagaagaagtcttctaggcatattcttaatttttgtcaatagttaagatttgggtgctttcggggaacaaacagagtgatctgggagccagaactgggacccagtgcccaggttgacctaggtgctgggctcagtgcccaggttgacatttagttaacttgggccatttccaataagtttttttgagaagtcttctaagaatattctttgttttcacaaataattgagatacaaatatttttgaaaatcaaacggaaccaactagttgcaaaaagctggaccgactgcccaggttgacattgttggaatatcttttacgaggatctagatttacta

SEQ ID NO: 85627 - DNA, 771 bp, Cannabis sativa
tattaattagttttttttttgaaaaaaaaatcatctaatctatagtgtataattatatattttattatttatatataataatagaaaaagtacaattttttttttaatttttaaattttgtgagaatgttatattatttttatatgacttttttatttatacaaatacactataaataaatcatttatttgtcatttttatttattctaatctatatatctatataaagaaaaaatataaaaatatgtgactgtctatattttttttatatttgtcaaattttatgagaatttcgtatttatgtcataaaaaattaaaattatttactaatcttattttttgaaaatctcacattatttagaaagtataattaatctttttttaaaaaaataaatcagttaacgttgtattatttcaaaacaatacaatttagtcatttacaaactatacaacatctttcaaaagctcaacttttaattatttacaatgactcaaaccaatctaaaataaataaattctgtaatttgcttttttatttatctaaaaatttatatttttctccttctttggtagttgattaaatcagtcttatctaattaatcattatttaaatttatctaatcttgtgaaaatttcatattaatgtgctaaaaaaatatgattagtcactaatcttacttttgctaataatcccacattatttataaagtaaagtggaacattacatatacactataaactaaatcatttcttttgttatttttatttgtc

SEQ ID NO: 85628 - DNA, 877 bp, Cannabis sativa
  modified_base (816)..(826): a, c, t, g, unknown or other
ttttgtaaagctaagagtagagccaaataagaaaaattggtcattaatttactttaagaaatgtaaagctaaggttacgaagatgaatcatgtgtttggtcacgttgctcggctcaattcagtttatcaaagatgcagtctcattattttttttgtttccggcagaggtggaagtggcagcacgacgacgaccatggttgagttgtttcaaaaaaaaaatatttataatcggtcagatctcttttactatttacccaaaatcctttattactttgaaatatttttaatttagacctactaccaagccatttgctattttttaataattaagtgttacaaatattaaacttacttttacttatattttttaatttagaccttcttttgcttaattaaaacgtgacaattaattaataaaataaatatattttgaaaactctcactcttatctttattaaaaaaatctaagtataaaataataccacatagtgtaggaataaattttatatatctctcgagaactatttaagaagtatatgtaaactattctatttataaataaagaaataaaaaactttcacaagtcaactaaacttacctattgaaacacccattgctgtggacattaattgtggtgacacacaataaacactagtataatatgtgaccccttatatgtgacactagtataatgggaaggttgagaaaatagtaaaagaaagtatgagaaaatagtgataggtttggtatatatagtgatactagatagatgttacgtagtttttagttttttttaatattataattttaaaattnnnnnnnnnnnatgtagtgataatcactgaaatttgaaagcataatagtgatttaaataaaa

SEQ ID NO: 85629 - DNA, 566 bp, Cannabis sativa
tgatacatgtcaaaattcaaggggaaatatacatatacgtacactctatataaaaaaaattaaaaataaatcccttttaaaatcccatagggtatttaagggtgtgcataaattgatccaatccaacgacaaccgaccgatccaattacaaccgatcactaaatgttgaatatctatcataatgcatgcatttattaaaaaccaaggattcattaaaataataataattttataatatttataatttaatatattactatttaattattcttttacatgagttatttttgtgtaagatggttgtttgtacaatattactttgtggatttcatagaataaaaaaaaaaaaattaataagaagatatttgttcttctagagagagtcatctttgggataacatacaccctaaaaaaaatacattatgtgattatatatatatatatatatatgaaaggtaatattaacatattttataaaaactaggtgattgttacaagccacgtaatgttagttttatttaatattttagttttttatttgaattaataattaaaatagtataatt

SEQ ID NO: 85630 - DNA, 616 bp, Cannabis sativa
tctgtctaggacacctctcatggataggaccctatttttgaaaaaagattaattataatacttgctgcaagcgtgagtgaaagaaaaaagaaatggttaaaatgttgtgtgttcttttcttttctattttccttctgaaaaatgaaacttaaaatgttgattgttttgtagcaatggttgctactacagaattattaaatgttcaatctctttttaaatgttaaagtgatagcaactagctagttccggatgttattgttagagatatttttacaatggaagaaaatcaagacattacaattctattgtaatataatataaggatcaacaaagagattaaataaatgttacaaaacataatatacaatatatatacactataaatattatatataagaaaggtagaagaatatacatatatataaatatatgtatacactcactcacaaccttaagtagaataatggggatcaccatgacttgaacaatgtattacacctttgtccaaaaccttattttctttatctctaaggattaagagaactctcatgcaaatagctttgagaactatcaagccttttagggttttctagtaaagtgctttcttgatagaaaa

SEQ ID NO: 85631 - DNA, 795 bp, Cannabis sativa
atgtggaacaatgtccacaatagctattctcaaagggtatcttctgaataatcacttttcaaaataatagtaatacaatgatgtttaatggtatgcaacaaacaaagcaaaaccgacaataatccatcatgttgtgtaaatcaaacagagaaagtattaagttatctgggaagatcaggatttgggtgggtgtgcttgttcaatgtaaactaatttaaaaatattttatattgggaatttgttagaaattggtagtgcattatgtaatttgtttcttgtgttttctgagtgttttacaatatgaatgaaccactataggtcagtgattcatcattcatatatgaagaaagaaatgcatacaaccaaatccaaataaactagtgcatagaaatagctttaaacaagtaccttacaaaacgcttgtgttcatgttaaacagcaaagaatcatcattgtcagcatctttattttccaatgctagtgtatcagaagattgaagctgttgaatcttctgtgactcatcatagattaagatcactcaacaaaaatcaaacttgctactatgaaactgcaagctatgacttaattaaacatataaactccaaaacatttgtatactacaactgatttattataaaatcaagagtaaacccaagattaaaattgaccactttgaagtactaaatacggcctagaatgaaccacacccctgaaacatcttttgggctaccaatcttgagtagagaacccaagattttataggctcttttcgtgaagaaattaagaggaatatct

SEQ ID NO: 85632 - DNA, 536 bp, Cannabis sativa
tggaaataatcagtatgtcttttatggtcagtaattcaacacaatctaatatcctcttttctgtatgtatgtatcagggaactgggcattggtattgttgcatacagccctcttggacgcggtttcctttcatctggaaagaactttgtagaaagtttgcatgatagtgacgctcgtaaggtttgttgattgcccacagaactatataactcaagcataaatcatgtgtacattcttgtagtttctgtctgaaacctatatattgtgtgatgcctaatgcaatagcatatgtaggaacatggtaagcaaatatcatgttcgggtactgaatctatttgtgacagatattcctacttttactttccaaaatcgcaatgttatctactattgttttttagttgattttcaatgcaggtgcttaagtttttttgttctttcttttttctttttgcagtatcttccaaggtttcaaggtgaaaatcttgaacataacaagacaatattcgagaaagtcaatgaaatggcagccagaaagg

SEQ ID NO: 85633 - DNA, 1221 bp, Cannabis sativa
acaagatcaacaattctactatccagctcattccaatatccagcaaacatcaactggctgatgctttcaccaaacctctcacttcacctattttgaactctcttatctccaagatgtccgtttttgatatatacgctccatcttgaggagggagtattaaaattattaaaatatcccttcttcttgtattgtttttttttcctgttttctcaatattgttgttagtctcttgtccgaagctttaggcctattgttagttttagttaaattagttagttagttctgtaagtttagtttttctttgcttactgctctaaccgactcttgtctaagtcttgtatatataggtctcagttctttcattgttacacacaaaaatgtattcttctcaatatagaaataaaatactttttctctgttttctcaatatgatgctcagactaacatagtagcattcattccttttgttattctgattaaaagttttgtaatctctgttgaagttaagcaaaatctaaagtacatcttctgaatctatgcaagatgctattaggtgctgaaatatgtaagcatgagaatagtattcaaaagtgtttgttcttttacaggctaaatcatcattaatgttttcttgtttggtctcaaacatcattaacatatcttgctaacatagtcaagatacttggtcttataaaatctggatgatcattttgaagatcttcctttttttggatagtcttcatttcacaataagtatgacaaagaattaagaaaagttaccaactttaaattaagctaaatcttccccctttttgtgagtttatcctttaacaattgctcaaatcatgtttgtggccatgtgcttccttttttttttttttttctaagttagaattctaggatgtagatcagtcaaattcgaatattcactttggtttctgaggaattatacaaaaagactatttttctttcaaaactagtaaatttgattcctatgttttacattgtttcttagcattcatcacgccaacattcaatgtcttgattcttttcatgactcacaactttaccttatcttgaccaaaacagaagataattttggtcgggtaattaattttctgcttattgggaacttggtgatttactcttaccataaaattcaaatattaatggaaaaatataaataaacaccattatataatgttcatgctattaactaaa

SEQ ID NO: 85634 - DNA, 506 bp, Cannabis sativa
tggaggacaattaccattcctaaggtacataaaaaattaagagttcctttttatttttattgttgttgctttgtttagtgtagaaagctttcattatatattatttctctatacataactcatgaaattatatatacaagtaaattttatatttattcacatagtatttttccacaagttacaacttatttttgctctattttttttttaaagtaacactaaaatgtatataaaaaaagattattaatttaagcctcacataaattatcactttaaaatacgtatatttattttcctgagtttttagatgagatacgataagagacaacaggtgagatacgatgttgaatgatcggatataaaaataatgcattatatttataagaaaaaaacactaatttttttcctaaaccactctatttatttatttttataataataatactttttttaacaaaataatttaaaattctatatgtaatatatatataaatagtataaattta

SEQ ID NO: 85635 - DNA, 658 bp, Cannabis sativa
cataatctagttatttctattacaatttacagagaaaaaatattgacctgtaagagtaatagtgaaccaaaattatctctgttatacccgaaattcggctgccatctcagtggaggacacgtgtccagataaagggaataaggatcgatgcaatcactttatatggaataactcattaattacgtaagtattagagtatattcgtaacctgctgactgtagggtctttggcaaggaattaatatacaaactggcgcttactatatatattagcgagaaatcatatatatgttgttgaatgcgaatagtgaggcaacaaggaagacaaaagcgatgcatatcaattacgaaagccctcagtgtataatgtacaaactaactgtaatagtcggatggctcgagaccaagtaagcgaggtacccatctcgctatgggaatgcttcctatagcttcatccagttacgtcagcgaggcttataaccctgacgagccagaagctaacgttcaaatgagctttgaaggactctttgtaaataagaaccgcgatcattgcaagacatgcttcatcgacctcagaaggagaaatggccccagctcactattgggatcactgaaaccaagtttctgtcaagacatctccagataataacaattaaaga

SEQ ID NO: 85636 - DNA, 711 bp, Cannabis sativa
  modified_base (96)..(96): a, c, t, g, unknown or other
tccattaaatcacttgaggctagcccaagtgaccataggtgggtatgtctcttggaaatcctaattcgagtaagtaaaacataattgtaatatatnaacgcttaaataaaaaaaaatattaaatttactttacattaacatatatatatacttatataataataataatatattatattatatagatttcaattttattatgacctctaggtttttattggtgggccatgggcttccatgtgcatgcatgtgctgtgtctttctcacaaaggcccaccattaatccctactactatatcttatatatctctctttctctcccttcaatattcatatattcagtttcttcacattctctttcttaattttccattcctctcaatctctctctaacacacaactatatcactctgcaaaatttgtcttcattttatatatatatatagctctcttcttgccctattcatcaagaactctctctaaacaatattaaggtacgttacatatatataaaaatatacatatattacatttgattatatagcatatacatttttttatatatacatgtgttttcttttctttttgcagctagagtgagaattaaaataatgaaaaacaacttgagattattaaagcaagaattcctaaagaaatggataaagggtcttcaaatatgtagtactagcctatcatcatcatcatcatcat

SEQ ID NO: 85637 - DNA, 681 bp, Cannabis sativa
gttaacctgcgaagtctatcatagcctatatgacctagtcgtaaatgcaatagatatgtttcatcattattatcaatctcttttcttttatggtttctaggtttaatagtattgaaaagttcgttattaagcgcaattggtataactggtctcaaaacataaagcccttattctatgtgagcaacacataattgaaatccagtacaagaaatagtgcaaatacttgggtgtgcctatttgtgcaaaaaggatatcttcagcagagtgcaagctgttggtggaaaagatgatggctcagatcaaaacttggagctcgaggaatttatcttttgctggtcctgtagtacttattaactcagttctcatggctatacattcatattggtgccaagtgatgttactgcctaagaaaattgtaagtgaaattgagtctatttgtcgtagctttctatggaatggacaatatactttaacaggagttcctaccgttgcttgggcatcagtttgccaagcaaaaagttcaggtggattggggtttagatgtatatcgaattggaacaaagcggccctttttaaatatgtttgggctattgccaagaaggaagataacctatgggttaaatgggttcataatgtctacatcaaggatgaggattagtggacatataaacctacagacca

SEQ ID NO: 85638 - DNA, 1029 bp, Cannabis sativa
ataacgatacaatagattttatcatatttgtaggtgtttcatatcgtcaatacaatacaaaactctttaaagaaatttttataacatgactagtattattaatatactaaattagttgatataaagttagtttacagaggtctaataattgtttctccacatattactattaaggtacaattaattatcgaacagtgaaaaaataccatagaaaaataatttcttatagatacacattcacatttatcatttctagttgtaaataaattgcaaattagttgaataatagttgtgttactataattttatagtattataaaaagagggctcgaaattggcaatacacgacttgaatagataaaacatgattgtggtaagtttcatttgtattacatatagggtatattagttgttttgaggtttgatgttagttggctcgcaacagatataactgttgcattacagttgtcttgaagttgacttacaatactcaaacttatatactctcagaaaaaagacgcaattctattcctcatattttacaacggacagtttgatgaaataataaattaagcaaattaagaagctagtagacaattcatgtcaattgattgcaaatatgaagaactaatacacaagctgaaacaagtggtagaatgcaactaagaaaacactcaaaatgtaactaaaataccaagtgaaagagggataccaaccgttgaggataaaagacgatccaagcatactcttccacatacaactcaaattgaaagaacatgacttcacaagttattcattgtgtgtgatccagaagaccaaggaaaagaagatttctaggtgcatgggaaacaaaaaaatagaatatgtgtagcaaatgtggctaaaaaggtcacaaccggaagacatgccataacaaagaattagataatgagagaacatctaaggcttaatcaccagactcttgttctttccttgacatttttcatagacttctaaggtttcttatactcactatcaatattttcttca

SEQ ID NO: 85639 - DNA, 931 bp, Cannabis sativa
agatacatggtttctagtaaatacattattgtttatatgattgttggtttctgaaaaactaacgaaaaaaacgtaagctttccacttgttgttgctccaaggaacatggaaaagaaaaacagacaattcttgtgcagtgatgaaaactttgaacataacaaaaccactgaaatgagatgcttacgttgacagtattgttacccagactagctccacacagtcaacccaaagcaacctttgttcaatagggaccacaccataggtaatcagatgagcaaatggccaaagcttccagccagcctatacagcaaagcacatcaaataataatgctaacataagaaataaacagaaaccaaagtatcaaatgaacctttaaatcagatgaactcaaacaatacaaacaccgtaattatgtactgaagaaaaaaaaagttgcaatgaattggttaacagttacattccaaaatgttctagtcagttttaaaataacacatgtggagtggaggtatagtagcaatagcaaatatgcatagatattcttttgcactactaccagttggacttgaacatcgtggaccccattcatgactacaaagctcaaaaagtaatatttataatgttaaattttattttggagctacaaatgtacttatacaagcacactacatggttatgaacaaacatcaaagaagctattcataattacaaatcacttcttccaactccaaataccaagaaatatacataccaatttccaacattctcccaacaagttgtcttaaaaagaaagggatccatcgactatcaagagctttccgagcattgaccaaagccagtttggtaaaagatttcgattccaaaacaatatcagaaacaaaacacactaaacaaagccagtttggtaaaagatacatatatgaatagaaagga

SEQ ID NO: 85640 - DNA, 1073 bp, Cannabis sativa
gggtctaaaatggtatttacttttctttttatcctaaattagtgttaattattttttttaccctttattgaaatgccatgccatcaattaaacatttaaatataataaaaagtatcataagggaaacatttctacaacggtatattgaaaaaaaaatttaacaggtcacatattatagtctcataaattcatgggtaaaaatattattttttttaattgtatttaaatctaaaatatataattcgacacttaattttggtatatttttgtattttcggctctttaataattataatcttagtttttctatataatctcataaaaaattttaaaagctcataaaattcactacgggtatttatccaatctaacctacactattttactcatagtacatctgatccgcactaaatgcaaatttattttttggattcaattcaattcgcacaatagctcaaatcaaatccaattcaatgcgcaaaagtgtagattgaatcggttattttagattgctaacttattaatattaagttatttaatatttatgaaaaaatatatttttttttttcacataactagcaactaaataaaataacagataataaattcaaaaggagggaaaattatatgtgtaaagaaatttttaattttgttttaaattgtatgtagaaaaatatatgtatatatatatatataaaaatgaaatatacatttgatctattaagttttaaaatatatttgtattatatgtgttcgatttttcaattattattttctttacataaaatattaattgtatatataatttttaaaattttttaataaatatgtgtaaattgaattgaatagttacttttacatattaaaaaacatctaatccgcacaagtgcgaattttgaatttttcaattcccacaagtgcggacatccgcactttgcgaattggattggatcgtacggattgaattggatcaactattttatgaacacccttaaaatcaaccaccatgtatctctttgataaagtaggtttcttttttttttgtttaaattaaaaaggggtaagttgaaaaa

SEQ ID NO: 85641 - DNA, 759 bp, Cannabis sativa
ctcctgcttgtttcttcacacttttccaaaaaaggaaaaacaaatagtttgcaaatcatttacaaatatgtcattataataaattagttattaatttttcttttgatacagtattattatcagctagatggaattccaatttttgacaaaattatggcgattgttgattcggagatgaagacgagatatagagatcataagacaaaaagatacaccatttcaaagagcattattaagaatcagaagactttgaattagttgtctatcacccccaaaaataagccaacatagaacattggagaaagatctatgacttatttacgtctcctgcgtatattgttcgtttgaaaaaatatatggagaactgaaagaaaaagaagtacacaataacacaagggacaaaatcattggtggaaaggagattcaaattagtaagttatctatatatatatatataaatttaataaagtatactaaattaaaaattttctaacattctcttatatttattagaaaaactagaatatattgagatattgagggaagttcacataaataatgcaacaaaacttttgtcaaccaaaaatctcaagaagattaagtaagttatttaattttatttttattctcaagaatgaatgaatagacatatagttagttctccattaaaaattgaaacaaggacctcatagagaattgaatttataaataagaaataagaaaagaggaataaataataataattctaaaaaataagag

SEQ ID NO: 85642 - DNA, 1185 bp, Cannabis sativa
aaaaagtgaaaccagttttacagaacatgattttagaaaatattttaacttttcaattaaaaaaatctgattaaaaaaatattaccaaacacacctttcataaatcacattttttttttcagaatatttgtggcaaaactttttaattttaacatttacaattattacacatataacccgaataaaaaaagtagcccttattaacttactattttattgtagttgtaccttttagttgttaagtgctaactaaatttattaagtgggagttcagaaacatgtgtccatatattatttgaccacgtattaaataattattattcattctatttttaattaaaaaatacaatttaaatagaaaaattaaatcaatttttctttaattaaataaacagttttattttttagaaaaagtataatttttttatttaatacgtgctccaataatatggcgtcatgtgtgtttttaagttgacacttaataatcaaactcgtatagaaaatgcttttgctgttattttttttttttattaaaatcatatgtgtaataattataaatattaaaagaatttcaacgcaaatatatatatatttttacacgcaccatcttcgcataaactatatttaaacatttttttgaaaaataattagtatgtgtaaacatttaaaaatttaggttaccgattcaaaataaaaattatatgtatattatagatgaataatatagagtaatttgcgatataaatacttaagttttacttgcagttgtaaataaatacttaagtttaattttaggcggtaataatacctaagttataattctgaaacttttgtaagtacctaattattaattgttaagtaaattgccacgtggcaattcctgattggtccaagtcattaaatttttatttttttaaaagaaaaattaatttaaatataccaataaaaaaatgacacgtggataatgacataatattaacggttaggtacctatagagtttcaaaaatataacttaggtattattaccgcaaaaaattaaacttgagtatttatttacaactgagagttaaacttaggtatttatgccgcaaattattcaataatatattatatggaggtagaaaattacaatgtggactaactttgtgctatctgttgccacctgtacaggataacccatatgt

SEQ ID NO: 85643 - DNA, 560 bp, Cannabis sativa
aaaataaatataataataaaatatattattctaaacctaaacaacaacatacacggcaccctctcaaaatattaatttattttattattttataccattctcaaacttttcaaataccctttgtgcggcagccctctcaaactattaaacttttcaaacttttctcctctctcttaattacaaccgcacaaattaagggcttcacacatatcttcttcttcctttcttctttacgggttgggttctaaggttcttgtgggttcaagttttctgctctcctctttacaacagccacaaaacacatttttcttcatcttttcttagccacgacgacgactgacggcagtcgagattcatcaacggaggacacaccattcggaaccttgagcaaagcgttttcctcattggacgatggaactttgcaaatcactttttggtttttttgtcgcacaaacaggccacaatgagcttaatcgtctccctcgtttgtctatgtgtttagccattttaaacctaaccttctatattacttttttttaattttctctctctctctctct

SEQ ID NO: 85644 - DNA, 1078 bp, Cannabis sativa
cccccaaaaagcaaatattgggaaatcaaatataatcaagtgtaaccgtcgaacgtgatgagaaaaaaccgagtttcgaggaactaattaagtcagagcattaattagccaaaaactgaaaagacgcctggtcagcctcacatcaaatcgcgaacaggcgcgcctaacacgtgtcaccaacacaaatgtaaaggcagcttggatgaagtctacaggcaacttcggaagtcccgtacggacttgggggcaaagttatcccaatttttgcactctgacgtggcatcacatgatggttacatgtggaattaactttatatacctgctcgtaagagatatgccgaacagagcacggcttatattcgcacggacgaagccttcttaaccggacagtgagcaatccaaacagcacgccaccacttagcagtgttagcactcaaatcgtgagtcacagaaggaatccctattttgggatcatatcacaaagatatggcaagctgtctgaatcccttgattagtgtattctatatttaatatgcaatctttccaattatattaattgtaatctaaagggatattcttcactcaaagcttatagccctataaatattgattcatagtcactgggcaaaggatcgaaaaacttgtctaagaattcatattcaaagatattattgtaagagctccaagaaagggaatcattatattctttgttcttaagccaatacaaactaaggggagtaggctattaccgaactgatcggggccgaacctctataagactcttgtgtctttatttacttcattatattacatatatatattatactacttgtcgcttacaatcaaccttcattgtcgtttgccaaaagtgaggccaacacttttgaaattctacggtgttaaatcgtttaatggttacatctattgcagatgtatcccactaaaaataaatcaatcatgtagaatcaacaatggagatcgaatatcttaaaacttaagcgcgcatcattttaaaaaaattgaattttcatttagatatccaatttagtctgtttatgtaaatatttatatatttatt

SEQ ID NO: 85645 - DNA, 910 bp, Cannabis sativa
gctattagtgatagttatttatttggtaaatgggatactgattgatgttatatacggtaccatgttaataattatagcaaataaatagtggtggcagtaacatttttaggtgtgaaatggggttgacttgttttataaaatagtagcattataattccttaaacgtgtgtaatggtatagtattatttgataataaaagaaataatagtaggagctttacagttagttagtatgattaagttagctaattattaaggtataattaagggtaatattgagtattagtagtagtaaccgattttcaaattggagataagaattgcttagagtagtcttattcatgcggtatttttggattaatgcatggaatgaagtagaatcatttccccatacataggttagacgtgggtcacatgaagtaattttggtcattatttttaatcaaagtaacagatgtaaactatgagtaaaataatattctgtaaaaataataataatgatagtggcatacctagtagtgtgtcatggaagaaattaaattataaatggagtcttactcacacgtggagtaaggcactaatctctcaacaagttttctgtagagatttaggtggaggatgttgataagtttgaataagtaaatacttagaaaatccttggaagttagtctagacacatgcatggcatagagagaaacctatagaaatatttggttattttgactatcctacacgtggctatcaaatggaagcagttaggagacttagttatagataaagtttaaatttgaattcatatttagctcatttgttctctttgaccgattatgaagagggaggttagagtttagtgactcattcaaatatttttaatctaatcattggtgtgttcgtagttaattttagcgcct

SEQ ID NO: 85646 - DNA, 1098 bp, Cannabis sativa
  modified_base (1053)..(1065): a, c, t, g, unknown or other
tatgatgtgcttatggactatattattatatagtatgcctattttgtcctttttcaggtgtgttctgacaagtcggcgcggtatagtcacgactgggtatttcgggccaaaccgggttcgggcccgaaatacaattttgggattttattttggcattttaatgatatatgagaaaactaaaattatttatttatgtatgtaatgtgatggaaatgacttaagtggccttgaatgcatatgtgtgtgttatatggccctaggggcaaattggtcatttagaccacttgaattactttgcaacaaaatggattttgtcattattgaaattgaatttctggacttttctcagccccttggaccaaaccccctactccctctctttcaatctttttttcacttcaatattctttcaatttttgtgtgttgatcttgttggagcttggggaattttggtgtctattgattgtgtgagctttgaggtagtttcttactcttttaatttattttattttgttgattttagtagataagcatgttcttagattgttaagttcttgagttgcatgtgtgtagaaaatggagtggttttgatgctttatgcttatttgtgttgatggtgatggttactgttcttaggaatgctttgggcttgatttgtggggagttgataatgtgttagttatggttgtttattctattgtggttgagcgttgttatggatttgatgattttaggttttgagcttgagtatgtgtggtgtttagctcaaagtgtaaaacctattttgaaagttgttaaatctgaattttgatgaatgtttgcttgaattaaagcatgaaaatatgtagtttaatgcctgtttaggtacttaatagttggtgaatggtaaatttgagttatatgtaagtttcagttgaattgggtgtgaatttggcatattttcgaagctgaaaactgggtttttaaacccagtggtcgcgaccatgatgatggcagtttatttattttatttttttggtttttgtttttgccataacttttgactcgggactnnnnnnnnnnnnntctttatatcgttggaaagctctttctgagctc

SEQ ID NO: 85647 - DNA, 1032 bp, Cannabis sativa
aattatcctataaccaagcttgggttgaggagctaagcaacacaccaaaaagccaaaagttccaaactatatcaataaaagtttactactttctcatacaaccctctcttctaagccaaactcatttcatatactaacccaacttatcaactaatcaacaccatcatactacactattaactacatatccacctattctaaacaaaaccaatacaaatttattctcaaaccatcaggcagcataatagctttctggagaatgtaaaaatcgattactaaatagtgaatttgatccactatttatagggaaaatatgtcaaacatttaaatttaattatataataaagaattaaagattgattgggtcaatcccacgatatccttaattccctctaatttctagcaatcccactcttttaggcatcttgattgacctattttgtaaggattaggcagttgggatgaatttagaaatttcctctgtgaggttgttggtcggatatttgtctaagaagtgccttcttagttgttcgaaatgctagtcagcatgtcccgtttagcatatgtctgatgttggatggctccgtccgacatatactccgcccaacatcttttgggaagtcttctcgattgtcttacatccatcatgtaccttcaatacttgacatgtgtcacattattccatgccacgtcactaagatgatttttgggataacatttgctcctcaagtttgcgtgagaacttctaatcatacaaggacttcttggcttcactcctcgcacggtcaagtgacacatgttctcatctagatggtacgtactctaaagtaatgttcctacccaaagcaaatcatcttttcgtcctttcaaatattttgtcataatttcctttgccttgaaaattgtgcattggagatcgtgcttgacggttactgtaacaacctaaataattaggcacgctacccaaaatgattatgaaaccctaatcccctaaccgggattactaattaaaaacagcgcagaatttaaact

SEQ ID NO: 85648 - DNA, 584 bp, Cannabis sativa
gttcttaccatcttctttttgtgtaaaggatctactgacaagggccacattgctggaaggacaacctaaagatggtgtgtatgaattgtcagttttgcagctaaatactcgtccttctgcattcctcagtaccaaagtgtcctcatgtgcctggcatcatcgtcttggtcatccatctgagtcaatccaacgtcatatcatctctaagtttggtttatctctaggtttttgtagttccaagaattttcactgtaaagactgtttttgcaataaaagtcataaattacctttttctcaatcatctattgtgtctacttctcctcttcaaattatttattctgatgtgtggacttcacgtatatattctgttgatgggtataaatactatgtcatttttgtggatcactttacccattatatatggctttatcccctcaaacaaaagtctgatgttgccactatttttcctcatttccaagctcttgttgaaaactttttcaaacagaaaataatcacattttattctgacaatgagggggaatacatgggtctcaccaaatccactggtcttgcgacatacttat

SEQ ID NO: 85649 - DNA, 531 bp, Cannabis sativa
gtgagtgtatggtaagttgtggggctccattctccttcaagataatggctattttttatgctcaccaatcttacacgactcgatcacaagtgactcttctgactcactattcttgaatcacaaacaactcttctgacttgtctttttaagactggtttttggatttgaatcgggtactcattagagtttagtttcgttatgataccatgttagaattgtaagatgtgtggtttagaaagtaagattaggtgagtgtatggtaattaaagtgtatgagatttcatttcaaaattaattcgcaataaaaagaatagtccatgcatcttacatacgatatttagttttcacatattatcaacgtgagactctaacaaataacaaaataataaaagaaaagaaacaacattattacacttttattattttgagtatagaataataaaaatcaccaactttaacaatgttcaagacttttatcctaaaatttattttcacttattccctaagcacaagtctagaaaattgctaatt

SEQ ID NO: 85650 - DNA, 912 bp, Cannabis sativa
atgtaaaactatccatgttgttggcaacaaatgcaatagtcttttgtggaataagtagatcatctctcccactaatagctaatacattcccttgtcaactgtcttttatttagttgatttctgtagttgcccctttggttctattcaaaatgtgctacacatttctacaatactttagtttagaaatttctacacatttaaagaaaaagtttacacaaaaattatttaggtacgtgtaaaaaagtttattcaagaatttcctataaacatttctaaaaatcaatattgtacaaaattctagtttgtattttagaaataagacatttgtatggataaagttctttttagtagaataaagatctagaattaatatgtgagctactataaatgcccatcaagttaggattcaaaattgtaaccaacatccaaaccaaacaactacaaactcttaataaagcttattattttctacatacaattctgtcttctaagccaaacaattctcatatactaaatcaataactactcatcaacatcaaaactacaacacatcaccacaacaatcattaacacattatcctacatattcatatattctaaactaattaaactaataaaaattaattctcaaaccatcagtggtatcagacctctgttcgatcattactgggcataatatttgctactcatcatcactatgagttccgaatccaaccgctcttctttacctcttctaattttttatggataaaactatgatttttggttaattaaaattagtagctatttttaatcacaaaatctttagaaaactattgaagagggagtcactactctagatgacattacatcctattcggaagattagaagaaggcaataaaggatactcaataaaaagattctcatgcatt

SEQ ID NO: 85651 - DNA, 598 bp, Cannabis sativa
ttaagaacatattacaacatattacacttaaatacacttaaattatctaaattatcaaattttcttaaacactataatatattacatccagtatttacttaaacactataatatatattacactataaagtaaaaaatacctaacataaaattagtatacgtgcctcgcacgtaactttttactagtatataaaaaaaatatgagacggtgacgtggtggtttaaaaatgctttaaagtactcattcttttttctctattttttttatttttttattaagtacttattcttttttttttttctatttttctattttttttattatttttttaatactattttcctactttttttattattttttttctattgatttttttattatcacacgtgttggatggctatactcatttttattattctttaaaatatattctactataaaatatcataacaactttaaataaaaaaaacacataaatgatatcatagatattaccacgatttttttgaaaaaaaatttacattattatttttttttgtaattttctttcaatcacaaatctctatatatatatatctatctattctatataaa

SEQ ID NO: 85652 - DNA, 664 bp, Cannabis sativa
  modified_base (604)..(621): a, c, t, g, unknown or other
gaccaatgtaatgttctgacattggaagtaaaagtcgtggaactttggaagactgcaaaaaaacactagaaaaaatagccgtcagacccatatatcacaaaaaaaaaattaaaaattaaaattttactggggccatcgtgccgtacatcgggccttatcgggcctaaaaaattaaataaaacaaaggaccattggacccatatatcgggccatatcgtgcccaacatcaggcctaaaaattaaaaaaaaaataaagggccatcggacccatatatcgggccctatcgtgcccaatattgggcctaaaaaattaaaaaaaaataaagggccatcgggccctatcgtgcccaatatcgggcctaaaaattaaaaaaacaaaagggccattgggccttacatcgggccctatcgggcccatcaagggaaaaaaatcaatcaccattgggcctaccccatccggctcaacatcgggtcctaatgaccccatcgggcggaccatcgggccgactatcgggcccacatcaggcctgacatcggaccttcatcttcccgaatgaatcaatcctaaatcacaccctaaacagtgttggaaattattttaccnnnnnnnnnnnnnnnnnncaagtatgtttcattaacatccttatatgaattctaaaacaat

SEQ ID NO: 85653 - DNA, 1906 bp, Cannabis sativa
  modified_base (587)..(596): a, c, t, g, unknown or other
ctgaaccagaaccagaccgggacacgtgatagggatccagatttgggactcagaccaggacccgaacccggaccaggacccaaaccgggaccctgacccagagtcggggcccaaaacgggaacctaaacaagaactgccagattaggaccgagacctggaccttgacctagacttgggacttgatcctagacccaaacttaaagctagaatgggatttggatacgaacctagactcgaacccagatctagacttagaatgggatcaaaacttgggacccagatccaggccgagaccctgacccagacctagacttggaccaacacccgggacccgaactcggacctggatccgaaccaagaaccagaccgggatccgggcttggacccagacccggacccagactcaaaccaggactcagaccccaacccagacccagacccaaacctgaacccaaacactgaattgaaatcgaaactgggactaggacccaaacccgaacatggacccagactgagacctaggacccggacctggacctacgcctcgaaacccagacccaaatcataactcgagactcaaacccgnnnnnnnnnnaagactcgaacccaaatcaggacccataccaagatcggaacttgaacccagactcgaaccaggagttgaaccccgattggctcttagactcagaccgggacctaggacctggacgtagatgagggacctggacttgggaaacgggcatcagaactgggaccgagacccaaggcccaatcccagacccggaccctgaccttggactcggactgggacttgggacccgaagtggaactagactgggacccgaggcttggacctgactcatagtcagtgtttggaacttggacccgtaccaggagtcaaacccaaacccagactcggacctagaaccaaacctaaacgctgacccgtaccccagacctaggtccaagtccgagtctaggtttgagtctgggaactagaatttgaataggacccaggcccaaacccggaatgggacacggactcgaataaaaactcagattgggactcgggacacaaacccaaacccagacgcagacttggacccagacccggacccaggacccggaccgggattagagactcagacctggacccagtaccaagatctagatagggggccaaactctaaactagaacaaaaatcaggacccataactgggactggcatccaagattagaccccggtcttggtcccagacccggacccaaacacagacatgggcagggacccaggattcagatcttgacccacgacccaacgtttcaaccaaactcgtagtcggtgtctagatcttggaatcgtaccaagacccgaacctggaacatttccaagacccagacctaaacctgaacccagacttgtgctaggacctgcgacataggacccgtgacttaggaccttgaccagaacctagacccgtaccagaacccagaaccagacccaaacacatattgcaacctagaccaagacccaaacccaaacccagacccggacccgaactcgtaacataactcaaactcgaacccaggactcagacctggatcgagatcaagactgggacccagacccagactagcaccgagacctgaacctaaactgggacaagtactcgaaatgggacccgagactaggatcgggtgcaggacctgagaaccgaaccctgacctataccccgacaaggtcaagacccgagacaaggactagtacggaacatggaccgggacctgcattcggactgggaacgtaacccagatcgggacctaggaccctgacctgaatcggggacatggaccaatgactgaggacccaagacccaaacctagacccaaaccttgacttgaga

SEQ ID NO: 85654 - DNA, 603 bp, Cannabis sativa
tattatgtacatataacgagtttgaaactcatgaccatgtgctttttacttgtgtttatgctaaacaggtttttgaagacataagtaaatagctaggtggtattcattggcccaattctgttgctgagttgcttttaaggttcaagactatgcctcatgattttcaaaatcgagtctagaatgcagttgttgctgctgccttgtatatgatttggcagaatagaaactgatgcatcttcgagatatggtgtgtactgctgcaagtagactaagcgaagatgtcaagaaagttgtgcaaattagagttaagagcaagggtccttatgaagcttgtaaaaaaacatgtatttattaatatagttagcagctggtatttgttagagttggggctgctgctgttttttgcagcagcgtttgtgcttgctggctctgcagaactgaaggccgaccttatgtgctgcatttgaccctcgtattagagaccgagggggctgactcccattgcatccgcagattaatttcataaaaagagtagtccattcattggtattaatttaaaaagtttaatacacttattagacacatgaaaatctacaacaaatt

SEQ ID NO: 85655 - DNA, 734 bp, Cannabis sativa
ggataagttgaaagggggaaatgtcatagtgcgttaagatggcctttacaaatgggtggaaatgaagtgtcaccccgcattaaagaatgggaataaaaaccacaacattttgagttgggatgatcgtaggattggcgaatggaagatgaggtcgctacattgacatgggttttgaggtagtagtacgaataagattcagcctcttaaagtggtcagatcagactttttaaccctcgagattaggtcctcagaggaaaaaactcatctaattgagcattatccactgaatctattttgctaccctcaccatctgcctcatctccaccttcgcaatctggtaattcaaagtcctcgcccatctcttcaacatccacgttaggagcaatttgtggatatgcgaagttaccttgggcggacaccgtggaatcactatctcgtacctctaagaagataggttttgctaattcttgcaccattcgatctctctcatcagtagatagtgagccttctcgagccctagccctaggagtctcatctttagatagcgaggtgggtatgaagctatcactctttcgagattcatcagcgaaagctccctctccagagttgtatctccggttgtctgataggtctctcatctgaaagatataagatcttttaagcatggtgggagagtaatttgaacagaaagtgttctcatccgaattaaaaaaaaaaaatcaaagtaaagttta

SEQ ID NO: 85656 - DNA, 722 bp, Cannabis sativa
ttttgtaattgatatatcttttcattactttaggcatcatatgtttgttcactttttagttgattgtaatatgaaactagattttgtattaaattattgcttttgttattatacataactcgttctaagatttagtttttaatttggttaatctacataattagtttctcgttgtcatatttttaactacacctaataaatattactgatttctctttatcaaattccaaggtccaactctagcgacaactctaacgtccaactcgatgtctaactacggtgactttcggtagcgatgattttttcgacgatgatagcaattttgtcaaatattctcattatattttctacttttattgtggctaatattttgttttagtagatagtaactgttttgtatagtggattgatggtcgagtcttggaacttctcagaaatttgtaactgcttttaattttggtctagtgttggttttagttttgatagtgggttggtggtcaaatcttagagtttctaaaaagcatgtaaaatttagagaaaattatattgtgtgcctactttattttacatgatttaatttttacctttattttcatatttttaagttataccaacttttatagatgacatcctaattataccccttaagttaatgtaaattatgtgctagacataaatagagggtgagagtatattgggcaacccactcacaaaagtgggta

SEQ ID NO: 85657 - DNA, 526 bp, Cannabis sativa
ttaaaattggtaaaaatatataattttgagttattatatttttcttcttcagggccatcatagtagtagaattttcttcagaagcttcttttccccctaagatcaagaattttgtctagaaaatatatcttaattttatttcattatgctacaaaaaatagctactcttagtgataaacttttagttacaacataaactttttgtgactaaatgtgacttttagtcacaacaaaaagttatcttgtgactaaaatatagtttttagatacaagttgtcactaatttaaatattactaccattttaattgataaataaatattcatcattgttattattatcaaattattgaacattttactgtgctgtgctttcgagctaatttattcgtatttatgtgccgtattttcgggtttttcgttccgtgtcgtgtctaaattcatattttttcgtgccctgtcatgtctaagcctatattttttcatgtcgtgttgtgtcgtgtcgtacttaagcgcatattttttttt

SEQ ID NO: 85658 - DNA, 649 bp, Cannabis sativa
aaatctccataaaatgataaatcataactattattctaacttcataattaaaccctaattatctactaatttctaaactacaattaagcggtctttacaaccaccaatgctacgagatcttggtacctcgtgacatcgccccagaaaggagaagtgagccaactctatgaggccaaaatatcaaacttgtcactatgacgatgaaataaataatctctgatggaaaaaccgaaagctggaaactacagtggccgacatgcaaaaagtagtgagcaccattctcaaaggcaaaactcaaggttcacactttcagtacaaaattcaccaacaagggtgcaagattccaatcgtacatgatgacggagagaactccatgtcatcaacggatgtcaccccaaagaatgagagcggaaagggcctatcgcgaaacaagaaccgaagaggttgctcaaagtagcatgaatctacctgtcggggtaagaccacaatgagggaaacatcatgtagtcttatgaaaggactttagccattgaatctcatgctaggagacatcgcgcttgcaccccttttttaagagcaaagaaagcaaaatgcgtcacccttaaactatggtggagagccgcacaatgattggatgagaagagtacta

SEQ ID NO: 85659 - DNA, 548 bp, Cannabis sativa
caaatatttttgtgacacttttttttttaaataaatatcctgttatcataaattaatgtaagtcatttacaacaataaagtatattagaggaagaaaattctccaaccaaaagcaagtttcatccaactctagagcatatttagccaaaccgtgagtaacgatattggttgtacgcttgacatgttcaatagcaactctaagaagaaaggataaaaggctagaaatatctacaattaagtctttaaaagaagaaattgtggagtaattattatttaaagcatttgaaactatcaaagtatcagtctctatttgtttgattggtaacttcatttgtagaacccaatttaagctatggaacataccctttgcttccatctcatgtgaagtaaagttaccaacaattggcttcaaaagagtagctacaacatcaccatgggcatcccagataatggcaacaacaccaatttgtttctagtttcatctaaggaagtgtccacattcagttttaactcaactagagtagggggtagccacgacactggcactg

SEQ ID NO: 85660 - DNA, 1478 bp, Cannabis sativa
ggcataaattcagtcgcttcagtcgcttgcaaaatgttttttcgctgatctgcgattggagatgaatccacccagcaccccgccgccactactagccccaagccccgtaaatctgaatccaaatttcttctttggtatattcaacatgagaatcggtcaacgtcctctacatcatcttctcgttccttgacctcttcgacctcgctcactgctctgttgtctgcaaatcttggtacccttttgtttatatgaaaaacccatttgaaaaagtatctaaagtcttaatttttaatttttaattttagtgttttgatgcaggcatgtggttatcaacaagtctaagctgcttcaagtcttttacatgcagcagcagaaattggatggttctacgagtttggagaagcctttgaatgtgtatttggaggaggtggctatggagcgccatagattggctttggctgaaggatcggttgttgttaatcagtggagaggccactcaattgggtaatgtttaatgatatagtatttcttcaagtttgaaattttacttttggtcactttggaagatgttaattcacttatgaaattacatgtttcatctatagttagttattgggatttaagtgtttactaataacaatgcttaaaaatgagcataaagatcaagatggttgatataaacttgaaatgtaatcaataaaggcaaagagtgtatatcatgttttctaacttctgttgttgttgttgttgctaattttctaagttaacttttttagggcgaattaatgtcgaatgaagaggggattgcttcttactggtggaggtgataaggtatattctacctcacaccaagataatagtagagttttttcacttatgattacttagttagaacgtgaaaatgagagattctgtgctgattttgacatatgttcttgcttagtagactgtaattatatgttggttttttctcatcataggtaagtttcctttgcagacgttctgtttagatcttacataggctttaagaagttcacaagtagaatgtattgttatttaaataaatgaatcttcaacattatttccaggttctcataatgctaggtcacattagttattagcctccatagtaaattataaatttagagctcttatatatgcaattattttcttataaatctttaccgttaataattggtaaattgtttttctatatgtttcttatggtaggttatgcgtctctggtcgttaggaaactataaatgtttggaagaatattcaacaccagactcaacctctgtagttgacttcgattttgatgaatataaggtaacttgaatacatcagcaaatcattgtagttcatgattttctttcctatgttagtgacattgtttgtgtttcatagattgttggattacttggcactcgtatatgtatatggaggcgagatggggcaagaagtgtatttcctccttg

SEQ ID NO: 85661 - DNA, 1746 bp, Cannabis sativa
atatatagtgtttgattgtttgtaagagaatatgtatgcctaatactactcaattagtaactatatactttcaattaattggaaatgtgacacaagaccataagggaagatgtgttttgaattattacctgttagaccacacagcaagggtatcttcaccatgactttggtaaacaaataagccgccagcccacagctcactcctgttataaggggtaacccaaatttggttatttgtaaaagcacctctcttttgtggagggtcgtccaggtcaagaaggctagccgcggtgcctccgggtaccaccttgtacccaaccgggttcccgacccgagttttctttgttgggttgaacacgtggaactcggagggatcatacaattttagcttaatttgtgcctctttttcagtttttgccactttttttgttgctttcaagtaacttcttcttggtgttgatgaatctccttgtgagtttttaactctttcaatatggactttggcaaaggaattgtctgagccgtccacgtccatatcaagataaaatgtgatgtaatgatcatgaatgacaccaattacattttcagacaaaagggtaccatagatattatcttcattaggaatttgatttgtgttctcatattcagtgcctttcaccatcaatatgccactaagcccaacctgtcaattattgttatggaagtactggtattagggcacaaccaagaaaaaacacctatacaatatatgtatagtaatgaatcaaaggactcttaaaatgatattatttagattaaaccaatttggtaaaataaaatgactccactctatttatatactttataactataaagttgtcctaaattcgtatcctaatgaatgatgctatacacgaaaaatttgtacatatttatattaggggcttatatttccaccccatcaaattataacaacactcacaatctaaatacaccccattaaatttataattattattatatgagaatgcaattaaggtgagtcgctagtcaagatcttatcaaacaatgattaatatttaacaattacaaaatttaatgattaattaataatcaataattagacaaatattagtaattaaaatgtaaatagttgtttaatttactatgataaattcgatatatattttactattttatttatatttagttgtgtcaaatttattacagtatatatctatttcaaattccatttcaaaaaaataaaaaataaaaaaactattccataatgtactaccctgtattgggaaaatcaacatttttattttattaaagtaataaataaaataatattttcaggaaacataaaataaaataatgaatgggcctcaccttaattcgaatcaatccatctgtttgaaactcccaatcaacaatatagtcatagtttgcaaccgatgctgccattcgcaccacaagtgtcaccttcggtcttacttccctaatctgccaaacaaacgacaattttttgagcaaataaatgaacaaaacgacaattttatttccaatttcgataactaccaaaacgacaaataatctcgatgacatataaatgcccttaaatatttttttaaagattagtttatgttattatttacatgacccgatggatcgtatatacttacatccatacccgtaatgggactttctgcgtgtcgccatgcgatatcgccggcatagctctcaaacacgcaaaccatgttagac

SEQ ID NO: 85662 - DNA, 1154 bp, Cannabis sativa
cttcaatcaacacaaagaacccaaaacctacaaataaatacataatctgttaacaagtatcaactctcaaatgcaatatattaatataaattaaataatttatacaaattttagtatgaagcaacatcattactctaaaaaaatgacatataagatcttaattaaggaactattgttgtgattttgtagagtagacatttaatcattaaaattacataaggaaatcaatttcatcaaatatcaaattgcaagttgatctttacttcaataaataaataaaataaaataacagaaaatttattttggaaaaactctttactccttcaggctcaatataaaatcactaatctaattgttcttaaattattcaaaggcttgatcaagttctaacaatgagaagctatacttacttatttaatcttcaatagcagcaatagttatcttgctcttctcttttcctacttccttgacttaagttttttttgcctacaattcaaatttgaagaaacaaagttacataatttattgttgaaaataaatgagcataataaaaggatagagaacaaaacaaaataactttggacaaacattgaatcattataaaatgtgaagaattaatacattaggaacgttgtagagggtgtcctatttatttaataaactttgagatatatcccataaaattcgtaagcaaaggcaagtacagtagcactgtttgagctaagttttcagcaaaaatattttttcatgaatccttaaactaacacacaattataacttggacaaaatattttgttgtttcccgttcacattgaatctaaaaagaaaacaatctttcatttcagtcagacttggtcaattagaaacatgccacctttagcccatatcttgagacatttgccaaatgattcttgaaacacacgattatataaatgtctttctctgttttctttaggcgttttattgagttccattcttcaaggaagagttgatatttgagaaacgtcattcttttacgtatgtcctatatccaaatgactaaccaagaatgaattttccaattttgaaattttggagtttgattttttttttcctctgaaataactaagtgtttttcaattaatctcattatgttgacaatccaatcatgtcaa

SEQ ID NO: 85663 - DNA, 1950 bp, Cannabis sativa
ataaacaaggagaacacacaaaatggataacaactaacatataaaagaggtgccaaataaaaaacaagaaaacacaaccaaaaaagaaatgctagaaggttcataatacaataccaatatggaaaagtacctccacttgtttgttcaaattgccatcggtaattatacaagcaatctccagtatccgatcaacttcgacattcaaacctacacatacacataaatgaaccaataaacatatatataataaataagtgaccaggaaaactatacatatatttatatagtgacttgccctgagtttcacttccatgcaaagagaatcaacttactaatatcagaaagtaagttcacaacatagccaacgggctgatgagaaatttaatattcttacatcacacataagtaggtgataacagatttaaaaaaaataataataataaaaaaatacccatcttaagtatatccgcaagaaaaaggaataaaagttgaaatatgaacataaattttataaaattataatattactgccagggatagtttttgttttatagatgttggggcttttgctaaacataatgtcaccatttaataggcatctgaagcattgttttaaataaggtttgaaattccacttcattttatgaatttggaaagtattgaactcattagaaattcattttctctttttcgaaagaacattttctcttttttattccttaggtatttatcatttattcttctccatgtaaaaataaactgtgaagcaagacataaataaatttgaatgacaaaagttcagagaatagatatacactatagtacatatatgaatcataaacatatttaggcagatctcctaaaagaccttgcagaaaacaagcatgcactaactaagcactctttcatagtgatcaaacaacagactgagtacttagtacttaccagtcatttctaagtcgatccaaacaagaggcatcttatactctgttgaagggatattatgtttgcttttttcctcctttgcctcgctgtcatggttgcttgctttgtcatctttcatgcctgcaccaagaagtatgcaataattagtaagaacaatttggccaaacccagcaaattctcgaaaacacaatcccaactatacaagttttcatgattgacactatttataatcatacacttcaccagatgggtacagttaaaaactaaggtaaacagcatagcaagcatgacttgtaccaaaactagcttgtaaaatgtcaactacacagtccatagctaaacctattaatagcttttcaataaaaaattcattcaacacagccttcttgtaattttacaaataatgagcatgtaatattcaagtacattctcaggattcatacgctctaaagcaaccaaaaacaaaaataagatgataaataagtgaaaacttggaaaactccaatttagtttcaagatgataatacaagaagatatattactgattatccctattgaaaacaaaacatagaaatttcaaggcaaaacacaaaccaattaaaagaaaaccgcatacaaatatacacaaactaaacaagtaaagagccctaaaatacgaaagatataagaataaactgagtaccagaactggacgctccgtgtttgggttcagaagcgttggaggcctccgccgctgctgccgccgcctctcgggcttgatcatcgtcttcagcatcaaggtcaaggacagagaaagcattggcgaggggctccatagcgtttgcttcaaggagtgttggggttcactccgtttggagccaatataatggggaaaagtagtgtaggagggaagtgcaatggacttcaatcttacttgtttttattcaagttaactgcacctatttctattttctagttgaggggtaaaataataaagtaattttgtttaggagtttttttattttt

SEQ ID NO: 85664 - DNA, 555 bp, Cannabis sativa
agaaagaaagccatggaaagaatgtacagaaagaacttttgattcattacagcaggagtaagagtttatatacaagatggttacaacctatcaataaccgaacagtataatagagtaactaactagctgatatcactaactaactaaagcctagagactaacagacttaaccgtctcttccaacacctcccctcgaattcataattaaaaagttttcaattttgagtttgcgtctgaagtccaaaaatctttgacttgaaatggctttggttaatctatcagctagttgatcatagactgtgacatgtttgatctgcaccattttatccatcacttttttccttataaagtacaagtcaagctctatgtgttttgtttgagcatgtgaaataggattttgagtgagaaaaacagtgcttaggttgtcacaccaaatgattgaaggttgaggcaattcaactccaagttcagaaaataaataatgtagccaagttaattcatcagtaacattgacaacacttgtattcatgattctgtgctagaccgagatatggt

SEQ ID NO: 85665 - DNA, 544 bp, Cannabis sativa
tatatacatgtttcttttttaccttattttaaggcacttttttgtttacctaatattggatgactaagcatggtgttgttattgtcaaaatatggactttaggagggttttatgtggtatatgcttcacatcccataacatggacaaagtgctcttcctgttaatagatgacaatcttgcaatgaaaaattttattatttttattattcaagagcattcattaactatcactcttaatgacattatttctaaaaggcaccattgtccctactctttagcactctcctcgatatcatataagaaaaacttttaaaaaatattttttagaaaatattgctaaccaatcgtgggacgccacctataaaagtaactgggcaaaagtggtgcccaatagcaatcttgtttctacaatatgtctatagtcgttctctttccctcacttctcacgcaaaatagaagtccaataaatcatcaattgttttttcttaatttaggtaaatagaagaaattttaatatttttatgcaatattcaaataataaaaa

SEQ ID NO: 85666 - DNA, 691 bp, Cannabis sativa
ttgtctacatggatatagtgtacaaatgatacaatattattggtccacataaataactatttaaaaataaaataaaaataaattaatttaaaataaaaaataaaatcattaaataaaccatttttttgcccttttatcttcacgccttctctctcttccccaaaacactaccaccatagccaccatcaccgattgtctctctatctcgtccctctctctctaattccagatatgattttatgccataacttatttctcaaatccaaatcaacactaaaaaaaaaaataccctgatatctaaataagaaacacacgaaaaataaaatacaaaaaataatccaaatctaataaatcatcacaaaaaccatttttttttgtcggaagtttatcccaatccatcaaaaaaaaaaaaaaccagatctgaaccctctttttttttcctctcacgctctctctttctctgaaaccagatctgaacccaaaccgtcgatgatgaatctgacccattgaagccatcaccgttcagaccttctgccctcttcaagcaacatcaagacccgacgaacgagagacagtcgacatcgtgaggatctgtagcaacgaacgaggaagatgcgacacctttagatgagctgtgatttcgtcttctcgtttgatgagtcatttttgtggtcaccttacacgagaacga

SEQ ID NO: 85667 - DNA, 1306 bp, Cannabis sativa
aacccaaaatcttagaaaatttcttgaaccaccttgatatcctctggctaaactgtctcaagtcgtgttgtatccaataccactgctagaaaccctaaacacccttcttgtaacaaatctctagttgttaatactgaaatcactagaatctgggatccttgaatcgatcccacaaaaataaacggttcctcaccctcgggttggatgatcaccatcttccatttacagtcaataatagctgagtacttggataaataatccattccaagtataatataaaaatccactaaactgaattctatgtcagccaactcactcctatccttaattctgatcggcatagacctaattcaccttttggagataactaattctttgccaagcagtagggttccaaaccctttatcataactatcatgtggtctatccaatttaccaaaaattttggctgccacataagagtgagtggcccgagagtcaaataatacagagatgtaagagttgttgacaagaacttacatgttacaactgaggggctaccttctgcatctgtctgagttaaagtaaacaccctcgctggagcgggttttgcagctgtcttttgttcctctttcttaagttgcaggaaatctcttttgtagtatcctagcaacccacactggaaacatccttgccctctacactcacacaaatgatgttttttacaactgggacacttcgggtaagtttatcgagttttgaaaccaccctgatggttggctcaaccctggttccctcagaacctcttatttttacttgacccactaggcgcaaatggtgcctttcatttctgatcggtggtcgagccactaccaccccttccataaccaggggtaggaggagtaggggccccaccaacaacttgagtgcttcgggactcttgagtgcactcaactacacccccagctcgtagtgctttccttaccatgtcagcatatgtggtgttgtcgtcaatggcaatcataaggtcatgttttattttggtgtttaacccatcaaggtacttttctttcttgttaaaatcagtcggcacaattctcgaggccaatctagccaatcgatcaaactgcattgtgtattcagtaacactcatattctccttttgggtcagctaggtaaatttttttctttttgcacttctgaccgcctcattgtagtactttgcgctaaacaactcctagaaatcttcctaagtaacagttgtaacatcacgagttagagacaccatgtcccaccaaaccaaggcatcttcctagaatcggaatgt

SEQ ID NO: 85668 - DNA, 884 bp, Cannabis sativa
tactggcaccttcctcgacgtcctctataggtttttacaattttttcagatcccacacgaggatccaactcatcttcttccaccacctctggctcgataccttcacagaccatcaataccggtaagtgggccgcaatattgtaacattgtctggcctcaccttgattacccctcacagtccctactccagcttcctgagtaggaaattttagacacaagtgtcggatagaggtaactgcgccaaagtccactagggccgatcggccgaggattgcgttgtaagcagttgggcagtctaccactacgaatgtgcagtatttaaaagttctcaggggtgtgtccggacacaaggtaactggcaacctcacttttcccattgggataagtgtggttccattgaatcccgtgagctgggaaccgcttggcgaaagatcctggtccgtgaggcctaccgccgtgaacgcttctttaaataataaattcacagaactcccattgttgatcaatattctagccacgatcttgttggcgatgggagtctctatgagcagagggtcatggtgaggaaaacacaccatctttgcgtcttcttccgtgaatgtaattggttgatccatgagtcgtggcctttgagctggaagctgagtaacttcccacacctcactgtgtttaacgaccccggcatagcactttagttcctttcgagtggtccctccaatatggggccctccagagatcatggccactcttccgttgggtctcggtggtaggccaggagtctactgaggtcctcccgagggtacggttggtgccagcgctccgggagcaccccctggcgtcccttggggcagaggtccccctgccagaaccgggttgagatgggg

SEQ ID NO: 85669 - DNA, 612 bp, Cannabis sativa
tttgttgcttgtaaagctgccaaatttttgaaccaaaaactaaattaattagcttttcattcataataagtatatgtgtgcaagaattgttgagaatttggaagtgttgtggagaaaatagaatagggtgaggtgtataataagatgtacatggtttccttttaatattaattgtcaataaatggaataggttcatgcaacttaattatggtattaagtttccactcatcaatgtgagactctcacaaaaattaaccctaggagtaggagttggtcaggtagtattaagaaagatattgggcctaactcaacttattaaaagaggattatcctcacataattaagtggatcaaacatatatctccagccaatgtgagattctaattggccccctcacatacaacatggactatgccaaacaacattgaacaaattgatatattattgggggcacccaacattgtaaaactaggccaactctaataccatattaggaatgttattgggcctagttcaaccaaaaaagcccgacttattagggagaatttccctcttaatgaccgagtacagggccgaccctgagtaataatgacttcaatttttttttttttt

SEQ ID NO: 85670 - DNA, 7664 bp, Cannabis sativa
  modified_base (7617)..(7619): a, c, t, g, unknown or other
ctcaagcaacaaaatataatcagcttaatcaaaatttttcttatacaaattgaataaacagaatataggcaactaatttaagaaaatctcaattatctcacacaacacaattgaaacccaaaaaatccataagaaaatgaatcaaaaagtattgctcaaactgaactaaccttatttgtcaacttgtcttctctttagaactcaaatctggagtaagcccattgcaattcaaaacctaattaaagtaaatcagaaaaataaattagaaaaatcaaaaggccatttctagggcacagaagaagaagaaaatgaagataaagaagaagaagatgatgatgatgaagaagatgagaagagttgtaaatactttctaggaagaagagatataacgctggaagatacctgattacactataggatagagagaacacattcagagaactcgttctcttttttttcgtttgagaatttttgttgagtttttaaaaattcagagaacatcattttgatgttttcagctttttgttttttttttaatccagtttttaaaaatgatttttaaaaattttagccaaacactatcaattagttttaaaaaactatttttagtttttaaaaagtgaaaacagtttttaaacttgaaagccaaacaagctctaaatagcccaaaaggatagcctgttagagcacaaacagtccaggcgggaatcgaagtatatgaggcggcgaaatagcaagctacgtaaacttcgatctcaattctcaaactcaccgataaagctttttgttcttttccttcctctgccatggacgacaaaaaagccgaacaattagaatcgaccgtagtttctaatccaatgcgaaaggttgatactcaaaacccaacaggtgtgttcagtcacattattacttaacattcataaatggttagttatacacatgtttgaattgaattttgacgattttaggtgccaaaaatggtgatgctaattcaagaaacctttacagcagtgttagtgatgctgaggtatgtattagtcttatcttttatttttgtttagtggtgttgttttattttatttttcatgttgatatgcaatttttgttaaatgttgttgttgggattgtcattttgattttgtaagaacaatgttgctatggctgaccaattattgttttagaaaattttaggattggtttgacaacatatttctttttcaatgccaaatggtccttcactaaatcgctttaaggttttctcttttttttcttaccaaaatatgtaaataaataaaataagctattttagttgttagatcatgctatgattacattgttgtgattaaaaactttgtaagttgttgaatgtgatgtttactaattttgattgcttttttttttttccgagatctttttcattgctttttaaagtcagttaattcatactgatttaagaaggattttgtgtcctaagattatggtccgggtttgttttcttattgaattatgtatgtagattcttctgcttcagttttctttttttttccctcaataaatgaatgttctaatgacaatactctctattttataggtttttagatatcttaacagcaataaggttgcatcttataaaagggtcatttgggaaacaatgaatatggactatcagaaggtaatgtctttggcagtttcattattgattcaagttttttttttcatatatatagtagattaaaacgtttgattgtgttgatgataagcctggttaatatgtgctgatgattagatggatttatagaatttatgcgctatagatgatggaaattgtttgaattttttaaagtggttccaggagaaaataattttactcccataatgttttctcatcaatacaatgcttttcatccatctatcaaaggcaggcaatatcatgatagaattatttcacatttaccattatactttatagatgcattccccttaaatagtttaaaatttgagttcttttcattaaaaaacttgttagtgataaagcaagccttctttattaaattttttgaaaaattgtagcccatacctacccctgaaatcaacttagttcagctactgttaccacaatacttttggaagcaatcgatgttctcaatgtccccataacatgaatttataatgtaccatgatggtacttgtatgcataacaaagtggcagggaaaatatttctcattagagcacttgatgtcttgttatgttatgtgttagttctataatgcctgataggtttcattttccctactcttactttattttgaagttgtcagaggtatggtcgtctcttttatccatattagattattcacttgacaaaatgaatggtatgccatagtgaatttgaaagcttactaaggaggaaggactgctgattgaaacaaatgatcaaattggataaaagaacaatttggatgttttggtagctattccaaaataagagttccatctcaggtttgaggtacaaagttactcatctttgaaatattgtacttctctctcataaaaatgtatacaataattgataaagaatttgacagttagagaaaaagtagaatatgttttgttttggtagttctttggagttcgccagttcccctttactagtagcataagtcaactgtctcctttctaatcttggagttattagttgatcccaaaatgcttaatgcaaacgtttgcttcattatcaagtcccaccacctttggattggctaatgtaattgtagtgacagaaacttgcaaatttgaatacacttaggaggaaaaattatacccaaccctaatcacccgtaatataatttttatcagcaaaaatttcataccaaaaagaatttttaagaatgataactgttgtttactggtcacttgataaccatccatttgagatttgaggtactaataatgagttacagggcattgatatcgagcatatatgacataacagttacaaaaaaaattcatctttctttgcatcttgtacattatctcacgtgaattttctgtgccagtgtccatttaattacttactacaaagaatgtcctgatttactagttagaagtctggaaaactcagctatgtatgctcaaactgctctgtgatgagttcttgttcttgatttcattgaatgtatttttcttccaactacgggtgtttagaaattggaatccacacttgccttcttcttcttctttattattttattttgaggtgatccagagtcatccttgaatgtcatttcttaatggcattacctgtctatatcttttagtgaatatgtaaaatccatctctctgatatattacaaaatatttgttctaaggttttgttagctttttttccaaggataggtgtgttcaaaacttcaaagttctttacagtttaaactttgcatgtactttattgtttaaccttttgaacaacataaaaataatgctaattcctctgtaactattaaatttggcaggggacgagccagaagcgagccaaaactgccaagaaagttgatccagctaaggttgttaaaccttcacagaaaaagaataatgagaaggtaacggatcatgttttcagtggatcagaaagatggtgcttttaatagattcttgtaggttattacttcttgatgaaattaaatagcaataagcaaaaagaaagccaaattagagtggttaacttagctatcaaatgaatatcataattcgcatgtttctcaagtagtgttttagatagaaggtaattatattgccattttcatgtatactgactgggtactgaagtatacaaatatttacttttgcagaaattgagttcaaagatcaattacgatatgttgaataaacttgagcaggtacgtacctctaacactgaaaactagggaacctcttttatacgtcaccaatgtcttattatacttaaaaaggtacacagttttggaaggggaaaggtgtccttacaaaacataaaatgaattcttattttttcttttaatagagattggatttaaaaggtgtatctgggcatagtttatggctgaatatgttttatagaaattacaatgattctgtagtaatttgatgtaggatactctaaattcagctgttaaattttttagttatatatcatattgtcaaatgtcatataggatcacgttcaagaaataggatttggagaaggcgggagaacgctggacaatgaaaaattcaactctgaagcttatagttcaggagagacaaataataatgacttcgaacatgaaaaactgggcagtgaagaagaaggcgatgccattcaagattactatgctattacagattatggaatggatgatgatggctatggtcattatgaagagcatgattatgaagaatactagtttgatttttttgtttcaaatgaatgcttatctgaattttataattttgtagtttttcttttcctgatggaactgcatcttggggtttttttttgttgactgaactgacctttcagttcaacaagggagctgcactgatgaaactgcagaaactccattggagcatgattagtttgggtttttagattttttgatattcctacattaaatatatagtaaatatagatgtataccgtttggttggttggataccgttggacacaccttgtaacaagttccacattatgtatgcaccaaagagactgatgttttgtcttaagattttttaacatgaacaattgtgaggtccttcaaaagattttggcctgttgttggtgaagtggacaaatgttgtatatctactagtcgtgtttttcttactaagtaaatatgattaacttttttataacagattctgcagatagagctggtagttctagtaaagttttaattacatcgaatgttcatgaaatttatacttaaaagacatttctacatattagcatatctaccacaatgactcgtcaatgtcatttgtaaagctaaattgacagtaacatgggaacgaacatttatcttacgacccatacactcaacacgttatacttcgattggcacgagacacttccaaatcaatgtgtgacccttgaatagtttagtcaattattagagtcatccattatgcttctaacggtaggacaaaacaagctgatcaatcaaccctccacattttgtccttcctagttagttctttgagttgctaaaaggcagtagtagcatgactggcatatcaccaacattaattaatagattggtaacacaatgagaaacaaggtaccaaattatcataggaagggccaactgacataatagtttttgttttcccttgaatgggttgaatattcaatataaatcaattcttccctcctctacaaacttctttatcggcttgtaacgaacaaagtacaacacattgggctccatttcaaaaggttcctctaacggtctctgatttccactaccaaaagcaaaactccagccagtaagtagaagtaataataagagccagagaaaaaaaggggaaaacgagctttagcacatatgagagatatatatgataactacctgtgatctggattcccatcatccatatcctcaagctgaatgtgtccaagataatacttggtcttacagacgacaaacacgtccaactgcggttttgggactgaaatttatataaaacaaatatgaaaataattaccatttgttttctgtaccaaaagtcatgttaggaaggtgatagatggacctcatggtaaagaactaactctgatatataccacatttctgttttgacatttataagataaagaaggcaccaaaatataacatccacagtcaggtactctccttttaacaaatttcccttcagatgatactatgatccaggcactagcaaatggcatagctgggataaagcatctcattatgctagcaaaacaatgtcatctgaacaatcactacagaaatgatggatcattttcagcatctaaaaagaatgagaattgtactgatgtaaactccattagcagattgagccactaagaggaaggctgtcagtaattgttctcaaagatgttactaaaatgagtgcagatattacatttatgtagataataaatcaggactgtaatataggagcctctctcaactatggaagaccaaatgttcctacatttgtagacataacaggcataggcaaacaggcgtatacaccaacaaaaaaaagataatatggcatcaataaagagtaaaaagaaatgaaattttttttattacccatgtcagtctcttcacttattattgattgttggagtatagactgataattttcgggtaaccttgagagaatactctcttcaagatgcatcttcaaatcatcacaacacctgcgaccgcaaaaatactttaaacatcaaaacaaatacttttctcactaaaagactttgaaagcttttacctttcagcaaatgatttctcttgttttgaaagacgattgaagaggtcagttgacttcacgatgtggaacatgtatttctcaatctgcattttttgaagaacttagtccatggaacaattaactgatccaaacctttttgcttcactatctatataatcggatatcgtcaaatttagcagggtactaatatgtcttacacattttttttctttttctttaataaatactacattttttttttcttggaggcacaaatatggacttaaatccaacccaggataaataaatacatgaataagcaacgactaccttttggagacgaatacgaaggtatgacctcaacaagaattgagttctgtccaaatccatctggtagagagatactgtcagcggatcgactccactctccacaaattcatctacagtctcttcctaaataacaagtataacattgaatgaagtaaagactggtttctgtttcaaaacccacaacactaagatcccccaattatttgcatagttactaaattacaatcaatatccggctaaatcaaccaaaatattatatatttatatatatgaagaaaaaagatgaaaaattgagagctagggtttaccatcaactggatttgttctctgattcgatcaatcaaagcagtctcgaactgaaaaatctccggagccgctttttcccgtcgccaaatcctcttcagatggtccacatccgtcatcgaaactaacgattcgtagtcgtcagtttctggaatacccgaacccgatccagaacccgacgccattgatagttaagaaccgaaatatttcttggttgttttcaaattttaataattaaatgtattcttctcttctactgaagtctgaactctacagagagagggcaggtgtttcagtttcgcgccaaaagtagagaaaaagggagacgggaatgtcatgattgcgcgcgcaaacaatgggatattaggacaaaaatgcccctcatttattgcacttacagatttttgtcccctaaattattttgtttggttatcggaaactataaaagactacactgaattctcttaaaagggatgtactgatgtaccttttcaacattcagaagaattttttagtctattttnnntttcatattcatgtacgttatagagtctattttacacgcgtataa

SEQ ID NO: 85671 - DNA, 542 bp, Cannabis sativa
tggtgttttttttttttttttttttttgattttttgacttaattgcttactggtttgttcatacttgtttttctctgacaaataatattttaatcataactaattatttgtgacaattttaaaattttaaaatttataaaaagtgacaatttaatgttgtcactaaaaatacatttagttacaacaattaatttttatgactaaaatctgtgaccaattgtcatttagttactaaattaatgtgttgtcactaataaccatcttttagtcacaactactatttttttgcaatattttttagtcacaactgttactttgtgactaaatgttttaaaagtaaaatttataatccctagcccctatttctcatctcagtcagtctcatctttctctccgtcgttctccgattccaccatcgatgttgcttcttctccaccaacattccacaatgcacgtttttgttggagatctggcttcactcgttggaccgatcttcattcgacatcggattctgcagactctgtgtcaacccgaaaggcgga

SEQ ID NO: 85672 - DNA, 606 bp, Cannabis sativa
ttatttttcctcttaaatagaaatttatttatttaaatagaaatatatttccttaaataaaaaatattctttatttttttcttctctttcttgttatagtgatatcatcatcatcatcatcatcatgacgtcatcaatggtgggaggtgtttttcatgatgataatgacataattttgaaactacgtgatgcattaatccatcacattctctcgtttctaccaactgaagatgtggttcgaacatgcattctttcaaagcgttggaaactcatatggtattcaattccacactctttttcttcgaaaaggttaagtatgtcattacttggagacaagacctagaaacattttacgattatgtctataattatttggaaaatcgcaagaaaggtatggatcttgttgttgatttgagcataactactcttaagtttaacatgcctagtatatatatatatatactaataaattttatgagttgataaacataaaaatgaaaaaaaaaaaaaaaaaagtaaccctcacctcttcacccttttctctcgagcaaaaaaaaatcaccacacaccattccttttgttggaatttattttactaggatctta

SEQ ID NO: 85673 - DNA, 1117 bp, Cannabis sativa
cagatgacctgctgcaaagaatactatcgggggagtcaatgatgttgaatttataaagtctttcccgagttttcaaccggttttgcacagccaaccaaatcaagaaactgtgtttaagagaattaagactattccagacctcatttctccaaaaaactctgtcaaacacaggagcaaaccagcaataaccattgctgatttgataatttacagcagtaaattgttgtggctgctacacttgcttgattttgttctatatttccaccattttcctccaataccagctgctggttgtgggagcattgtactcccaccaatcttgttttttgatgtacacacaatgcacccatttaacccataaattgtcttttttattggctacagcccaaacatgcttagacatggctgctatgttccatgaggcaatattcattatgccaagagccccctctttcttaggagtgcagattttctcccaagaaatgcttccagcccctgccatcatatctttcccagtccacaagaaacttctacatatggcttctatctcttttattactttccttggaagtatcatcatttgactccagtaaatatgaattggaataaggactgagtttacaagaactaatctgccagcaaaagataggtttcgtgttccccataccttgattcaggcagccattttttgagctagacaactgccatcggatgcattgatcttccttgcacatatggggactccaaggtatttgaacgggtcattttgtctagtaaaactagacatatctaatattctttggatctctctatctgtcatgcctgagcaatacacagctaatttctccttattaacattcaagcctgaagtaagagagaaaagcaaaaggccttgcattaagaaatacacactcttgaaatcacctttgcaaaataagagaatatcatccgcgaagttaagatgattaagcctcatttcaccacatctttcatggaagtgaaattcctctttcttccccaccttgatcaggattctatttaggtactccatacataaaacaaaaagtaagggagacatcgggtctccttgcctcaaaccccttttagcttcaaaaaa

SEQ ID NO: 85674 - DNA, 1280 bp, Cannabis sativa
  modified_base (1105)..(1114): a, c, t, g, unknown or other
gatatttatcttaataaaatttattttttttgctaaaatgacatgctattttttaaataattggttaattttgtttgattagatattttacagttttctaatcataaaattttcaaatttaggatattttattttatttatttttaaaaattaataatatcacaaccatccaaaactatcctattttcaaatttgtttatttttttaaatttaatttattaaattataagatttgaaatataacattagaaatatctgaatttttaaattaaaatattatgttatattatcttattagttatttaattaatttaaattatttaaataaactatatatttgaaaattagttggatacttgaatttcaaatttaaatttaagatattttgggagttttgttagatttcaatattttttaaaaatattttgtaacaacctaatttgattcaagttaagatatattttaattatttcattttaaaatagaaatatcttaacctactttccggatattgttacattgtttgtttgtttatttaaattatttattcaaaactctttctaacaaacctattatttattcgatctaaattgttatgattaacttgttgacagatctaatgatctgattttgattatagtctaattgtgaatagatcaaataaataatttgtaacaggtacatttttttaatttctttcatctatgattaacctagtaacatgatagggcacatccaaatcagtttgtatgtatgagcctatatgtttgtttgggattagatgcatatagaaagcccatttaattctaaatatttaaatagattaggttgctaaaaataaaatatcaccttgatagttttagttaggcccaattagtattgggcttattcaattaataacaattatttaatgaaaggttaaattcctttcttttgggccttatgttagagttagggggccaatagtaatgtgtacgacatactggacccggttctccctcacatgaataaccttaattgtgaaggcccatttaccttatttaaataattgtattaggctaattataatttttgaaagtaggctaattatattagtttaacctannnnnnnnnnaattagcaacataattaattttgagataaataaaattaatttttcattagattatttgaaaattaatttagaaaaatacatttagtttaaaaaaaaaaagattatagatagtaatttcaagtaactaatttatattttttaatatttagttaagtagaaaaatata

SEQ ID NO: 85675 - DNA, 583 bp, Cannabis sativa
atttggaatagtttgtgaaagtaatgtgtagttattgtatttacttttcttgttgagctttatgatttatgggtgttatgtggtgtaagtaaaaggaaagagaagttaggtcagtcataagtcatcggtcttcttgaaaaaatgtgcatatcgacctatctggtttgcgatactgccttgtcaaaagatgttttggcactatatctgtacgtataatattttagatataaactttgtactggatttttagtaaaacttttgcaatagaagttccacgaaacaaaatatttgtcgatgtaaccctttcagtttaaagtgaatttaataaaattttactttcataaaaaaatattaattaaatcgttagtttattattataaactaatttattaaaaaaaaacacacatgacgtccctaggggttagggcattacaggttagggtcgagaaaattaaataatgatccaaaataggtcgacattacttgacacgaaataaaaacaggtcaaatacgacacgaacagagatacccgacacatgacctagaattagctgcagtagtttttgcactaaaaatttggcgt

SEQ ID NO: 85676 - DNA, 661 bp, Cannabis sativa
tcttctaggctgaacaacatctccctgaccgaagtggttcgaccttgttaagttggtgagctgaactcacgtggaactagccagcgtgatgttaccagtgggctgaattgctatcatgctcgggctgaattacataaggcactattttttgtaagaaaattacatttttatgtttaatgaatttttttttacatttttatggtttttcgtaaaaacaataaaaaaataataagaaaactacataaaagtaacatctaaataaaatcaaaacaacaataaaaaataatatacatataacaaaaaatcaacatcaaattaacatgaatacaacattaaaaaacagtattttctgttaataaaatcaaaaaattcgtaaaaatatttaaaattccgtgaaaaaccgtatttttgtaatttctttattgtttttgtgtatttgtaaaattatcccttttagaattggacatgttaccaccccataaacacagataagaatatatatgtatatatttatttatatgcatttgtgtaggctatgtatttagtgttgacaatattaacattattgggttggagagaggagctaggtagggttttgtgcattgtgataatattaacacaaaaataggaaccttaattaactagtagtgagtagtattat

SEQ ID NO: 85677 - DNA, 609 bp, Cannabis sativa
tttgcaatacttaccttgtaatatttgtaatcaaaagtgtgattttcttgagtgtttatgtgtgaggtttagtttagtctacatttgcagtgtgtacaattagctttaagtggtcatgagaagaagaatagaagatctcaccattgctagttgctacactgtagtatagggcctccacttgtatttaacttagggaaaattacatttacaaacgacatttttctctaatttacagaattatcgttgctcatttaactttacaaaaataacgtggggagtcaatacaataccttctctcatcattgtcagcgcactttttttttcttctgtttttcttttctttcttttttctcttaatcttctttgtatgtatactgtaacttatttgttttattttataattcttttttatctttatctcttttttaattttttttaatatttttttgactatataaataattgtttgagattaaaaattaaactgtgatgtctaatttttcgaaatagaaaatgataaaattaaaagtatatgattagttttttttttttttctttttggtaaacaaaaaagaaatcatcaacccaagcaaaatttaatataccaaa

SEQ ID NO: 85678 - DNA, 520 bp, Cannabis sativa
  modified_base (269)..(274): a, c, t, g, unknown or other
tttttcattccatttaatttcttacctccaactaaacgtgactaagagtatttccaataaagtattacaaaaataatatattgtcaattttaaaaatattttgataaaaataagttctaatagtggtgtaaaatatgtgctaaatttaattaatcctaaaaattgtgtaaattattggaacttatttaggatgatgcaattagggttttttttttaatttttattgggtagcttatagtaatatatattttttatattgtaaattattnnnnnntttttaaaattttgtagaatatttaaaataactataatgtaatgtatatgaatatgaaagaaaaaataggttaaaaaatttttttggataccgaaataaataaaaggtgcaaaaaaaaatacatccctttttaaaaaaaatgtattctaaaatcagtcaatatgataatcggttaaattagtaataaccatgcaactaccttatatatcgttcatcaaaaaagaaagtttccaagaaaatggacaa

SEQ ID NO: 85679 - DNA, 1389 bp, Cannabis sativa
aactgctgccacttgtacacttattaactactaacagtatttacatcccccctcaaactaaatggtgtagaaaccatttttagtttggatttaaggtacaagaaccgatctgtagtgagagactttgtgagtaagtcagcagcttgatctagagcatgtacatatctgacaaagagttgtttatccagtatttgatcacgcacgaagtgaagatctaattcaatgtgtttagaacgagcgtgaaagacaggattggcggccaaggcagtggcactctggttatcaacccagataacaggaggctgactgagatgaatctgaagttcactaagtaatgaacgaacccatttgagctcagcagcagcatttgctaacgcacgaaactcgctttcagtgctagagcgagcgacaacattctgtttcttggcagaccaactgatcaagttgtcacccaagaatattaggtagccgcctgttgatcgacgatcatcaatagaggatgcccagtcagcatcagagtaagcacagagttgtaagctagaagcaggccgaagatgaatcccttctttgatggtgcctttgagatatcttaagagccttttgcatgcatcccagtgaaccgaagtgggggcttgtaaaaattgagacaacttgttcacaataaatgcaacatcaggacgagttaaggacaaatactgtaaggcaccgattgtgcttcgatacaaggtaatatcagaaaaaggttctccctcatgtagggacagtttgatggtagcactagctggattaggacaggcttttgctccttccatgtttctttcaactaaaagatcagtaaatgtacttggtttgagacaagtacatacctgtattgtcacggtaaatctccacccctaagaaatagtgaacctgcccaagatcttttaaggcaaaactcttgtttaagtcagcaataagcttttgaataagcaaggagttaggccctgtgacaagaatgtcatcaacgtataccagaaagatcactatattgtctccagagccatatgtaaacagagagctatcagctcttgacccctgaaatccccatgatacaagtgtttgtctcaatttgtcgttccaggcacgaggggcctgtttgaggccgtaaagtgcctttttcaattggcatacataagtgggatgatctttatcttcaaacccaggaggctggctcatgtagactgtctcggtcagagaaccatttagaaacgcattagtaacatcaagttgggagacattccaattgtttgagacagctagagatagaacagtccgaaccgttgttggtttaacaactggactaaaggtttcgtcgtagtcgatgccagcttcttgaagatatccctttgc

SEQ ID NO: 85680 - DNA, 696 bp, Cannabis sativa
aaaacttaaaatatagtctgttagtaacaactaaatgtaaacagaagcatggccttttgaatgcattacataaatgtcaatatcttatgtaaacgcaaattaaactttacacgaagtcattataaatatatatatagagagattatgcattagctctatatatatttattgtccaacgattgatgatataattctgaattagccaaaacacactttgagtgatatatgtacattttcatgatgatgagcagatcaagagtaccacaaatggtcgtgctttttctgcttttgattattatctcgatagtagtaaattcaggagcagttggagagccaaaaatcagatgcaatgaagccgaaagattagctttgttaacaatcaaagaccatctttacgaccatgaagatggggatgttctttcctcttggggagaagaagaagagagaagagagtgttgtgaatggattgggattaagtgcaacaacaacaataatcatgttaccaaacttgatctttctccttcaacttttgatagttttcgccttctaggaggtaatatcagctcttcattgcttgacttaaagtatttgaatcatctggacttgagtagcatccactttggtgagaattccattccaactttcattggcagtctcagcaaactaaggtacctcaatctctcttctactggacta

SEQ ID NO: 85681 - DNA, 729 bp, Cannabis sativa
tcccatagaaaactatgagcattttgtggataccatgatgtatggaaaaaaatcattgactcttgaagaggttcaaaatgctctaatgtcaaaagaattaaagaaaaaatcagagcaaaaggatgacatgaatgatgatggactatttgttcgaggaaagaattacaagaagggaaacaaagaacacacgaggaaaggcaagaatcaaggaaagtcagactcaaagttcaagagaaagtgttttgtcagcaacaaaactactcatcttaggaaagactgtcatatcctcaagaactataaacagaaacaatcattaggtgatgctgatctagtttctgactgtgatagtgatggacatggaagtgcaggggtattggtagtgtctaaagaaagcttaagaactggttgggcactcgattctgggtgttcttttcacatctgcccagaacagtcctaattcagtaattataagaagattaatggaggcactgtcaggcttggtgacaacaggtcatgccccataactggcataggcactatcaagttacaattaaagggtggaggaactgcataattgaagcatgtcatgcatgttctacaaataaaaaggaatttaatcactgtggctatgttggatcaggagggctattctgtgaaaattgaaaatggcatgatgaaaattgtcaaaggatcaatgttgataaagaaaggttccaaagagaataaaat

SEQ ID NO: 85682 - DNA, 871 bp, Cannabis sativa
attgaaaagtaaaaacagttttatcaaacatgtttttgaaaaatattttcacttttctacttttaaaaacagaaaactgattaaaaaaatgttaccaaacgccaccttgattttttttttaagtattagtgtgtacttatgggtgcaactaaattttccaagaaataattgattgttgttttattatgaattatcatgttcataacgatcaaaaatataaataatttatttatataaaaaagaaatacttattaaaatctacaaattactttatcttttttatttgttcagaaaaattataataaatataaataaaaaatatcttgagattattaatttaaatgtaattagatttttatttatgttaactaactattttttaaattataaaagaaaaataaagaatattttaaactataaccataaatttagttatttttcaaagtgtaggtggttaatactatattttaattgtattttttattggttattctatcatgatgcggtgacgtaacatcttaaaatcgatttaaagtcatttattttttttccttaattttctcattttttatttattttattaagtttataaattacttaaaacttaattatttattattttctccgattttctctctttttattctattttctaataaaaaattaaatatctaagttataaatattaactcattaaaaaaaaaaactttcgtgccattgaatgaaaaatctaaaacaacatactgaattcattgtagaccacttttttagatgattttttcttttgaaaaatatgtctattggcactctttttattaaaatttatatcatggttgtatcatagatacaagaaaagagtaaattttttgtg

SEQ ID NO: 85683 - DNA, 1253 bp, Cannabis sativa
tagaaagatcatggaataaacctaggaagcaatggcatatgcttagagtaggagttacatctatggatagacttttctctttaccactaatataattcttctccacttttaattggttgggtctgtaagtatcgaagcttttggtcgttttcaagaatatgagatttttgttcatatatattttcagctgagaaggggagaaaagcagctgtacaaggagaacgacaaatatatgcttgtagcttattgtccaattgacaataaaggtccttaattataagtggtatatccattcatatattgaaatattcctgtcctttctttttgtgtattataagcctttaaatatttttacgtatatttgattgtaggttcactataagaaatgtcacttttgatagcgcagtttataattgcgctggcaaaagtcatttttcccagtacatctcgcgaattgtgctggtaaaagaatcataattttaccagcgcatatttatgctggcaaaacatatttttactatcgcaactcatatttgcgctggcatagcaagtcttataaacacaattcccataatactttttaccagcacaaaagtgtgcgcgctggtaaaaatgacttttgttagcgcattcatgtaatgcactggcaaaagtcactcggcctgaccctattctgaagcataaaaagattactttctcaacgtgggcttattgtggctgcctaattaaaaaatgaatgggacttttagcatgtgcgatttttctatttttttagtccttcaatggctatataaggagtgaacttcagttgatttcgtcaagcaattcacaaggaaataaaaggcaaaaaaatgggtacgaatttcagagactgaatcaaatactggaggcattctacaaagggttttcaacattcttttcttctttatttttttctcttttcttcagttaatatgtgtgattttgctataatgaatatgagtagctaaagacttaattagggtctagatggatattggttgacattgctttatggttctaatatgattttattttcccttaatctctatgtattctatttaccttgtacttaattacttttaatttcctgatcaccaattaactgtctatgattttgatgcgagactgagaagtgagtgtgaattatgctattgtgaaattgaactaaatttcgatataggacgagagtacctgcatggtttagatagcttatagggtttctgtgtttaatg

SEQ ID NO: 85684 - DNA, 785 bp, Cannabis sativa
atagaaatctccacttgcaaaagaattattgaggtatatatatatatatattttttttttttgtgattttatttggttattttgtttggtagttttattgtggttttacaattgttttaggtaattttttatgttattgttttaggtttgaaatcttaaatgcttacactctgactggaataatagttgttttttggctgttctagtgttgctctggtaattcggaccgtaggtgttgcaaatggaggcttcgtatgtgttttggagtgtatacaatataaaagaaaaaaattaagatgaggatagtatttttgtaaaaattttcgtatggcagtataaatgtaaaagtgctcccaaaatttaatatttttgtaagtagtcctttttttggtggcaaaatccctttaatttgattttttttttgtaaatttgaggcgtcagttaaatattattattaaatactaactgaataaatatataaataaaatttcaaagctaatacagtaataatctaatagtatttaaaggtgatatccagctagcacttaaatttagaaagagaaataagcataaaaagattttacaacaacaaaaaaaaaaagataaaaaagataattatataaaattaaaacatgatagtaatagaaatcgtcccctttcaaatgaaatagaaatcctattagaaatagtaagactcctatcctatttcaaatcgaaataggaaagtaatcttatcttttataggcttataaatacagttacaaatcacaaatcacaaatcacaa

SEQ ID NO: 85685 - DNA, 702 bp, Cannabis sativa
ttattattactcatgatcaatattcatatcatgcaaataattaattctgattttcaagagtgtttctagacaggttatatatatatttataatgagaagctataattatgaacacacgtcgtgcaatggtcggcagaattagattttcactaatattatttatcactattaattagcttaacatatatatatatatatatttatatatacagatacaatatatatacaaattaagatctagatgtacgcgtaaaggcatcgctttcttctcatccttcactatatttatatttgaattattaatttatagatacttgttaatatatataattaattaaatacgatatggtctaatttatcattcatattgtcgacgcacggaggttttttactaacaaaatattatttcgagaactaatggaaagtataagtgatgagcaaatataatgacacaagacaagacagtaataatcaacattataattctacaatgaatgtataaattgtgttcaaaagagaaaacaaaagacaaacacatgagtagtagagtacatcttatttaaaatatccaaattctatagtcacatataaatttaatacaacaaattaaaatatggacaattttttaaaacactttttttttttacttatttacaattttacaagataaatttttttggattttttttttatttttacact

SEQ ID NO: 85686 - DNA, 686 bp, Cannabis sativa
ctcgttgagtactttcttctcttcaagttgatcgactatgggttctggatcgcctcgaagtcacacttgcttcttcacgctctgttctttcctcccgagagcggtttgctgtatttcccccattagggtctgtacgagtcctcgctttatgggtttgggaagaacgttggtgacttctagtaatgatttctgttctctcgattgaatcccaagatcctcctcattttcatgagggatttgtcgttcatcattttccagttgtctcccatctagctactcgtcctgatttttagggggtgtctcattctccctaggttgttcttcctgggtcttttcctgtctcctggttccagagccacgaggtctggctcatggtcttctaactcaaggttcaggatgattttgagcgttcctcccctgtgtcgccctggccgaggctgcctctcgttctaactcagcttttcaacactgcgcctcttccagacggcatctcaggtggtggctttctgtttcataagttctttctcccatagattgggaacctccacgattgagctcttcatcacgcatcccgggattcttaacattcccacgttgagttctcctcgagcatgttttccgcgtactaggaccaacgtcaggtttagttctccaaggatgtgtggtccgagcactgggaccatcct

SEQ ID NO: 85687 - DNA, 1128 bp, Cannabis sativa
ttaccaggtcgtctatgtgcccccaagcgtttctggatttgtccagcatatcatccacgtacacttccatatttcgcctgatctggtctttaaacattttgtttaccaatctttagtacatagctcaagcattttttagaccaaacgacatgaccttgtagcaatatagacccatatttgttcgaaaacttgtatgttcttggtctggtggatgcattttgatttgattgtagctaagcatccatgaagcttaatagttcgtgccctgctgttgcatctacgagctgatcgattcttggaagtttaaaacagtctaatgtagtgttgagaagttacttttagtaacggtcttgttggaaaagtcatagggataggaactcttaattatgaagggcttcctagactgaaggatgtcatcttggttgatggactaaaagctaaccttcgtagcattagtcaaatttctgatcaagattatactctaagctttgatagtaatcattgttatgtgtataatattcttgatgaaattttcttgcaagggctcagatctagtgacaattgttatactctcactatgtatcctacttgtcattgtgtcattgataatactactgatttttggcataaatcatattcattttaaaaatctgagaggattgtctaatgtaggaattgtttgaggattacctaaattaggtaaggagtctttaggaaaatatggaccatgtcagcttggtaagtaacaaaaaatttcttacaagagtgttcgagatgtgaatacttccagagttcgcgaactcctgcacatggacgtaatgggtccaatccaagttgaaagcttgaatggtaagaggtatacttatgtgtgtgtgtgtgtgttgatgatttttctcaattttcatgggtgggttttttgagagaaaaatgtgatacttttgaagcttttaaatccttctgtttgaaattaagagttgataaaaattgtaacattggtaattttgtttggattaggagtcatcatggaaatgaatttcaaaatactatttatgatgagttttgtaaatctaatggtatttctcatgaattttctgctcctaaaactcctgaacaaaatggagtggttga

SEQ ID NO: 85688 - DNA, 763 bp, Cannabis sativa
atgactttctaagcaaatattttcacttttggtgggatttgcaatgcccaaaagaatttccaccaggttttgtagtcatctgaagacgattcctggtccttctccgagatagagttcgcaaggtgaaagcctgatttaacattgtataagccatttgtgttatgatgccatataagccgatcatttgactggtaaaaactcaaagggatagtgaggattcggtcaatgtcaatttgagcaaagtcttcatgtagtagaggcaaattccattccatagtatcaagaatgtaagtcgatacaggcgtagatggatcactagtatagtaaattggcttgaactcatcatgtcctgggatccaaggatcgagcccacttctgacatgaaagccattaccaatcttgtatctaagacccttaagaagtagctatcggccccagtgtattccttgccatgttaaaaatggtgagtgacctttgtgagcttccaaaaaagagtttattgggtagtatctgtgcttcaaaagtcgacctaatagtgagttcggattgtcgaataacttccatgcttgttttgcaagcatagcttgattaaaatcaacaaaagatcggaagcccattccaccttcaaactttgatttacagagtaatttccatcttttccaatgtatcttggatccatctttgttagtgccccaccaaaaattggccatcatagattcaatttgattgtagaaacccattggcaagcgaaaacaactcatgg

SEQ ID NO: 85689 - DNA, 677 bp, Cannabis sativa
aaattaggtagatacattaggtaacatagttattgttcatatgttaaattggcataaagttcaccaaattacaacaaaaagcttccatcatgaatccctaaatattagcattagctgagagcccagcatcattatctctttgcctttgcttcatcaacctttcctttttttcttcgttggatcagttggattggcagatggtggtctccccttttcatttggctgagcaggttgtaaacgtaaataattagttagacatatattaatccaaacattaattgaattgaaaacctgatgtattacttagttttacatttctaagcataataacagaaaaatgcaagtgtgagacactgcatttttgcaactcttttaatagtggtcagcaaagcaataaggaacctgcactaacttagattcatgactctaacagctatagggttataacaagttggaaccaataatttgattgttcaactgatactaaaaaaaatggatcaccataaatgacaaaagtcttaatttgcataaatgagaaaaactaacctgtgtagttggatattttaacacttttttgcattgtggccacgaacaccacacctactgcatttgtgaacttgtccaaatcttcttaaagtggttgcatttgctgttggtggttcatccacatctctcct

SEQ ID NO: 85690 - DNA, 529 bp, Cannabis sativa
tacttagtaccattatacctaataagaatgctcatttttatattatgtggacatcaaaattttaataaaagttatagaattaacaataagatatattgatacataattatgaaaaaataacttttaatgtaatcccattttacattaattactaagttcaaaccaagcaatgataaaaaatacaagcttgtgtccttgaactttaagattatcattattactacaccaaacaacattaattaattatatttgactagactagtatttgaataaagtactaaatttttatatttaattataaaccccaaataatttagaattgatcacaattttagataagtcgattgtcttatttaggcttcaaatgactccctccttaattatgaggtggcgtcttataaatagttaataatattttataaaaattattacattaaattatataaataccgatatttaattacactgtgacacttttgagtggtgctttagtgtatagaggtgcatgtaaaaaaaaaaaaaaaaagaa

SEQ ID NO: 85691 - DNA, 847 bp, Cannabis sativa
tttattttcatagtgagaacgtgaactaattatttatataaattactaaatatgtctataaattaaaatgtgcaccaataactgtatatatatatatgatttaattattatatattttaacagttttgactgattgattaattatggtctacatatatatataataacaatatatattaatcattattaggattctgatctgtgatatgatctctcatataattcagtgacaatatatcttattataatatatataaacacaatatatattcatgaattaatgaggtctcatcaaatgatatatatattttctgaattttcacactacgaatttattaataaataattaattctctatgatctaataatttcatttttttccatacccaataggttacacctagcattttaaaataatatataatatatattacaaactattataattaatcttcaaacaaaagtatataacacattcaattgttcacactatatatatacatcaatacatgtggtccccctataaatatatatatatatttactatataataatagtgtaaaaaaagagtaagacttaacctaatgtcataaaatctggcatggaaggtttattggaaccttgctggcattctcatagaagacaacttcaattaatacacaacctataaagttactcttatatatattcctaacatatatatatataaaaattgctaaaaattatatattattagtgcttaatattttttttttgtatcttgctcctatcgggataaatctgactcaaaaaattattttacaaaaatataaaaatataaaaatatagttttacggaattttaaata

SEQ ID NO: 85692 - DNA, 963 bp, Cannabis sativa
aactctaattgatgttccgattgggctctcgatggacatacctcggttaaaggaaagtctcccctttgcctttggctcgggtaaaaattcaatccccaaagagctagcaaagaagaaaagtggcggtgaagaaagatgcaaagaaaagaaagggcggaaaagatgacaaaccgattgaattttctcagaatggagatttgacaatcactcaaaatgtggaagaggcgaaccctgcgagccagggtcgcctgcagccatgaatgccttattgtggaacgttcaagggatggggaacccttggacggtccgtactttgaagtcccttgtgcagcgttggtgtccggagttggttttcatatcggaatctagactaaataagatgcgagcagaaaatttgcgtgttgctttgggttttgttggttgctttgcggtggaggctaaaggtaaaagtggcgggcttgtgctaatgtggtccgataagataacttgcaatattctttcgttctcctctttccatattgattctttcattcggaaagaggaggaccaagggtggcggttcacaggcttctatggagacccggatccaagtaaacgaggcaattcttggacacttctcaatagagtcggcagaatgtataggggccgtggctgattgggggagattttaatgagattctaaggcaaaaagagaaaaagggaggacaaccaaaaccgagatatctcatgaacaatttcagaaaagctctagatgattgttatcttcgggaaatggagtttgaagggaatttgtttacttggtgtaatgggagacaagacaaccttatctttgagagattagatagagcttgtggaaattctgactggtttgatatgtttcctgcagcaaaagtttttcatcttgaacgaatcagctccgatcattgcccgttattactcacttgtgctcaacaacaactggat

SEQ ID NO: 85693 - DNA, 834 bp, Cannabis sativa
ttatgaaattctaaaacttggtgaccaaaattggagacctctacaacccgatttccgaaaagggcaacccgtactcaagttcaaagacaaagatagttaaaaacaagttcaattgctataaagagaccaaccaaacaaacttgttaaattctgtacataaaaccagaaaatttaaagcaaaatatatagaaactaaaactttaccaaaaataatataaaatttaatacgtcagcttaatgtttgaaagctcatatcaaaaaatatgaaatacaaaaattcaactctatgtttgcaagtttacatacataattaataattacataaatatgttctggttttagaaactaaaattattgaccaaaacctaacgtacacgaagcaacatatagcaatccctactattcttatttcaatctctagaaataatggtaactgagataaccataattgaagtgacattaaagaaactatgtatgattatacttacccaattcaaggattgatatttagagtgtaagacataactgaaaaaaacagcaaaaataaatatagatcctagtatatctaaataagtcacatacacaccaaaaataaagaatttactagagaaaaataatacttacaggaacttgaaaatgataccatgatcaacaattccccatcaattttatcaaggctctctgcaactttttctgcaatacagttttatagatcaacaaaatcaaatacttcaaatgtactaacatgtaacgtaccttgttgttgtgaactaatctctaaatcaaaagtaacgtacgttgttgttgtggagttcgaacttgactttgagcttg

SEQ ID NO: 85694 - DNA, 1256 bp, Cannabis sativa
  modified_base (679)..(679): a, c, t, g, unknown or other
tcgcatttgtgtcctattggataaactgttccttcataagttgctagtaatgtttttttgtgtagtaatctgagcagagttgtataggtccatgttcatctcctttaacacgaccacaatatatacatagggtatttcatcaattttgaacctgttgcacgtgcatgttctctctttgagtttcactgtcaatgattctttgattttggacctcaaacaaataatcagtggttgattttacctatgttaattgaaacaaagatttattatacatagagaacaactgtgggagaacactagaataatgctaaaaaaatccttatagccccataattattatgtttaccaatttgaactccataatctaaatctcacatttaggtttaatgaatatgtgtagctttttagtagcatttgttctgtagattgtgcgaatgtaaatatattttgtacttttgtcctattattatgtgtccattattacactaatgctcttaagtattccaatagtgttgtaattattatattatttgttataatataatatagattaaaatatttatatgtgacatattgtatattaatatgagattaataaatattatgtgtttgaggttgtattatgacatatattgtataataatacacataaatgttgtaacatatgaggagttacaantctgaaaatagattgtaacttaaggatcacaattgataatatgtgagttattacacatggaagttatgtaattaatgggataagtttctaggtattagaaactgttacaatactcaattaaaacacttaaatgggtattgggacgttggggaaagatttaacttggagaggagttacattttgagctctcaggaaacagttgttaaatggttgtttttatgttgttttatggttgttttacaaacacctagaaccagtttttgaaaacgttcataaacgtacataaattaattgagcatgtttctagctctcttgtgtaacgtttttataccattaaataccaattaaagtgttggtaaaagccatgtgatgaaataatttgattttcaaatgtgatcctcaaaacactataaatagacgtcttgggttcactttgggaaaaaaagagaacaagtttcgatcaagagagcacattgctagaaatactataggcttgataaatctagaaagctatttccattcttttcttttccctaagtgcttttggtaggaagaaataagcttgtggacaaaggtg

SEQ ID NO: 85695 - DNA, 751 bp, Cannabis sativa
cagtcaggtggggcgattcttggtattggctcgctgaggaaaacggtttctactctgtccgtagtgcgtataaactgcttcaagaccaaaaacaccattcggacatcccccagggctctcagttttggaaaagaatgtgggatttgaaagtcccaccgaagaccaaggacctggtttggagagcggcttcaaattgtcttgcaaccaaggctaatctttgcatcaaaaaagttttggttgataacacttgccccatgtgtggtgtctacgcggaaacggaagtgcatcttcttgtttcttgtccgtttgcttgggcgtgttgggagttctcgggcctctctactgttggcagagagtctccttctttgctgtcatggctggaagcttcggccaacagagtagacaaggaggtcttgggcaaaattgtagtgctttgttgggcaatttggtcagctagaaatgatttaatatggcagcagcgtgttcgttctgttcaggatgtggtcgtgttcgccaactcgagtcttaatcaatttctcaaagctcaagatagggagaatatccctttgctgtctcctcttaaagcaggtgacggttcggagcattggatcaaaccggtttcaagtattaagctcaatgttgacgcagccactttcaatcgggattctaagcatggctatgggtatgtggtgaggaactcgaatggggatttgatctcagtctttgctggctgcaacaacggaaaagtctc

SEQ ID NO: 85696 - DNA, 943 bp, Cannabis sativa
agggcataaaacccaacatcgattgcttcaactcaaaggccaattttttcatgtgaacaaaggaaatctttccatatctgagtatgtcgaaaaagttcagacaatagctgatgcgctcactgtggctagagctccagttcaagatcaagatcttgttctacaggttctaaatgggttaggtactgactttgactctgtggtctctgggatcacagcaagaagcgacaatctcaccatcgatgaagttcaagccttgttactctcgcatgaaagccgattggaacatcatcatcaaatgaacgatctgtctatgaaaatgcaagccaatcttgctttcggctcaggaaggtcaggtggtgttcgaccatattcctcaatcagatatggaaactaagaaaccccctctcaatatcaaggtcgtggaagaggatactctcgttttcccccaaacaaagtcatttgtcaagtatgcttaaaaagtggccatactgctcctgtttgccgttacagattcgacaagaattggcaagttcccaaactaggtgtcaacaatcctcgtgcttatctcactgaacaagactttgactatgatcctatggctcaagattttggagatgattgtcaacggtttgctgacacaagagctactcatcatgttacctcgaatggcactcagttagatcaatctgtcccttacaatggcactgagagtttggttgttggagatggtaagaaaatcatgatttctcatacaggttcaaccttcttgccttactcttctctagctttaaagtctgttcttcatgttccccaaattactaagaatttagttagtatttccaagttaacagatgataataatattttccttgaatttcagaaacattgttattttgtgaaggacaagcaaacggggctttgcttctcaaaggaaaacgtaaac

SEQ ID NO: 85697 - DNA, 983 bp, Cannabis sativa
aaaattttgagtttttatgattaatttttttatttaattagaaaaatttcttatttttacattatatgggctcaaatttgtccatcatcagctaaaaaaaataataacaaaaaaaaagtttttcaacaaaaaagtgataaaaaaagttgaatttgacttaaatatttttttatataaatttatttttgatattttgtaaaaataggtattttttatatttcttctttaattaagtagctaaattaagcataaaaattcaaaactttcttttattattcactatcggaccaaaatctaatggtttaatatttttaaaattaatatttaaagttaaatttgtttaaatgggtaatatacccattaagaagttttccatatacacataatactatatataaaaaccatataaatatgtaataacttaatagagatagatcgacaaaatataaatacatataatatatatactaggttaatgttatgtgtgcaatacacgtataattggtttttttttaattagatttaattaggtgatgttaagtgttatgtttaatttttttaattaaataatatttatttttttaatttttgaattgagatttgagactataatttttgagattttttaactatagtagcaatattagtgtatatatgcctcctatcaataattagtacttttgatatacaagttcgacttaccttacaaatatagtttgacttataatactttcgatttcgatattaaaacttaatttacataaattatattttaagatcatgtgcctttaaaaaatcatgagaaatgtatcgattgataaaatcataaaaattattaggtttcactccacttatatatattgattgaaaaaaaagaaagaaaataaataatataagcacattaaatatgaccagaagactgatataaaatattgataattaaaaatgggaattacccatatattgttttcttaacttttttt

SEQ ID NO: 85698 - DNA, 869 bp, Cannabis sativa
gatacttagtattttctttggtgccatactgttattagtgtaattaaataccaggtagtttttagaaaatattactaatcaatcgtgggatgccacgtataaaaagtaatgaataccataaaagacactaggacaggccttgaaatttagtgggtcatacgaaaataatttattttggggaaattacattgtatatccactttactttatttgttttgatttttacctttattttcattttctttaagatatacccactttttatagataatgtctctattataccttttaagttaatgtaaattatatgctagacttaagtggaagatggggtatatttggcaactcactcacaaaagtaagtatattttaatgaaatataatataagggaatttttgattaatggacacaaaaaaaagatatttttcaacttattccatttatttttgggttcttattaaaaaatgtgatatttttaaaactcagtaaaaatatatatgtaattttaaaagaagaaaatatttttcgatacccgtaagtttaaattaagtgggtcctaagcacagacttaacctacttatatctagagtcgagtcgaatgtgtatgatttcattaatgcctaataagaatgctcccccatgtatgtcttgtctacacacttttctctatatcatattcaattcatcattgctttcttacacttttttcttccccactcacatatagagagagaagagaagagaatagaactcaagtaacactctttcattaatattttactaaattttctttttcaatagttgtacaaacaaagtataatataaaaaaattaataatttatactataaatatttaagtataattttt

SEQ ID NO: 85699 - DNA, 773 bp, Cannabis sativa
atataatttttattttatttgtttttgttgattggttagtcaactgacgcaaagtcgcaacaagtgagaatataataccaaaaatgcaatagtaataagtaaatgaacactagaattgcttagagagtttcttgaatgcaaagagtaaaaatggcagaatttatgctgataaaattttagatcccctctcaagaccatgcttgaccctttatatggagaagggagtggtgcacccctctttagggggcgagacattgagttaagctttaacccgcattggattagaaaatatctccaatgattcttggaggttgttgtggtccgattcttcaagagaattttgctatttttgtggattgttaattgctcgtgagtttgagagaaggtaatgaaacacctaattcttagagctaacaacaccataagtgtacgacatgggccgagtgcctcttgctatgttgtaagttggttgtgttacccattagctttgttgacataatgactttaataaagtttttctttgttgcatgtccttattgtacttgtagctatgttgagaagaataatggtgtatcacgatgatgattggaattactaggcctattaccattgggttatagccaacatggtcattcccttagtcctcggagtatatgaccttgagtaccatgagaaagatgtactcgggctaatgggataattgttgaaaattattttactaggatcttagatttactcacaactatgttgattaacaccttaaatatgaactt

SEQ ID NO: 85700 - DNA, 1330 bp, Cannabis sativa
  modified_base (649)..(655): a, c, t, g, unknown or other
tccactcgcaagaccaatgtttttacccaacgtcagtgttgcttttgaactaggtgaccttgagtttgaaatcatgtctcctaagccccacaaatcaaaaaccccacaggaccccaatcttacctttgaggcagaacttatcgagtctaaggttaggtctattggggcctacgttggtggcatcctgaagtcttacgacattaagcagcaaaaagggtgcattataagttatgtggcacctgggcaattcagctgttttccccctgaaagagtaatacgcgaggagtgtagtggacccagcacgagtaacgcctcaggtgttggagcttagagcctcgaacatatccaggctggagtggtccttcccctaagggattactttaagaaatactacaactacctcagggttgccccattccagttgaaccttatctcatacagcatccttgcgagcctcaaggttctataccatatcctaggctgggagtgccacactcctttggagatagcatgcttttactctgtcaaagcagttcccgcaaggaagaacgctgtgggaggcttctattatcttggggtttctactggcgatcgcaagctcatagttagactgcccaacaagacagatgttaacgcagattttcgttannnnnnnttgagcctcacagtagtgatttcacacaaaaaaaaataaaagccaagaaaataaaagtatgaacacacaagggctttttacgtggttttgcagttaaaattctacatagtccacgagtcaatcttattcagatttctgattgtttttcagggctcctcctgtatgagttttttttcgtccctcttttgatctttcttgccactatttataattacatagtgggcaattaattacaaagttgactgtaatatgtttacaacaatcatccctaaaatcaatggatttgattacatatcacgtagtgtaaatgcggttatgatttgaaaatcatatagttgtgattttcccgcttttactaggtcaaaatgatcgtgttttaaacacgtctttaattattgtatctgaagatgtctcgacagaagctatgttccagtgctctcaatagcaagctagggccatttttccttccgaggtcgacaatgcatgtcttgtgtcgatcgcggttcttatttacaaagagttcttcaaagctcatttgaatgttatcttcttatttgcttgggttgtaagcctcagtgacgctaacgggatgaagttataggaagtcttcccatagcgagacgggcacctcgcttacttggtcttgagtcgatccgattgttatacttagtttgt

SEQ ID NO: 85701 - DNA, 504 bp, Cannabis sativa
aaattacctacccgttccaatttggaataaatgccttaatttctatgaatattgaataaaatcaaattttgattgttttttaaatttcttcttcaagttcataaatttgttagtttagaatttttacaggtattcttaaaggttaaataggacttgttgattgggatgattgaccattttgtttcttgtaatatatattaaactgttagaatatcttacactttctcataaaatgtgatattttaaaatcacagagatttattgaaatgcaatatacaatagaacctctatttaagaatacacttgggactaagaaaattatattctaattgagagattataactatatagaggtacactaggaaaaaaaattaaaacaccaataaatattaatttaataataataacattataatactatataataatagaattatttttgagtaaatgtaatatttatacatgtattacaatttagaataaaattattaattctacgtaaat

SEQ ID NO: 85702 - DNA, 583 bp, Cannabis sativa
aaatctcatttctcattttcttctcctcttctcctcattttcccgagaaaatccaaattccatgttgaaaactctacttggaaaactcttagcaaagatgagtgtcggaactgtttggtgaatgctagtgcttcactcttgaattgtgctcctgcgtcggaggggtagagccatgttcgcgggttgttatgtaaggtactctactaataggttctttcctttggctgaacgacaacaagaagaagatgaaggtcaatttttttttttttttattctttcttaaacgtaattcatcacattaattatgaattattttaattagttttatttggaaaaatgtatataattagtgttttttttccaaaaatttgtttaattttgagatatttttattggctacttagaattttgtttattattcatcgggtacttattaattgcagatgacattgctttgaaatattagttgggtcgtagctttatggagttttaggggtttgaaatattagctgaatctttagtttatttcacttgcctttttgtgtttttgtaagaaataaaatttaagataccttcctacttt

SEQ ID NO: 85703 - DNA, 737 bp, Cannabis sativa
  modified_base (62)..(66): a, c, t, g, unknown or other
  modified_base (232)..(236): a, c, t, g, unknown or other
tatttcaaacattattttatgatagaatcatatataaatattacaaaaaatcttacttttannnnnaataaaatttgtgattaaaagtgaaaaaattgtgattaattacaaattatcattcttatgttgtgattaaaaagttcgtgactaaagctaatagtcacaaaaattacaatgttgtgactaaatgtatatttagtcacaatagttgttgtgactaaaattaaattannnnnaacttatatctaaatattatattttagtcacaagtaacattttgttatgactaaaactcacatttagtaagaaaaaaaattatgttgtgataaaaaattatcactaaaaataaaaatcttttgtagtgaaaatagatacatgcacctcaaaaaattatatacctaataaagcactcttatattaaaaaataattctaactttgttcaaaaagtccctaaaaacaattctaacttaaaataatttttaaactttactcttaattaattaatttttttttttacttttaaaaagattaatataaattaaaaataataaaattgaatgcgttcattatttctatcatatctttttttttttgtcctctcttcagcttctaaatcatttaatatctttgagatctttaaatttacgaaaaatactaaaagtattagcactgtcatattattattaatttttattaagtattgagtctcacatagtttaatttaataattattata

SEQ ID NO: 85704 - DNA, 1068 bp, Cannabis sativa
  modified_base (891)..(892): a, c, t, g, unknown or other
ttaaatgctgatccttttggttaaaaagacttagtcgaattatctcaaagtcttgcttcttcaatccacgtgtcacagtccgattggtccacgtattttggacaagatcaaggacaacacattccataaaaatacctaatatacaaaccaaaatccaagatatcaattaaggattggttttaatcaaatatgaccaaatatagacaatattaaatattttttaaaaagataattcatgcaaaacatactaaataaatataaatcaaccaaattatcaaaaaaaatataaatcaaccataaccacaaattcacacaataaattaatatttaattacctttaatatacaaattaaatgaaatattttgacaactaatttatcaaaaaaaaaaaaaaaaaaattctggccacctcctcttaatttagctcaaagtttccttaagtccaatagcttctacaacttccaattgaacacccaagcccacccagggatttagggataaactttgtctccctaaatccctgggtgggcttgggttccggaaaaccaaagagatgaatcaggcttttctggctaaatggggatggaatattatcaatgaaagtcaatctctgtgttgtagagttctaattgctaaatacctcaaaggaaaagacgtccttagttgcaggtacaaagattcagattcttggttttggaaaagtgttgtgaaggctaattccattttgagaaaaggagcttgtaagttggttgctaatggtgagaatactaagatctggggagatccctagattccgcttcggaaaggcttctatccgaaaccaattgagggtacctctcccaatttgaactgtgtggctgaacttctgttaaataatgggcagtgggatanncaaaagctgcgagacaactttgactgagaaacggtctcagacattcttaaagggggccatccctctggaagtggcacagatagataggtttggacgctagaaagtaagaggtgtttctcgactaaatcagcgtatctggctcaagctttggaaagagctcctcactgtgaagttgc

SEQ ID NO: 85705 - DNA, 674 bp, Cannabis sativa
atagattttaaactgcaacttcaatatccaaatacaataaaaattattaactataaagtctaagttttaagttaaacactaaaatgtcacaactttaaatacaaaatagtttaacaaataaatgtaatttaggcaatataatataaacacttttattaaaaaaatatataaatcagtttaattcgatttattcaagttaaaccacccaatatattcattgggcagtttgaatttttattgtattatttcaggttatattttttgtcaatctattcgattcggtttgggctgtttattcgggttggacaatttgtaaattttgttgaacacccctaatatttcgtacgaacaatggttacatcgcatattgggcctcacctacccggcccaaaattaatattataatgtattttaccccaacgatgagcttatttgctcatacaaaccctaatgggtctagatttacccaaaaacttgattccagcccataaataaggttttacccctttacaataaggattacaaactttggctaaaaattctacaaaaatttggcaaaaacacacttgtaaaatactctatagctaaatttaataatattaactcgtggactaaatctcgttaatgctccaaccacataaaaatcttctttatttatttcaaaatcatctttt

SEQ ID NO: 85706 - DNA, 1131 bp, Cannabis sativa
tcttatttatacaaaaatattgaccaaaggaatgagaaattaaattaatgtaataaaaaaaaatacaatcaaatattaatggtgataattaatatagtaatttagacatctataattaatatttcaaaacaattgattcttttattatgttttaatatttatagaaaaatgttgtttgtcccgagttaagtgaattgaactttttcccgagccacatgtcaattatatggcatcttattagttttagtagtgattattttaatagtaaacattaaacaggtgtcaatatatttagtattcactttttaatttctttttacacgttttacgagacacatacaaacccaaaaaatggattctcaataaaataggttgactatgaaagatgttttcctcaaaattgaaagatatttgttaatttctttctcaagttgtaatctttagttatatgtgagggttactatacatggagcattgagtattgtaaacaaagagacttgactgaattgtcaaaaaaatttaaccataccgcccaacattaacagagaatagattggaaatgaatatgatcgtattgagtttttaaattcatggagactaaacaaagattaagcagaatgatcattgccacataaaaaacttttaaaagaaataacatcactatattctcactaagcacttggaattttagttgaatatatatatagataaattttaacttgaagagtcgtatgagtaaaaaataagaatagtttactcttgagttaatatagtatttttcatattcaaagaaattggtgaatttttcaaacccatttattttagaagtcttcttaagaaatgatgaaatacaccgattgaattttttttaactattgttacctaaaaattattttaccaataatactaaatggcaaagaccatattttttttcattttttttataaacacaaatgtttaccaagtatctttttaaactctatttcaaacaatataaacaaaaaaaaatattactaacctgagaatcaagatgagttggaaaaaaaaaaccatcaacaaacaacaagataaataaagtagaagaagaagagttatatgagttagttagagtaaagaagaagaagacggact

SEQ ID NO: 85707 - DNA, 737 bp, Cannabis sativa
ggtccatgtaatattagttttaaaaaataattataaatatttaaaaaaaaataaaaaattataatttttttaataacttatatattaaaaatttgtttaaaatatttaaaaaatagaaaaaaaaataattatttttttttcttcttcttcttccttgttttttttcctttctttttcttcatctttcttcttcttcttcttcctcttcttcttcgtcttttttttttctagaaatcaaacccccaaaaatagaaccccaaccgtccagcccaagtcgtcaacccccgactgtccaaccccagaaatagaaccccaaccgtccgacctcctacagctaaatgctcattagacaccagtaatacattatgtaattccaatgaaaaaacaacatatcagcttcaaaattcaagaattttgtcagccaaacacaaacctcctaaaagcattattgctaaatctagaatctaatgccatatcaaaatacaaattaaacaataaaaaattataacaaacaaacaaaaataccaaaacattactaaaaacaagctacacaaattccaattcgtccatttccaaacaaatgaaaaatcagaaccctagaattcacaatccaacccctaaaactacaatcataattgaagatcaactctagaaaagggaacctaagacagagcattcaaaaaaggaatcgcaatccgatcttagccaacattggtggtgcatgccagtaatataaa

SEQ ID NO: 85708 - DNA, 701 bp, Cannabis sativa
gcaagaaaaaaaaactactttaatctagattggtataattcttctactagttattataatatacctattatattgtgtttcttaataatgaagtaaatcttatatacacataaaattatttattattattattattattataaatttacagtaattttagcttcaatatatattttattattatattattatatatataaagtatattattattatattgtaattatattattttagttatatataataaaatatatattattaattataattaattaatatttttatttttactaaatatttaaatattcaattttaatatggtaagcaccgactcctaattttatttatttgttaatattaatattcatacttctgttatatgtacaattatttatcttctgtctttaaagtttgcactttatattaattaatatttatacttctattatatatataattatttatttttatacttataattctatctttatttatgtacttatatggtaggcatcacctcctaattttttttttataatcttaatttttgtgatacttggtgcatgatttgctgtgaacaaaattctaaaaattatttcatcaaaacaaaatttgcgtgtgttgaaattaagattaaaaattcataaatcatgaaaccaaattaagtaagaaaaaaaaaattacatcatgcattattt

SEQ ID NO: 85709 - DNA, 570 bp, Cannabis sativa
taacataattggtcacttaattttgtatcacactttataatagcatatacattatacatatgtgcccacaataggattttaatccaacataacaaagttcaagcattgcttgaacctgttaagaataggtaatggagagtagtccattaccaatgaagagtaaagactctcaggaagatcgattatgcaatattttcatatgagaaaatttaaggtggaattgttagtttaaattccctcataagcaaatacaagaatcatattgttgactctaccacaacaaatcatcaaaaactcttagcagactcaactaaacacttatcctagctgacactatacaactatgagtcttaattaagacttgaaactaactaaccgaaataactagaagctacaaagatctatttatacctcatatttggatcatttcccgtagagaaaaagcttcagagccccaagactttagagagagttcttcatcgtaagaaagtgagagagaaagaaagtgttagagagtttcatagagagagaaagagagaaatcaagagaaacaagtagtatcagaagatt

SEQ ID NO: 85710 - DNA, 709 bp, Cannabis sativa
actctaccctaaaacactctaaatctgggagagcgagaagccttcttgccggtggttagcatacatttgcctcgactcagccaccaagcaacaacacagatagacaactgatccttgtgacctccaacaccttaacccaaatccaaaccaaacagccacgtatccaatcaacataaataccctcagcttcgggcaaccaatccatctctgccatgacttcttcgacccaatcatccaaacaagtgtcaagccttcaaaccaatttgcctaagattccatctttgccctttaagtttcccgtgaagcccactcacatcgaggatgaggttttggtccagctataaaaagcagatgtctactgttaactctatggtatagagttatttttagtgcctttaaattgaaattatcatgaaaagagtaatgaaagtgtgtttgtttgattaactttaattaattttatcttcattttctatttagtaagctagcttttaagtcttgtagaaattattatttttagttgtgtttatgtaattaaatgttgcttgtttgctgttgggaaagaagagtacttaaagtgttaggaaaaaggaaaggaggcgaggacaaaatgggcaaagaagctaaaattgggttgaattactgcaacaaattcatcattctgggcagtgatgtggacaaagtccagtagagttttctttacaaatag

SEQ ID NO: 85711 - DNA, 532 bp, Cannabis sativa
  modified_base (441)..(441): a, c, t, g, unknown or other
ctcgtaaaccttatctttcattagatgcaaaataggttttacatcttctaaacaatttatatcagacacgaaaatcacccctagccctaaaactggccctaaggaaacactgaaaattttcccctgtagcaaaccagtcgaccgattctgttgcaccagaacaaaccggttgaccggttctggcagggctaaaaacttcgaatttccttcttccaaaatcaatcccaaacaccaccaaagcaacccaaaagttctagaatagtacaatatcatcaatacaacatatccaaagcactaaacgtatcaatttaatctccaattcattttaccatattagaaccaagtccaagctcttaaatcaacaaaattccaacttcaaaatcaaacagccatgaatatcaatcaacataaactttaacacattcaaaattaggtttatancacaatccctaaccagtttaatcccacagccacaaaatctcaaaaaccctaactcaaaatcatcttaaaacttgaaaattcttagttcaca

SEQ ID NO: 85712 - DNA, 804 bp, Cannabis sativa
atgccgctaaaaataaatattggaattatgccacttataaacttaaaactttaagtacttatgccgctatttaccctaagtaaagatatcgatttgaaaagaataaattagtattgtcttttgaaatattaccaaaaaaatcttctgtcaactattacttatataaaatattttcttgaattattacaatagtacgtaattaaggagataattcataatcttgaaaaatatgatttgggtaaaaataagagctccatgccaaacaatgaacaactttattcacagatcgtttaacaaactgaataacaacaatactcaaagaagataagataacgtgacaattattcaccaataaatcaaactcagaaggcttatgtaagttactatggatagcttgaacatagaccaagctatccgtctctaataaaatgttaaaccatgcgtgtcgttgaatccaacttagagctttcttaataccaattatttttgcaatctctaattgacaaccccaatcttcccacaatgaaggcctcaactacctgaccctcatgatttcaagccaaacaacctatcctaaaacgacttattcacctcagacaagaattacatctattcgcgtgcttattgctattgttgctattcataatcttgttgtacaccaaatggatgttaaaactatatttttgaatggtgaattagaagagaaaatttacatggatcaacttgatgaaggttttatcgatcctggtcaagagcataaaatgtgtaaattagataaattattatatagtttgaaacatgcac

SEQ ID NO: 85713 - DNA, 624 bp, Cannabis sativa
  modified_base (279)..(289): a, c, t, g, unknown or other
tacttgagaaggtcgggcaggtagcatatcggctagccttaccacaaacactatcggctctccatgatgtattccatattaatatgtttcgaatccgactcatatcttgagttatgaagcccttgaactgcagtcagacttatcctttgaagagcaacctgttgagatcctcgatagaaaagagaaagttcttcggaacaagaccatttctttggtgaaagtgctctggagaaataataaggtggaggaagccacctgggagttagagtctgacatgannnnnnnnnnnccagagctattcaggttagatttggggacgaaatccttttaacattaggataattgtaatgaccgctttagtaatttggattagtaaaggtaattagcacaaatttttgatatttttataattatttatgaatttaattatctgtgggccccattgttagaaataggcattagagttataatttctcaattccagagatttttttaaactctagtggtattgtttgacttatatgtgaaatatgttatttttgtaatttttgctcagtgacaacagaaaatgcgatggatggctagtttgatcacatgagcaagtttagaatcttatttattagt

SEQ ID NO: 85714 - DNA, 1063 bp, Cannabis sativa
  modified_base (270)..(279): a, c, t, g, unknown or other
atcatgtatgaatggtaatatatataaagtttttagatatttaattttataattttcttctaaataaaagatttacatgtgttgcattattttaaatctgtctctttaccaatcatttttttagtttttttcaggatcaatcattgcaacaactttgatggataagcttggaaggaaaattctccttcagttgagcttccttagtatggtaatttctcactgtatatttaactgattttctttagcaagcaaatctctctctctctctcnnnnnnnnnntctctctctatatatatatatacacatatatatatcatgtcattttagttatgtcattcttaataaaagtaaagaatcagtaatgaaagagccatctaagaccattttgatgaattctttagaatttaggtgaatcatctcaaagtaacattgtagctttctgtgcaagctcagtcatggcaacacatgttagatataatctcccacatgactgctttgtatctccatctcaatgtgtgattaagctttttcttaataactataatcgttgtatcattttaagtgggacataaattttgtttcaaattctttgttttatgtgtatctataattttttagcagtgatgcaactagttaaaatgtgaagaaaagtctcttgcttattcaccaaaggtaaactattctttatttttgttctttaagagaggaattactcccaagggagatttataatgaaataaagaaagtggcaactagctctatttgactctgttttttatatttaattgctttgtttaagagtatttattcatagcaagtctcttttgaattcttttttattcagaattttttttggtattggttatgcatgggcagtgaaaaatacacacacatttaaacatatgtaaatgttttgtgtttttatatatagtgattaattgaatgaaatttatagtcactaactattgatattttgtgcagtggttctaactaaagaacataacacaagattgttgctaagatcttgggtctcctaaagattgatgaattagttttagaagat

SEQ ID NO: 85715 - DNA, 618 bp, Cannabis sativa
ctcacagcccatagaaacaaatttactcctcgtgctcgaacctgtgtgttcatggggtaccctcaaggtatcaaagggtacaaattatatgatctaaataacaaagaattatttgtctccagaaatgtcatttttcatgaaaggatctatccctttcatcgcctcaacactacctatgatgcaacagatcctttctctcaactggttttaccatctaaacacattttagaaactaatatgcaagatgattctttttctcaagaaagttctgcaccagaaaacaacaatgcatcatctccgaatgcacctgatcatgttccaagacgcaccagcagagtttctaaaaccccagcatatttacatgactatgaatgtcactcaatacttcaagacaaatcctcaactcctcacagtttttcaaagtttatttcatatgacaacttgtctgactctcataaaaattttatttctctcattacagctttgtacgaaccagtcaattacaacaaagcatctcaatacaaagtttggaatcaagccatgaacaatgaattgtttgctttgctcaaaaataaaacttggacatatgtgaaacttccagccaacaagaaagctatc

SEQ ID NO: 85716 - DNA, 558 bp, Cannabis sativa
  modified_base (515)..(522): a, c, t, g, unknown or other
agggggaatttttaacggtcagaaaagttcagaggatataatttggtacatgttaaagtttaggggataaaaatcctaattagcctaaattttatttttggacggtatgaaattttttgagcaacatttaaggaagcttgtattggtgtgaaattttttaagcaatttttggggtagcttgtattagctctttttaagatcatctctaatgaagtcctaaaatattattacaatgctatattttactattttagtatttttttttaaaaaaaataggtttttttaatagtatgttaaatttgattcatgctaaaaattatattaaattaaaaatataatataatataagattaaatttaatacacaataaatataatttttttaattataatattttattttttctcataatttacaaattattgtgtattagaatactataataaataagataaataccattttggaccttgtgctctgcaaaaattaccaattggactttctattttgttaannnnnnnnatagaccctgtattttccaaaatggtacaaataaga

SEQ ID NO: 85717 - DNA, 666 bp, Cannabis sativa
tcttcttccaagtcactcaccgaaatgcagttttcacatcaagttgttctacttccaaattcaagcaaacagctaaaccaagaacaactctaatagaggacattttcacaacaggagaaaatatttcttcaaagtcaataccttttattctaaaccaactttcacaaccaatcgtgccttgtaccattgtgagccattgctttcagttttatgcctgtaaacccatttgttcttgagagctttcttccctttaggaaacttcaccaagtcatatgtgtgattctcatgcagggatcccatctcttcttgcatggctccatcccactcattcttatgctcatgtaaaattgcttcttggtaagtttctggctcacccccatcaatgagcattacatactcatgaggattgtatcttgaagttggtttacgctctcttgtggatctcctaactagagtctcaactagtggtggtggaagtgcttcttgatcctattcagttggctcaccatcatcatcaattgtaggaacatcataatcaatattctcaccatgatctttttattcatctgcttcttcattgacatgctcttcatggttttcctgttcatctcccccatgatcatcatgcactatgggtgaaaaaactgagctaggactcacaagaac

SEQ ID NO: 85718 - DNA, 628 bp, Cannabis sativa
gataatttattggatccaaaatatagaaaagcccctcataaaattaaataaatctagtaatattaattataatgtaggtacaaatattttttatgataaataaacccccacaaagtaaaaattcaaggtccgccactgttgtccttgatcacacatgcatcatagttaaaaagtaaggtgatattattatctattgttattttagagatgctcaatagattcttggtaatagttgcagcaagtaacacatcatttagtagtaatttcttatttggattagttgtaaaaatacatattggcccatatgagaaattgaaatttgagagccatgaccaaatattattttggctttgcctttgtaatcgtgtggtgttgagatactaaacatcaaaggtcatctggtggatttctccactgtcacatactagccattattttcaacaggggtataagaattagaaaaaagaccttgtggattgtggccttgattctgagaattggaggagctaccttgagtgtctgtatcataactatgataacatttgtaagaaaaatggccaattgatgttgcctaatttgttacattgcggtcgcgatagtaaatgggttatgtcgtatccacagggag

SEQ ID NO: 85719 - DNA, 1125 bp, Cannabis sativa
agttttttgcttcaaatgtggattactgggtcaccagcgcagtgagtgctcgctactttctcctgttacggttcaaaatgagaagggagttccttttccgctgttcggaccatggttgaaccccttctcgaagtacgattgctgtttctctgttaatcgtatggatgttgctgctgggaagatgaaggagaagaattccggggctttggttgtgggcggaggttctgctgaccgtgagcttgatggcggcacggtggtagtgtgccaggcgaaagcaccgactccgcttctggagaaaggcgcgattcctccgaccatgggagcgggtccgttaacctgtgctgaagcctcgagatctatgcggcgccggtcttcgaggggacagagaggaagtctggttcgatctgcgtggcgtccgaaggtggctggcgtcgagatggtgactggtcctcatttgggtgttcactccttttcacccaaattgtacgatggaaagccgtctgcaccttttccatttaaagaacccattttgaatttagaggggggtgacgaggataatactaatgaggggctgaggtgtcatatgaatagagtcaaaaggttgacccctttggttgaccatgtggcacataaagaagtggggccgacccatttgaactcattcatcaaatctggtgggcctcctacgttagttcataatgggccgatgggtccaagtcttgggctgagagttaataccacctttaactctaatggacatttattttctgggccctatgaaattggtgacggaagtggggttaagtccattcaaaggaaaattggtgggccagggacgtttggtgatgggccggttagtaacaacgatttgctaacctcgcctgtgactattattgccaaggaaaaagaagagaacaacaacactactacatcaattttgggccaagaatactctgagcaccttgatgaaaaaagagctctttctaaattttttcaagctcaagaagggtacctccatgagttggcggaatttgcttctcatggcccaatcaaaagagaagcgggtttttgtgatattggggttcaaccaacttcggaaattaatgagagaaccactccggtgaa

SEQ ID NO: 85720 - DNA, 752 bp, Cannabis sativa
  modified_base (49)..(49): a, c, t, g, unknown or other
ataataatataattcctcaattatacataattatctagttagggttttnctaatccatttcttaattccggggtattacataatcaaagtcactaaaccattcaatagtgatttttttccttcttttatatactaagcaatctttagttgtaccaactaggtatcttagcagccatttcatagctaaccaatgatacttccctagattgttcatgtatttgctcaagcaacttatgttgtgagctaaataaggcttggtgcacaccattacatacatgacagagccaactgcaacatcatagggaactttgtccatctcagcttctctttctctgtacttggacactgcttctctaagacttgatattggcttgtcataggttgccttgtaagtttagaaccaaccatcaagtgatgagaaagcttgtatgggcgtgtgagagagagtgaggaggagagttatcaaacttagacctttttcacttggaggctagtatcaggctcagagagagattttttaggttagagttgaggcctttatataggaagcctaaaccctaatttataacttgaaaccctagatatttgtatatgaaattagtgaattacaaatgaccaaaatgccattgaatataaatactattcaactattttattgggcttttagggcccaattcccagcccaatcatgcagtccacgtgtagaattgcacagaaaatcctgcaggccttctcttagctagccagacacc

SEQ ID NO: 85721 - DNA, 1437 bp, Cannabis sativa
  modified_base (1396)..(1402): a, c, t, g, unknown or other
gcatttggctcagaagcaatgttgcctgttgaagtgaacatatcgactcccagaagagagttttataatcaagaagaaaaccaggaacttctaaaattgtccctggatatgcttgacgaaaaacgagttgagacgcaaatcaccaacgcagcgtatcaacaccgagttacaagatacttcaacaaaagagtcaagaaaagactattcaatgttggagacttggtgctaaggcgagtatttgtaaatatgagaaatgcatctacaggagtgttcaacccaaactgggacggtccatatgtcatcaaagcagtagttgatattggagtttacaaattagctcgactcaatggctcgctaataaagaactactggaacgtggaacatttgcaaccctactaccaataaataaatgatgtaactcgcattacttatgtaaaattttaacttcacttatgaataaagagaatcatttatattatttaagtaattataaagtcttactctttaaaattacttaagtggcatttatgtatgattaactagaattcatctggaaatacatggtataatgcaaacccaccatttcaattttttttaaaaaatttaaaggttctcaactaaacttcttttacgaaagaggagtcaaactgttataacttcctgaccaaaccttttgacgagagaggggtcaaattgttatagcactctgatcaaatctttttgacgcagaagggatcaaacaactataatttttttattaaaaacctatctgacgggaaaggaaaatcaaaagttataacttgcgtataaaactgaatactaacagttcacgcaagctaggaaagtgctaaatgagacatcacaatgtcttgataaaagtacttgaacctagaaaatggatagataacctaactattcatacgagcaaattaaaaatatataaagcgataaaatcattaaaagtatattcaagtttgcttaaggcagattataactgccataacaaggaagaactgacaactgctcgaaaatcaaaaactttggtagatgaataactacttaaacaggaagattacaagtaatggaagaagccaaagtactttacatttgattaaaatatagttgtttacattgtgaataaaaacgcaagcaaacacaattatattaagttcgaatgaaaagagtacaaggcatttaagataagagaaaatccaaattgggttacaaacttgtctttacaaaaatgcaactaggggaaaaccattatgtcatcttcctaaaataaagaatgaggggtcggtaaactcgagaaagaccgtctccatatagttcggagaaagaccgtctacagatagcttggagagagaccgcctacacatagctcgagaaagaccgnnnnnnngtagaaggtctcgacctctgcatagacctcattct

SEQ ID NO: 85722 - DNA, 1131 bp, Cannabis sativa
tttttttttttttttgaaatccatgcaaaaactttaaaaccttaaacttttgagcaattcttagtaatattttcattttaaacttataattttgaagattatttttaggaaataaatttgatcaatataattattgtacgacattttttttctttcatgatgaggttgaatttatttgaagtttaacatttagaattcgataaatgaactttttccacttcaaacacaactatcttccagattttattgatcattcttttattatttcttgcaatatacaatcaacatagacttcatggatcaaatttccatggtttgaactttgaagtgagtggagaacacagttgactaattatcccaatcttcaagagaaatcccactgttacaaatatttgaccacatacaaataatacatttgtgaacatgtgattatagttagcaataattgttgtataatttttttgaaagaatattgttgttataattcgagtacgttaatttattgaaaattttgttttattactttataaagcagattgtgcaatatcattataatgtgactacatattattataatattacgtaaaaatgattttgattagtttcttttttttctttttgttattgcattatttagcatatttaaaaataaagatagaaaatatttataaaaaattaattaaaataataatatgacatatagcaacgtttgtataaaaagtgttgttgcatttgtatttagaatttcttaaatagcatcacttttaattaaggtgttgctatatgttatttgtaatattttaaaatactatgataaggcaacacttgtagaagtgttatttaaactcatatcttttacattctaacaggcaacacttaccataagatatttttgtagtagtgtgtgcctaagcgctgctagtttgtaattattattttcattcaaaaaaaaaaaataccaacaaaatatcctgtctaattgtgatatttttttttcaattttattaggaggatattgtcgcagttatttattgaaaagtcggccctcattacttacaaatcagagttctgtaagggtacactgacctttattacattagggaccagtttttatcacctctgaaactcgac

SEQ ID NO: 85723 - DNA, 1197 bp, Cannabis sativa
ctcccagccgcaaaacaaaaaaaataagtgagcaaatgtcactacttatgataaggagagtcaagaatggtgagtaaaaatagccaccatcttgagggggaataatggacaatattttctcacatggatcaaatgtaaaaatattgagccatatataagaacatgggctacttcactcatcactaattggttttgagatggaaccccatgattatcaacagtcttaacaaactttaggaataaattttatgaattttattatgttagtatttttttttttgtcctagatttattaatgttgttacctattccttagctaaatatgcattgtcagaaattattaataagatttagtggcctggttatctttcttgtatccgtgatctcattttaagtgaatataatcagtgttcccttccctttcatttaagctatttgcttgaaagataactcttttatggtttttctaaataaataaataataatcattcaaattttgacacattattaatattctttaaataaataagtaattttattcaatagttttgtttggtttttcttctttaaagtttatcacttttggtgaattttgtatatctattttaccaaagacagatttacaagggaaaaaatagaaaaatccaaagcctcataaatttagatgatgaattgaatcttaatttgaattcatgacctctcctctctataagaacaaaaagttaaacatatgaggttgaaaatctcatttgattcttaaaagacattttactattagctagattgaagtaaataataataataaaaaatgtattaattaatagaaaaactacttgaattatacattttgttatactaaacaacacaaattgaatttttagaggcaaaacccttcaaactttaatttttttcggtattcattattctgttactataaggtgttgttgaaggccataggcatgccacaacgtacacagctgtacacatgataaatttttagtgagacatgtaattttaatcatttaaatattataaaaataaatcatagttaaaaataaatagcataaaatttaaaataaataaataaaatatttttcccatttcttttcaattttcttcttcttccattgcccgactcttctcctccaaaaaccctagctgccgcgacccttctaacttctctttacctgagttatt

SEQ ID NO: 85724 - DNA, 655 bp, Cannabis sativa
gagagagagggagcccgctaaaaaaaaaagaaactccactagattgcaggggtcatcgcctatccaaattgcaacttcgtctaaccctgaagcccatctcgccaatttatcagccaaagaatttacattgcgattgatgtgagatatttgagctgctgggaataaagacaaagtttccttaatttgcagaatgagatctccgaaaaccgaaaaatattccttgtgatggtagagggcatcagttatggctttgcagtccgtttctatgacctgaaccaggaaatgctcatcaatgcaccagcgcagcagagaaaggagagactttgcttctaaggtggcaactggaccgcctcccaagtaaggctgggcgagcgctgcgactaccaaaccttcgctgttcctgattactccactgaaacccacttttccaccaaacttaggagttgctgcgtctacattgagtttgagaacaccggggtcaggaggaacccaaaatggggaagcgggagcaagactggggcagccaagaaaatttgaagctgacgaagaagagttgaaatctgccaagaagctctgagccagactgaaaattgcatgggcctgatcacaagattgacctttgagagctttgttcctgttaaaccaaataaaccaa

SEQ ID NO: 85725 - DNA, 649 bp, Cannabis sativa
tttctccaattgttcttttcttgaagctaatattggtcactcaccgtccttgacttggcaaagcatctgttggggtaaggagttattggttaaagggttgagatataaagttgggaatggtactcatattgattgtaaacatgatccatggatcccgggttttaatgagtttaaaccagtcagtttcattggttctcactcactgccggtttcaagcttcataacagaagatagagtttgggatttaccaatgttgaatagatactttcaacctattgattctgatcgtatattatctattccactgagtttttttgctgatcgggataggttgatttggcattacacttccaatgggtcatatactgtgcaatctggttttcacctagctaattctttggaagaacaactcagctcctccacttcagataatcaaagcatttggtggaagttcttttggaatctgactttgcccccaaaaattagaatttttgtttggaaagtgctacataacatcctcccaacagctgctgcactttttaaaaaaaaagtgttaacttctgctgaatgctctcttggtgcctcgaattgggaatctattggacacgctctcttcggatgcaatcatgccaaagctatatggagatct

SEQ ID NO: 85726 - DNA, 1277 bp, Cannabis sativa
ttggaataaaaaaagaacttctccccaacaagtttcttcatcagcattagttgctcttgatcaatggcgtagagctcaagataaacaaaacttattgtcattggctcttgaaaccaatggctctaaggtttagcaatggactaaacctgaatctaatacaatcaagattaatgttgatgccgctctctttgaaggagaaggctcctacagctttggcattgttgcccgaaactccccaggcattttattggatgctattgcagtagcaaccgagggtcgtttgcacctgaagttgtaaagccataggagttaaggaagctctttgttggatcaaaactaagggttgggataaagtggagattgaaaccgacagtatgctcaccgttcaggccatcctctatttttgggctggttgttaacgattgtaaacatttattttcttatcttccacatgtttctttgaattttattaaacaatcaactaatagagttgcccactatgtgggctaggcactcccgatttttttctcgttgtagcattgatgttcagaatttaccacctgattttcaggaccttttgtactcggaatgctaaatttcaatgaagtttatatttcattttcaaaaaaaaaattatatacaacaataaagtataaataatgatataataaatctaattatgattaaattaatgaatatataatcaatttttatagtaattaataataatatcttatgataattaaatgaagtaataaaaaaaattaaggtgatagaataagaattaaaaaattatttcatttgaatttaaaaataattaaaaaataacaaataaattatgatttatttatttagtaaaaatatttacaactatttattagaatataaatctataaaaaaaatacgaaaaaataatcataaaataaattttttttaataattataacaataatatttgttacaaaatctttactttttaatatattttgaattaacaaactatatttttaattttaacactattaatttatttataatatacacattaaaatattatattataaattatattacttaatataaatactatatatatatacataaaaattataaaatgtaagcaacacttcgcgcatattagttccctaatattaaaataatcaaatagttttgcaatgaatatgttgatcgtttattatacttacaagtggaagccatttccccaagagtacatgtaaatggaatccttatttgattgaccgaacattataatatta

SEQ ID NO: 85727 - DNA, 714 bp, Cannabis sativa
tagtaaatgggcaatcgccatttttgaataaagattgaagctttggagagagaaagagagggttttagagtgagaagggatgaagagagtagaatggtagagaagagttttataaagagaaagagagatgggagggaattgaaatgggctggagacagctgcaacgtgtgggcactcttttctttgagtcactcttttttgtgagcttctttcaatttgaattacatctttttttttattacttttttttttttcttttcatttacctaagattaaaaattgaggaatatatttgctattttcacactagagttaattataatttttttagttgatttttatgtttgaaagtacatgttggaatatttttttataaaaaaattttcataacgatattcgttataattgtaatatcgactatgtaaaattttgaaaaatttctaataatttagtgtaccgaaaatagagttatttatcacacgtgtttaaaaaaattcaaatttatttttggcactgtaaactatttgaatttttttaaaatatttacaggaataatgttataactataacgaacaatcccataaaaaaatagaaaaaaaatattttgtcatgtatttttgagccaaaaagttataataaaaggttgacggtagcatttttattttctttattgtaataaataaagtgctctacacttatttaactaaaaaataa

SEQ ID NO: 85728 - DNA, 623 bp, Cannabis sativa
agtggtagtaaatctagatccgtgtaaaatatttccaacaaacagatggtatcctcaaaccctattgttgttggttttgccactgaggatgtttcccaaaagaataatcttgaaattgttatttttcaagagactcttttattacatctttcaaagaggggtcagaagaaatgaccagttttgaagtctccacataagcttaccaagcaaggttttaactttgcatcttgtaaccccattttcttcaatgtatccctgtaaaagatattcaccaagctcccattatcaactaacactctttttattatgttgttggtgagctgaactgtaatgacaagaggatcgacatgcggatacctcacatgcttcgtatcttcctctgagaatataatcggaggttctttcgtctttgcttttttcagtggttctggaacaaacaccgattgctcatttttttttcttggtattattactgtcttcagcgagatgcaacctgttggaaattattttattaggatctagatttactaacaagtagtttgattaacatccaaatatgatttctaaaacaatgaatataaacacatataaagttagaaaatcttacagtgggtgcagcggaa

SEQ ID NO: 85729 - DNA, 865 bp, Cannabis sativa
ttattaactccagaatattgctactaagcttccttttcttcaagagaaacacagtggataggagaaaagtccatcctttttgtatttgtataaacagtcatcggacaaagagcttaatgaaatggactcgtggactaaggataattaagacccgaaccacgtaaaaatctattgtctataatcttgctatttacgccttcattgctgtcttaagctttataaatattatgttgccgaaaaactcggtaaacaatacacattaacataaaatttttttttttctctttcatctacataagatttgtcatattttttttaaaaaaagaataattagccccttaaactttcgataatattgattctgctccctaaaatatacagcttgttaagaattcttcctgaacttttaaatttcaaaaatttaatccttatgttaagttctgttttattatttcgtttaaacgttgacatatctttgttaattaataattttaccccttaaactttgacaactatcaaatcgtatcccctcaaaataaaaataaaaaagattcaatatattattattttagtaaatcttaaaaaaattaatttagatcttaaaaaattattttgaatgattaagaaaattaaaaaagaaattaaataataaattatctggtatggaaggcgaatttaccatgctacatctttggcaaaagcttacttagccacactatgggccgcaaagttacacattctagaaataaataaaaaattacaactaatcaaaagatttaagagatgtttacattgaagcatatagttaccaataccctaaacagaataagttcccttgagtgtgttaataaccgtctcaaaatca

SEQ ID NO: 85730 - DNA, 1190 bp, Cannabis sativa
  modified_base (1043)..(1045): a, c, t, g, unknown or other
aattaacttattataagataataacatggagaaaatttatctaatgtcaaaataggtgtgtggaaagtggtaagtgagtacggaaagaatgaaaaataaaataataaaaaaggatttttatttttgttaatttatttattaagggaaaaaaaaaagaaaaatttgattattcatgcttaaaataagtgcatggtcttattatatactgtcctattaaatattaaacaaaatatgctaccctttttttagtactaaatttatccctctactaataaaattaaaccctatccactatctttcccttttcattctcatttatctttctctctctttacaaagtcacttacacacacacatctttgcccgagcactctctcttggagttttagctttcaaccaagtgtgtaggagcaatccaaactccctaccaactcatccttcaaaaaaacaatgggtatataaattatttaataattattgttagattaagtttgtatttaggttaaaatgaatggatctacacgtattatttttttttatttgggttattttgtttctgaaacttgagctgcgtgaattttgtatgttttggttttttttttcatgttttagtgataatttacaatatctagcgatacatagcgacataagagtatgctaaaggttagggatgacttataacaacattctacatcatgttgcgactaagtttacgacttgtgccaatttatgcttaccatagatatttttgcgatttctgtcgacattatttatgacatgtgttgatagtttagagtactgtgttggtttagtaggagatgggtattttgtcgacatgtagtgatgttatgcgactttcttatcgatgtagtgtgcgattattggcgatcttgcgatatttctcgatatagtttttattaactaatatgtttttttttgcagagtcaactgtatttgtggttgtactatatgatggggcttgggcagttgaatgtttcaactagatattcaataacccaaagagtaagatgttaatgtttgannntgacactactttatagaagatgcatgaaattttgtatgaagagttggatatagaccctcttgtatatatactgaaagtagatgtgtgttacatgtacatgatagcaatatgatacaaccggaagttttagtaaaagatagtcaag

SEQ ID NO: 85731 - DNA, 511 bp, Cannabis sativa
ctcaagtacattttaacatttttcttccaaatataacctttagtatctcaccttattgaggtaaggtcacatttccaagatgaacttgtttaaccagtctacctaaatttagaagccatggaacaaacataatcatgcaaatcattacacacacacaaacaagaaaatagtacgttatttgcaaagaaaatgcaaatactaactcaatcattatccggggttttcatccacaatggaatttcactcatgatttcttcaaaagaacatgtgtctagctcatttagtggcttgataatttggatcctgcaacatctttaagtggtcaatcttaagattgggtgcaaatttggtttgcattacaagaaaaatagaatggccctgcctttgtatataataagagggtatatgagctttgcaaaatatgccacacactactaagacgccattttcagcaaccttaagcaaaccctgaaaatcaaggaaaacaaaaaattatttaaattcttgaatt

SEQ ID NO: 85732 - DNA, 768 bp, Cannabis sativa
acatacatagtagattatgtgattaaagacaatttaatactttcaataaatagttgcaccagccaaagtgaaaatgtagtcaaaagttgactttaaatcatctacacaactacaaaaatctgatatgaataaccgagaactcaaagattgtcaacaggcttatacacaagcataaatctattcactctttgcaaacttgaccacatatcaaattccatactacacttgcatatgagatatttttcattacttttctttccaagttgttcttaggacattgttccttagtaaatgtgtcccctttcagaataggaacaacaccagccttacataaattaatgttgaacattttgtgcacacaattaatgtaagcttcttcggataagccaagaaatttttttattcttgtcactatcaatcttaatttcaaaaaaaaaaatgcctctcaaagattctttatatctaagttggtagacaaaaaaattttggtctcatttagaaatgagaaattaccgctgccatgtaaaatgttatccttataaagaaaaagaaaaaatatgatgactctcactgatctttatataaatatattggtcaaacttgttctctacaaaacaaaacgatgtcacaacctaatcaaacttcaggtaccactggcgagatgtctctttgagacaaaaatggatcgtttcaatttggaagccaaattttcatttcctttttcattgaagcttttaggttcacacatatagacttgctctctaaatt

SEQ ID NO: 85733 - DNA, 988 bp, Cannabis sativa
  modified_base (28)..(61): a, c, t, g, unknown or other
aacaagattacaacataaaaagaccgtnnnnnnnnnnnnnnnnnnnnnnnnnnnnnnnnnnatatttaaaattccgtgaaactgtagttttgtaaatttttttttgttgtttttatgtttttgtgaaataatcctttttttttttttttcaaaataacttataagaaaactagtggtacctcaaacattatataattagttacattataaaaacttttcaacaatgtgttgtcttgttgcttaatttatttttgcgttatcttttttttttttttttggtagcaacattttggttaccttcaaaagttattaataaagtaaaaacacttactatatagtttaaaaataaatttagtatatataataattttcataatatgattaattatgtaaccaataaaaaattagtttagttaattttgactagtggttttaattagtttatgtgagttataacagttagcttaactagttacttgtttactttgtaattgtgttttttttttttttttttttagtcatactttgtaattgtgtttgtaattcattctatataaataaactcctaagctcacaagaatatgtgaaacttctcttgctttctcttttctatttttctctgttttacctttttcggtttttaccttttggttcttaccattttcttgaagctagttgagcttctacatggtatcagtcgcctcccatagagtcgtccaacccctcttgtcctgtggtatcaacaggcaaagaaactgctaaagaaactttgtctcaatcttcgattccatctccctcactttggaatctattctcaagttctttatcttcctccctcacaatcaagcttgatcgtaccaattttctgtcatggaaatctcaagtcgtccctactgtctttggtcatgacctagacaaaattttgttttgtgacagtcagtaatcttgtgatccgtaagaggaaataccgggtaagctgtgcaatccc

SEQ ID NO: 85734 - DNA, 513 bp, Cannabis sativa
atatatatatgagtgtgatatgtttttagggtttctaattaacaataaaacgacctgtagcaaataaatggtggttgtcgtttttcttggggtttaaatcagagtcaaagaaaactttcttttgactaagtaaatgtcagttttaaccttaggttgctgagttgtctttgctgtgtgtagggcaaattggaataaagattcatacactcttccatgtagatattcatttcatctagaatataactcttataatgtatatagtattttttttagaatggacatttcgtacattttgaactttttatataataatttgagcttgcaagttttattacaaaacaagtattatattaaaataaattataatactttagaaataaaaattgtcacgcttttttatgtaaatataggaagaggttttaatggttacatttttattataaccatcatggttatatttttttaagccactggttactattaaatggttgtgattaatttgaaaattaaata

SEQ ID NO: 85735 - DNA, 830 bp, Cannabis sativa
agtggtaaattggtaagtgcctcgttaaaacactttttgggtctcaaattttttaatctgaagttttcctgtcgataaataaggtgacaataccctaaatatcctaaaatataaaaatcgaggtacccccgagaatctccaaccatgcaacggaatttccaaccaggtgcccaaatttctggacattgccagaacaattggtagcccagttcctccaaccgggaacccgctttactgcagagttcaacaaactcaaatcttagagtcctaaatcttacaaacctatttcaaagccaatcaagcttccccaaacaatttatttatgagtcttaaacacatatagcagctcaaatcatatagttcaaagaactaaaacgtgccattagagagtggaagctttgaatccaaaacttcaaactattttcaaaatattaatcctagctaaatacccttttctaatcacaaattctagcctcaaaatagaggaaaaatggaacataatttgattacagcctcaaaaacatagttcaactaaaaataacctaaaacataacctatttcctttaataaaaacaagagaaaagagagctaacccatacctcaattcctttttataacaatttttttactatatgtatatataaaaaaaataagaaattaaattataaacaaacatatatattttatgaatcaaccaaaagataaacttataacaaatttatttttttagccttttgagaggcaaaattatttattaaataatcatagtaaaatttatttaatatttttttttgacaacattactgtttcatttaatttttttagaaaac

SEQ ID NO: 85736 - DNA, 679 bp, Cannabis sativa
gtatgagatgaaggactgagtcaatgccgacatgacatgatggcgaggctccacttttggtccagacgatatgttaaggcctcttgggtcgaaatgatgcatgttgaggctcctagggccaatgtaatgcatattgagactcccgggactgaggtgatgaatgctgagacccctatggtcaagatgaggcctgctaggcctttaaagccaaggtgatatgtgctaaggtcgaggtgattttcatgtttcgacctttctcaataaaacatgcataaaattctcataaaaatttcaaatgagccaattgaagatgtgttttagaagttgagaaaaagatctaaaacttttgtactttaactttttctaaaatttgaacagaacatggaattatttaggtttgaattttggtttgaggtgatgaggaagtgttgtgataagatgcctcttttttggtcctaggtgaggagatgtcacttttgttgtcctagctgaagagatgcctcctttttggtcctaggtgagcagatgtctcatttttggtcctaggtggggagatgagacatgaagtcaccacctaggtgtctaggtgattagagatggtatcatcacctaggtgattttgtatcattgtctttactattttttgcaaaatctgggtataacatgtatcaaaatattt

SEQ ID NO: 85737 - DNA, 596 bp, Cannabis sativa
aatatttttctcaactttggtgtcagaaaatattttgtttaaatattttttttttctaatttttatagtaattttcatcatagttattacaacatcatactagtaaaattttaaaaaattcataataatttaccatcattttagtgtcaaaagtatttaatttttttttaatatgagtagtaaaatatattaaaaattcatttgtcaatactattagaggttgtttgtctatgttttaagtttttaaaattgtgtttttaaaaataaaaatagaaaataaatttttatcataataaaaatttaatagtatttagctaatattttctaaaacttatttttagatttttttttacaaaaagaaaaaaattcaatattctacaccatactgcgacatgaacccagccccaccccggactagacacgaactaatcttgacaccgaacctaaatcgtgagccaggacccaaatccagtctcgggacccgaacctagaccgtgacctgggacttggaccaggcttccggacttgaactagattcatgaaacagggaaccaaacccatactgagaccaagacccgaaccaggccaagtcctag

SEQ ID NO: 85738 - DNA, 1327 bp, Cannabis sativa
aatactcgcacttgtcacttctctgaaatttctctttttatattaattaaataatatattttggtgttgcgaaattcactcgacaacaattattattgtgtcctacattgtatacaattttgtatcttgacattattaatttttctaacattttattcattttaaatatgtaatatacatacataaaaaataattaaaactaaaaaaaaacaagtttagagcaatgaatagtgatgctccacactcttcattactctaaaaatttatgtaaaatagagtatatgttgtatgccttttgataaatttatcttctcttctctattgtaaagaaatactaaatttagaacatctattgggagtgctctgagtgttgagcactgacatcagcttctctactttattttttaaaatacactaccaaaatatcactttttctattttttttttctccacattattaaaatattacattttataaggaaatgtagtttagcatgcttaaatgtaaagcatggtcttttaatatatcactcaactagaaataggatacttatacttttaataacttttcctccaaaaaatacccttacatttcaaaactctctctctaactaagtcttattgtctccaccccgaaaccccaaaatccatgagctcaaccaccctgaaactcccgaaatccctacccatcgctggagttctcaactcgctcgttttctatgttttttttttcttctgatttttaaatatcgcgaaatatcgctaaatatcggtatatcgcaaaatatcactaaatgctctaattcacatcatcactaaatatatcgtcaaatgtcgcgaaaacacactctagtgttcacgatgattagcaatgtttagctatgtgctctacattttttagtctcatatcacaaatacattattaatatcatcgctaaatacacaaaataacgccaaatatcgctaatgatcgccaaacatcatctctaactttaagtttggtctatcattgtaaatacattgctaaatatcgcaaaaaactagaaaactagaagaaaaaaatgcaaaaaacgatagtcgtgagagaagacgacgatgggagctcccgaccggggttctaggtttgtatattcgacaacatgggttatggttcagggttcaacgctgaagtgttagagagttagagtgagggagttagagtgaaacagttagagagaaatttttttttttgaaatataagggtatttttggaaggaaaaaaattaaaagtatagatatactatttctaattatgtggtatattaaaacacatttaagtatattaaac

SEQ ID NO: 85739 - DNA, 502 bp, Cannabis sativa
cagagcagaagcttctgcaccaaaccatttatatatattccttttctttgttttgatttctttgttctctttcttatgtggtttattggtttctgtactttgactagtactttgtaatgtataagtatttcaatttgttttcctccaattagctttaagtagtactgaactatctttttagaagaggaagtaatgcggtgtaacttagattacagaagtggaaagtgtattcaagtgattgaaccaggaaaggaaatgaagctgaaaggatattcctcgtatgtcggttgcattagtcttgatgcaagtgaaagctggttggttagtacgaatttattacagtagtattctttttcttttcttcattttagtatttcttacttcaaattaaacatttttaggcttgtgggagtggtcggagtttatcagtatggaaccttcctgcttctgaatgtatttcaaagatttcaacttctgcatctgtgcaggatgtggtttttga

SEQ ID NO: 85740 - DNA, 796 bp, Cannabis sativa
  modified_base (474)..(474): a, c, t, g, unknown or other
  modified_base (655)..(663): a, c, t, g, unknown or other
acaagtgggtgttaaggataggtttcttccactagctagtagggccagcgaattattagagaaccttccatgtccgttcgaacaataaaagccgctatagtgcatccttttgcacattctgatcaatcctccatactttcgtgttcattccatggttccataaaacaaagttgttgcatcaatggttatggtgatctcgtagccgatcaatctagtattttcgcagattgtgatcaatcgtccaaggttagcatgaacaacttatgttctgctcaacaactatcaacacctaaatgatttttatatccaaaacaagtaggtgttaaggatatgtttcctccactagctagtagggctagtaaattcttagaaaaccttccatgtccattcgttcaatgaaagcccctacagtgcatacttttgcacattctgatcaatcctccacagttcggtgtccattccattgttccatanaaccaagttgttgcatcaatggttatggtgatctcgtagccaaccaatctagtactctcgcatattctgatcaatcatccatgctttattaaggtgagcatgaacaccttatgttctgttcaactattatcaaccccaaaatgatttttatatcccaaaccagtgggtgttaaggataggnnnnnnnnnctagctagtagggccagcgaattcttaatgagccttccatttccatttggacaatgaaatcccctacagtgcatactttttcatattctaatcaatcctctatacttctgtgtccattccattgttccatata

SEQ ID NO: 85741 - DNA, 567 bp, Cannabis sativa
ggtaccgctatgatagcgtcaatttttattttatggaattaaataccagcacaactagcactatactcgcactgttatcccgacactatagtttgtgtcgctatggtactaattcattcattttggccactactaacactatagttatgctggagacttaacactatagtttatgccactatgatatcaatgcatatattctaacaatataatcatacatatctacacacatatatatacacattttatactagtcttacctcatttcctgattcaagcgtgccggtcaacctgaatgaaaattcacgtgctgaacggaggccatatgtcacaatcacgtaaatcaggttaacaacttgctaaaacctttacaaggacctaaattcaaaactagaagttttcctatcgatagatagcattacaatacactaaatattgaggaaacacaaaaactagggttctaaaactgctaaaagtagtaaactagatttccaaaacagtagaccgttttctggggtcctgtttggaaaaatggttagctgtttttttgcaaaaaaccccaagaac

SEQ ID NO: 85742 - DNA, 505 bp, Cannabis sativa
cattgttcacagtgccctgaagatctgaaactccagtcttaagtttaccaatgtcagtctctaattcagtgacattggcctttatatcagaagctctctactcaacaacaactgtcaacttctcagccaactctaccactctctcatgctcattatccgtagcataagcaaagccaacacaagcctacaagaaacaaaagcaaggtcaagagaaaaaattgacgaagaagaagaagataagtaaaaacgggataaggttacttaccccaaagatgtcacttaaacctttttgagtaatggtatgaggaggtttggtgggtaccaatctccccagcggtttgcttttagccttggagttgattagaacatctttagccaccaacaatatggtgccttgtgcacgcaaattggccacaagctccgattcttgaggtcttattctttacatcagaaaattgtggatgataatatgtatataaaattttcatattttattaaatatttg

SEQ ID NO: 85743 - DNA, 982 bp, Cannabis sativa
atcttgccaagcctcccatcctatccaaaccaatagatagtgaagaactatacatctatttggcaatcaccgagcatgcaatagtgctgctctagtgcgtgaggaagaagggatacaacaccctgtctattacatcagtaagcgtctcattgaggccaagccaaggtatccctccattgagaagtgagcctactgcttggtcatagcctccagaaagctaaggccatatttccaagctcacacagtcaaggtactaactaaccaaccatttacgcaagttctgatgaagctagaagcatcagggcacctattcaagtgggcagttgaactaggtcagtttgagatcacctaccagcctcgaacaacaatcaaaggatagacattagcaaacttcattgctgaatgtattggcctcgaagaagacgatcccatgatgtgtgaaaagaaatctagccaatttgttttcctcgattgggggaattccatgcattcgttctaagattaggaaacccgaattaagaacccaaggcatgcgaccaataatacgttccagatgttgaccgtgacggaaggagaaacccaaaaagagggttgtggaagtcgacttcttgattttgaggtcccaatcaagttccctcaaattccatggacaacaaattatgttcttgagtagagaacaataatggggtttttggatgcacaatctcccaattagatagaatttgtccactttgtttgctatgaatctttaatttccaaactatctttgtcgaaggcagtcatctctcgagtatgtttcgatcgatggaggaggcaggcaaggcttcaagagcaagacatctatgaaggctctttcgaagagagcatgagagaggaagcttagaaaagaagaggaaaccctagtagagcttgagtcaataaaaggcaattaatccaacaataatttccgaatcacactcattatttatatcccatgtctaac

SEQ ID NO: 85744 - DNA, 1090 bp, Cannabis sativa
cactttattttattttgttggaaattagaaaataattaatatgttttatttttgtatttttgcaaacatatttgctttactttttattttctgaacttgtgtacgaatttgattgaactaataaattatttctgtttattgatatttgtagtgtcaaaatgtacaacccacaccccaatcctcatctagaatatgcctttaggaatgaactgtgtgaagatgactcctagtcagagtatcacttcatacttgctcatgatgaacatgaaattccaaaaagcagctatgctgaaaattgttttatctggagagcaaagagttcattttgttctcaacaacttatcacctgagtttgaccaatttgtgattaacaattagaactcgtccaacatagacaagctggatgatgaattgactgcttatgaacggacattgtcacttgcatggagatccttctccagtaatgcagatcagggcaaaaggaaagctaaagatattgagaataattcctccaaaaatcctactacttcaggctcagttgaaaaagaaagagaaagtgattccacttactcagattatcttttacaacagattgaaccagcaataagaacaatccaagaacagttaagcaggcatattattcaattttctaattatgaacaaatgggacattttaaatcaaattgtcctagacttttgaacactaggaacaataataatgctttaatttttgaatcatgtgttttagagaatgacaaatccatctggattgttcatattggatctattaaccatgtttgttgttcattgcaattgcttgaaaactgaaatggagagttgaaacttaaagttggcactaacaaaatggtatcggttagagctagaggaaaagccaaactcaagtttcgaaatagaattttggatttagatagtgtcttatttattccaaatttcagtagaaacttgatttgtgtttcatgtttacagttgtaacaatacaaattgaattttttgagttttggacctatcatttctcgaaatgacaatcaaatttgtgttgcatctatggaactgttggaaatattttacc

SEQ ID NO: 85745 - DNA, 540 bp, Cannabis sativa
agatattattactgctaaaaatcaacaaactttgatatttatttatagccgaaaattaaacttatatatttatactgcaaattagtgttttgtctatttaagaaatcttacataaaaagttatataagcatccttactataatatgttattgtaggaattttgtgactctttcataactgatataaataaaatagaaataagatggtaatttaattaaaactatttaaatttaatttatataaatatatatatatatatatactaattagtaatcaaacgattcaattatatatttatataggcataaggatgtggtacgtaactcctgttaaaatctgtaggttgtaattatatttattatttttattaattatatttaaataattgttaaaaaaaattatttaaacaaaaatatagtgtagtataaattctttttattttaagctaagatcatcaatcttgtataaatgtaagcccatgtgattagttatagggcttttttcataaatgtacaacaaaaataacataattataaaaaa

SEQ ID NO: 85746 - DNA, 697 bp, Cannabis sativa
taaacatagagaaagagacgaacatcctcttgtctacaaagactctctttcttagaaaatataagtgaaatacaaagatgtgaaagaggtgctaaacctacctgttataaggtgtatttataatcaatatactttattgacagctcatatatgatctgaacaagagcacaactcactagaaacttctttaaaaatgatcttcaatcagcctaggaatttctacttccgtacttacagaatcatgaataataagtgcgactttcttttatagaaaaggaaagtcttacttcagttttcatcacaagaaatttgatcaaaccaattagaaaactcatatagaatcagattaacgcagcaggaaagataaaaattgatttattcataaaacttaccatttatgaaaaactttccaaatatagaaaagctaatcacttttcatactttatataaatcaatcaattaaatacaaagatatgaaaataaaaacacaactcagctgaaattaataattaaataataaaatattcttgtcaatctaaagatgacaaaaatagaattaacaatattccctttttgatactttgattaaccaaatattttataagaaaaaaacctatttatgaagtgttagaaacaaaacaatagagtatagaaaaagctaaaattgctttgatacctccaattgatactacaaata

SEQ ID NO: 85747 - DNA, 643 bp, Cannabis sativa
tttttatttatttttaatttatttgagaaacgtgtgtaattgaaattgataacttagtcatatcggtttatgggacacgttcaacaactattccccatgattcaaaaaacgtccttcttctcattttattttttcattctattagtctacataatgtgattgaattaacgggagaaatacatattttcatactgagaaaaaaaactcagttttcactatataaaatttccatctacgatatctattttgagggtgtatttgacggttcgctacaatacagtggtgttttgatacagcgcacgacaattagattattttatcatgaggacgaccggtaatttctaactacttgcacaattttgggcagtgccacaaacattttaaagagagtgacttagtctgtgactcaatctaaaatttttatttaattatattattcctgttttatttttcagtagctatttaacagttttattattaaaaaatatttctattttttctttaaaatgtaaatagtaaatattattttagaccctgtgttttgcaaaggtaaaatcatatgtattttgtttatggaaaaagctagtgttctcttaacacgttttgaaccggtctagtgtcttgaccatataagcatgttctt

SEQ ID NO: 85748 - DNA, 848 bp, Cannabis sativa
  modified_base (102)..(105): a, c, t, g, unknown or other
  modified_base (333)..(339): a, c, t, g, unknown or other
  modified_base (430)..(435): a, c, t, g, unknown or other
tgataaattttaacgagtgaatcaaaaaaactaacgacatgaactcgaacatgagttcatgataactcaagatttaagatgatctactattgatcatcgttnnnntatgaattaggtctttatgataaagggtgtgttaataaagaaagcttcattcatattgatccttgtcatatataatctctattatatacaacacatttactttaatgtcatactacattcgtaatccaaactaagattacttgcaccgaaggacggacatcagtgaaccgtactagcaaccattgaataaagattcttaaattttaatatgttgctgactgttttatnnnnnnntaagtggtcttagttctctgcacaactacaagccacaatcttatatatgaataaggaatttttgatatttaatataaattattcaataatnnnnnntaataatttaacattcaagcatatattaaaatgttcaactctttattaataatcaaaaatgtctttagaagctttttagggaataaatcccaacagattgatttatgtcgtttgactatgtcaatatctgtgaccattaatggatttacttgtgattgatacaatgaaaactgatttgatcctatgttgatataattaatggaagagattacacatgcctacaattatgatgataaagttatgagctcaataagattaatacatttatatgtatacatatgtggcccagttggagattgttagaaatttatttatttgggaccacaaatgtgtatataaatatatgttgggtcatcatgtaaatgagtttaatttatgtggtctatttctgaataaaatttatgattaagagc

SEQ ID NO: 85749 - DNA, 540 bp, Cannabis sativa
cttatagcaagagaactgctaagaacactccctctcagcttgtgtataatagctaaatattggtacaacgtacaagatcacaacatttgttgctcttctttatatttgttttctacagattgctattgttgccaacactatttcttcttcatttcttgttccttattttaataatttaatatatgagctaaaaatattataatatatatattctttttttttttttttaacgtttgcatcatatataataacttttatttgtgtattataaatatattattaaaatgatgttgaaagatgtaaagaagttggtgtatgatataatataaatgtatgaggtaaaatagaattttaataatgtatgttaaaagatagaattaaaaaacggatgagagtgctctaaaataatattaatggtacctaacactacttaagatgtcatcacattattaagtcctactaatcactcttaaaacactaatgatgcttttaaaaagaacttttactgttaaaagttaaagtacttggaaatctaactag

SEQ ID NO: 85750 - DNA, 715 bp, Cannabis sativa
tttaaaaaagagacatttactaacatagttttcaaatttagggtcattttgcatctcagcccattgagtttgccatatttttgtaacacttatttagggcccgtttggtacagcttttggaaaagctaaaagctgcgataaaaatgtatttggtaaatagttaaaaaaacaactttttataaaatttatggagaaactacagttaaaaactaaaactagtacaacccaacttttagaaaaaaaaaaaaaaactattttaatggaaagactatcccatgaccactcgatcaaaggcaggtataaggaaggctaaagtttttctggttttctgggaaccaaaaattgtcaaacaagcattgtaggaaccacattggttcaatgccatgtctactgaaaacaaggctttaatcagaaacaatacatggactcttgtcattttaccaccaaacagaacccccattggatgcaagtgggtttacaaaatcaagtataatacagatgggagtgttgatagactcaaagcaaggtttgttgctaaaggatttcaccaacaagttggctttgatttttcaaacatttagtccagttgtcaaacacatcactataagagttgttttaactattgctgttacaaaagggtggaaaattagacaactagacatcaacaatgcctttctcaatggtgaccttgaagaagaaatttacatggttcaac

SEQ ID NO: 85751 - DNA, 1261 bp, Cannabis sativa
tataaaaaattaacaataataaataattataaagaataaatttatatacatattgataatatattttataaaataaaatatataaactaatagagaaattacttcatatatcattttttaatttgagggaattacttcatattttaaatatctttatatacattagtattcatacataaaataacaattttaaaatgtaaaagtttgtgtctgactgttaatgacattggaaaatcaaatgcaaattgagtgacagccacatttttattggtccttgccagtcaaactaaagtccactactttcacttaaccagcattaaaatattaaaaatgtaatcaaacacggtaaactttcagattctcattctcacttctcttaatatcgcataccaaacaacccctaataaaattatgaattactttattaaagataaataaataaaaaaatagactctactcaaataatcgaacaaatatctatcatcattaaaaagctaattcaccaggaaaatttatcaaatttataaattttggttgatacactttaacttctagtgattaaaatcgttcgatcaaatcaattattaatctaacaattatatgaaaagaaaatgcatacctggccaaacaaaataaaatatactctcatatatatgttatttatttttggttgaattttttttgtttttggtcccaattcacattggttttgaaaatagaattagggagtgacttaatcattttgaaacttattttctatatatgaattgacattatgtatatatatagtaacatgcatatcctaataatgattaatttgttctacttttgattggttttatttaaaaatttcttcttgtatttgttaaaagaagtatgatatgatatgatatgattttttttaattattgaaaatatattttaaatattcctgtgtgctatgaaggttttgacaactactaaactaatgtatatatctatatgtagaattacactttttcaaagtctttttggtaattgggacccaattaactaaagtgccatgataactgccaaaataacacaaaagtgtaagaaaaatattattattattattattatttgttgagaaagattattattattattattaaggaaaatattagtttacatctactgttttataaaaacaataaatttaattttttattttataaaataataaattaaattttgtattttttaaaattatactaaataatatattaaattattttttatt

SEQ ID NO: 85752 - DNA, 616 bp, Cannabis sativa
aagagtatttagatgaagttcaagcttatgagtttcttgaagaaggtaacataaagtatgtgattttttttatattattatggttattaatttatatttcatttttctttgtagataataaatcaatgtgaaaggatccttaccaaaatagaagacggacttcagcattattgattgatggtttatgaaggtttttaattttattttaagtttgtaaatgactttcaagacttatattttggactttggagtttggataactgtaatatttgaactttgggtaatttggcttatgtttgaactttatatttttcctattttaagtatgaatttgattatgttaagatttgatttttttaatgtgaaataagggttacaacccaacccataatatatgagttgggttgggttgtacaaaaataataatattaatgggttgaaattttataaaccgatctaattgggttagcctattaaaatagcatcaacccgcccaacccaactcatgtgcagccctaaacagaagaattatatttactaatactaatttcgaaatgacattttgcagcacttagaattagacataattaattatggaatatgtatgcttcattgt

SEQ ID NO: 85753 - DNA, 2480 bp, Cannabis sativa
aagtgagttaatgtggctcatatggaaaatataaattgagaaaagagaacgaaaaaaaataataataatttaaacgttattaaatatgtatgaaagacaaaaaaatatcttattcaattaagaaagatatttttgatagggaaattttttctatacttaaaaatttttaatttttttttttaaaccaatacattttacattacaaaaaatatgacacttttttcaaaactccaaaaatatccccctctatccactttgtctctctctctcggaccgaacaaaacaaaaatgcacatggtccgatggtcggaccacatggtctgatggggtccgaccaatcggacccatcggaccatgggtccgaccatcggaccaatgttcctctctctcttcgttttcctcaaactgaaatcggaccccctcggaccatatggtccgaccatcggaccatatgctttttttttttaatagttctgtccgagagagagacgaagagagtgaggttgctgtccctcgttttcttccaccaaatctcttcccgttcattgggttttaatttttcggtctgattttatctgggttgttctcctccttataggctgaggttgctgttttatttttcttgatcgagttatagaaaaaaggagatgtttttggttgattggttttatggggttctagcatcacttggtctttggcaaaaggaagctaagatcttgtttttggggcttgataatgctggaaagaccaccttgcttcacatgttaaaggatgaggattcatttttaaccttttttttttttgtattccatgtaaaatctaagtagaagaaggagcataatatgttgttttgattgaatataagattaatagtttttctttttttaaacacagagattagttcagcatcaaccaacgcagtacccaacttcagaagaattgagtattgggcaaatcaagttcaaagcttttgatttgggtggtcatcagatagctcgcagagtgtggaaggactattacgctaaggtatataatcataaactctatgaggttgatcaatggtggttgtggtggcacttgtgggttttacttataaaattcaaactctagttttaaagttttgggcactggtttatttatagactaaacagtacagtcaatgtttgaaattagtttatttgctcatttggttggttattttttatttttttgaaaggttgtcgttaaaaacgatgaagtctatcttgattgttggaccattgaaccttctttattaatgtaaaatgttattatctcttcattatgttatgtttgactataggcaaaactctttaactttgaatgttcttcttcttcaagatacatttaaccaactcaaataccaactctaaaactcacctaaccaaccatttcaggatgccccaagtggctatagaatgaagaaagactctttcatttactatagtagtaacattttacagtgtttctctttctgttcttgttgggatgacatgtttcatctttgctcatctttgttttcttattgacaaatgacaattcaggttgatgctgttatatacttagtcgatgctttcgacaaggagaggtttggagagtcgaaaaaggagctcgatgctctcctcaccgacgagtctctagccacagttccatttctcatcttggggaacaagattgacataccttatgctgcctcagaagatgagctgcgttactatttaggcctcactaacttgacaaccggaaaggacaagctcaatctatctgattccgatattcgtcccattgaggttttcatgtgcagcattgtccggaagatgggttatggagaaggcttcaagtggctgtctcaatacatcaagtagtttaagattgggttatgacatgagcaagattgtggccattcaagcccatgtttaagcatagtgttcatgtaaaaacagagtaattttagcttttgcttttgtagctttggaaatctagagccaccagtcccttgactttttcaatgttacaagttcccatttctagttttggatccttaaagaaagtaatgtttgtttattatagaggtaaatttagcaaatttacaatttgtggactatgatactcaccaagtaataattctctttttcttttttgtttgggtgtaagaaggaaattatgggatattgtcttgtcttgttttgagaagagtgtgggccacttatacctaacaacaaccttaaggtcatcacaaacaaggagccatggtctgtatgtatgcacacaaatctcattttatttattacacaccgacaccaacttcaacttccacctaaaaattcacctcttggattttgtactttgttgatttaagaaaaataaaatactgaaaaacttgtgtatttgttttgaccaaaattttctccaatattatattatctagcatatacaatccctaaactcaacacaacccgtta

SEQ ID NO: 85754 - DNA, 609 bp, Cannabis sativa
cattaaagtgaaattgtgtgaagactccacactaatttggttttacattattgcattaaagtgaaattgtgtgaagattccacactaatttggtgaaataatataccattggagatgcttaatacaaaattagatgagaagttgatattaattcgcatattacaacgaagttgatgttttattatttttttagttactttatagctattatattattattttagaattgttttgtctagatattctatacttgctttttagtttgattgaaacacattatttttctaattttaaaattttatgacacaatttttgaaagtttaattttatagaatatatatatataaaaaattgacactaaaagtatatatataaaaaaaaataggtatttttgtaaaaaaaaaagtggtccataggttatttcattaaatcataggttacattttcatatataattcatggtatattcccttagaactctctctatataaataagcttagctaaaggtgactacacctcggacataagacagaacaaagaagagaccgtaaattaagtagagagagaggaagagagtgagtgaaaagaggtgacaatggcgactctta

SEQ ID NO: 85755 - DNA, 902 bp, Cannabis sativa
aataaatgtgataaatataaaaatatacatacaataatatataataaccccctaaacaaccatgtataataaaatttgttgttaatttatattatatattttttatcctgaaaattattatgtgagagagattgtttatatgtgtgttaaaatatagattttatctaacaattatttttgctattatttttttaaaatttattatggttttgaacaaaaatttttaaacaaattctaaacagaattgaacaaattttctctctaatttttctttttttaaaaaaattatctcagtagtactcaattaaatacatatttttgttccaatatgtgttttcaacagcataataataataataataaaaaaaaagattaattgtcggcgtcaaaatttttttatattttaattttaatttacttaacattttaatgtttttttttttgtgagaatagtcctttaattttctaattgcaaatttgagatgtctgttaaaattttaccattaaaagttagttaaattttcactgtgaacacttttgtatgcaagatatgtttttattaattttgagattttagtgtcatgtatatacatgtatacatagtggcaatctcaattaacatttaaaatttaatttaattggttttttaaatttacaaatagaagtaaagttaagagagtattgctacaacaacaaaaaaaaaaagttatgtatataaaaactaaaacatttcatagtcaattaccttaaaaaaaaatttatatgtttccatcaagcaaagtaaatttagttatattaaatatacaattgaaaaataattattgtaaaaatataattataagtacttttaatataataatttatccaaaaacaatctctcaaaatataagttattttgaatt

SEQ ID NO: 85756 - DNA, 592 bp, Cannabis sativa
aatacacaagttttcatccttatatcaccgcagcatataaatttcacagatcctacttcactaaaataggcaagttatcaaccttcaattatcaccgcagcacacaaaatcacagaacctacttctctatggatgaatacataagatattcaaactcttctattaaattatgagaaattcaacattttgaacatcaaattaaaaatataaatggattaatatctacaagttcttaaataaaagaatgttatattatagtaaaagtaccttaatctcatccacaagctcttgaggtgcaaccatggtgttcaaaaactcatcaacttgttttagaatttattcctatcatgtaaatccaagtttttaattttctatccatttattcacacacaaatatattatacatttgaattaataaaagagctaatttttcattgtacgtacctattatcgaagcaggtggtacaatgccaacaactagagatttctggattctctctcctcttagatctgaaaaacgcgacaacaacaacaacaatttgggagaacaatttagattatcaaaatgctatacatgcttccaataattaag

SEQ ID NO: 85757 - DNA, 1010 bp, Cannabis sativa
caaaatggtcattttgacctttatgttatttttgataaaaggttgattttttaagaaaaagtaaaaggattttctggtttttgcctccccttacccgtaccctcactatttctctcttgctaaacctagttcaaaattgagaaaaaataattgcttgggagcttgcttgaatcaagcttgattgtttggaagttgtgtttgaaggcttggagcttgaatgtgaaggaattgaggtagttttacagcttctaattttgattgttgttgctaaatttaatggttgaattcacgaaatggatagatgataatcttgagttgcatgtagttgttctatggttggtttaagcttatttgtacttgaatttttgatggagttttagatgagattgttaagtattttctaggtctaaattcatgtgttattggtgttactttgctgctggaaattaattgagatggttggttttaaagctcaagttcatgagcttgaactttgttaagttaaagcatgattttgtgttgattgtgcaatctgaattttagggtttattgttggaattgaggcatgaaatatgtttttttaactctctaatatttggtagcaactttactttgtgatttgagagtttggatgtatattgggatgatttgggtgtgtttagttgttgaaattcgtatgaattcttggtggtttctgggtttggaacccaggtaccgcggcatggtctttagcatgtcgcggcccgccccttttgttggaacctgggaattggtcccaggtgtcgcggcatgacttttgcatgccgcgacccacccttgagtttttgggcagatttgagtaccgactttgaaaatgcatatctttgtgatccaaactccattttaggagttcgatatatcgtaaaagctcgttctgagatgtatgtgattatctgaattttgaatgccatgtatatatttatgaatgtggaatcaggggttaaccttattcgtgtaaatcctggtattgt

SEQ ID NO: 85758 - DNA, 5867 bp, Cannabis sativa
  modified_base (142)..(145): a, c, t, g, unknown or other
atctctcttattttttttttaaaacaagtagcatttaatttttgatattaaaaatattaaattttaaaataaaataattaaatgtaatgcatttataccttctacgtgtctatatttacagaagtggtagtaacggtgtaannnnattgtaacattaagtatttttgctacattaaatatttaagtgtattaaatctaaaacattaactgtttattgtaaaagtaagacatgtaagggaatttaatacaataaaatacaatggtacaagccttatactccaatattatcttttaaaaaataaaaaaggacaatccaaatccaaatgagaaaagcggctaaaacggtgtcgtgcgaggctcatctgcatcggttggtgtactagcgcaagtacgctttcatttatcaattcaatgatcaaaataaattgcgccccaaatcgaaaataccaaagaaattgttatacataggaagaggtatgttttccggaatttgtgtactcggaccatgaaaacttcactgaatcagtaatctcacctcataacagcttttcttttccatatggggttgccggaaacccttgatttggctcgcattttcgcagtcatggtcagagtccaaggtcctgtaagtcactctgtctctttctctctgttttgtccttttggctttcaactctgctctaacaattaccataacttcttcgttaggatccaaaaggcctcaaaatgcgaaatcacgcgtttcaccaataccagtaagtgaaagctctattcagaagcatactttcatataaattgtgttcatcagtgcatatgcatattattttatggcttctttctgggtatatgtagctccggcaggaccactctttcggcttctggaatgttattgcctcataccctttatgactctgttgttgctgagcaactttgtggcgatggagatcgatttccggttctggttgttaccgttgcgtctgttgtcgagccatttctttcggctcagcacaaacaaaataacatatcccaggtcagtaattccattatgctgcttatattttgcttttatataaaatacgaatatataattatataattaatttgttgttaattttcagggccggccccagtgtattcctggtgttcaggttgatattatgatagaggtataatagcgatatagctaagtgcacactttcattcattcattttgtacgtgcatatgtacacttatacatacttataacaaaattttaccgtaaactaatttgtttctagtgttaggcattattatgtaatcagttgttttgatttgcagaaagaaatagggctgggaaatgactctaacgatttggatagagaagcttctcgttggcatgctgcacagtgtttaaaaatagtaagaatgtcattacttgtttgctgttttgactattaaataagcatggaaagtgttattcaaaacgttgtgatgtatccggacctattacttctgcaaactgagtgagttccaaccttaaatctcacgagaccccgtgttgttgtttcattattttcatatgtaaaagactataaaagcacatgaatgatatggtgattttatgtagaaatgcattgaatttcttgaaattgaaagtgaatactctaaatcttttgtttttttaaagatggtgtctttctaaaatatgaagttcttgaatgatgatatgtagaattcaatcaagctattattgttttttttatcaacagcaaaatcaagctattatttttaatgctaaggcatactggtcgcattgattaatagattaccatatattaacataattgcagatagtatagaaatgtctcttggcttttgtggtcaatcataaaagttatagttatcaatacttaatgtgataaattattctcaatgggaaagtgtaattgtttatttggtttgcactttatagtttcgaaatgtgtgatacagattgatgttcctgcatctgcctcggcacttcaatcactttttgaagcttctgtaggttctttagagcatggatgggaggttggttggtctttagcatcattaaatgagagccgtcaatctctgaaatatgtctcccagacacacgttagtttagtatgaggttcacctatttttttttttttggtattctttgtgtgcaaaccttatttataacattttgtcattatcatgaaatcaggtgcacccagcagagtcaggaacttcaagtcagttgggcaagttaactactagaatggccattctaggagtttctttattttccaatgtaaacttcatattcttacctttcatgtatttatatatttatttggcaacaactactctataaaaactgtaactggcaatactgctgcacatagtaattataagcatgatcagcatctctttatggacaggatgtggcaaagatctcgatatcaccttctagtaggaagggagattttattctggcagtcggatctcctttcggtgtcctgtcaccagtgcacttctttaataggtaacatatcgctgacacgttttgattaagggtttgtactagcagactagcagtctataaaattgcacattttcattgcaaaattgttgcgaacccaaacagagaaaacagatgactataggaaaaagagtggcagtagtcaatgtgaaggggtgttgatagatctcctatccgattcacttacactaggaggaagaaaaatgccactgatgtgaggggcatattgggtattttggtagctgagtggtggtttattaggtctctggattgaaaagtttgttagtagttttgaatagaatatattagagagtaggactgatttaacgaaccatgtttagaattgttatgtgagtattggctcttctgagttctgagtcttttgaactgagttctgagtatttgtccatattgaatatcaatccatgtcttactctctgtttcggtgtttttgcttatgccaattggatagatatacaggtttcatcaggtgcatcactgaaatgaaagagacatacaaagaagaaggtagctaggccctttgtgggcctgaacctacaagaacaatgctcccaatttccacttacaaaatcctccatatctactcagccaaccatgtttatgtgacttttcgaaatctccctcatgttaacaaattctctccttccgatgaggttccagccatccatccatacttcatacttacaaactgatagaactgatagaatacaactcacctgacggattccaattgattctctgatcctagatgacctgaataattggttcctaacaaattgcatagttggttgaagccaatgtagaaactgaccttttagattttaaaatttaaaatttgtgatatcatattacttttttttttatttatttctctcgtctctgttatattactcagctcgatggttttgagtttggcatttgtttcctatagttacaatctatcttcaaatttggttagaagctttttaattcacatgaaaaattggaggttactcaattaccgttatatagaaagtaaagtccaccagttagtctagctgattttctttaagactagaaaaagaagaaaagaaagtatcttatgtcgaaccctatacttgatttaaaacatgattcattcagctttacaatataaatctataaattgacggtgaagagcttttcttacgttcatattgaaaaaggaaagtaattttgtaattactttggatcttatgagttttaagtcctcatgaaatatctaattgtgagcctctatattttgagatctggatgtagcacagatcttgagattccttggaaaacagcaatctgactagtttagaaagtgcatgacagtggaaaagttagacctgggaaggggacattttaagtttgcttatgcttgttttctggctattttaatggtgatggaaacaaatcgatgatacatgttctcttttgtcttctccttactctgttagtttaaatcctgttgtgctggtgtaaactgattatcctcttgatgtttcatatgatcttctgggatgcttcaaaccagtatatcagtaggatcaattgccaactgctacccccctcgttcatcttcgagatcgttgctgatggctgacatacggtgtctacctggtgagcaattttctgttatgttgtaattgttatcttgttactgtcaacttgtcttctggtgcattatttacgctaaactaacctttcagggatggaaggtggcccaatttttgatgggcaagcacaagtcattggtatcttgatcagaccactgaggcagaagattagtggtgctgaaattcaggtgacttgattatgttttgtctttactttcataccgttctaagtttcttctagttaacacatcatccaaaactctagtgttggataacagctagtcattccatgggaagccattgcaagtgcttgcagtgacctgctgctgaaggagcctcataccgaaagaagcatttattatggtgagggaaaattagctgcggtagggagagcatgtattgcaaacagccatggccctgatggacacgttacttacactcacaaagatctgagttcttgttgtcccactcctgttgagaaggcaatgacttctgtttgtcttattactgttgatgatggagtatgggcatctggtgttttgctcaacaatgacggcctgatacttacaaatgctcacctgttggagccatggcgatttggtaaaagaactgcagatccttttataggtggtgaacatgggatgcttaattggacttcatcttacagtggcagcagaaacattcgtgtacgtctagatcacgttgacccttggatttggtgcgatgctaaagtagtatttgtgtgcaaaggtcctttggatgttgccctactgcagcttgagtcaattccaaatgaactttgcccaatcgttatggatttttcaaggccatctgttggatccaaagcttttgttgttggccatggattatttggacctagatgtggtatattcctgcaaacctttttctttagttggaatgaatctcaatctcataggttgaaattgttttccttctgtcaacaatatctgttctacctttttactttttttgtttgtttgtttttgttggggttggggtgtacagtagtaagattgagtaaatttagagtttattattattattttaaaaaaattatacttggtattatatatattgttgcaggggggtttgtcggtaggggtaaacgatgagatccgtagattctatgaatactaaattcctgtgatgtagatttgtctctcatatagctttgtgttttcaattaggcttctttccatcagtttgttctggtgtggtagcaaaagtggttgaagcaaaacttccccattcttatcaacaaagtcaaccgggaagtgcacgagggaattttccagtgatgcttgaaacaacagctgctgttcatcctggtagcagtggtggtgctgtcgtaaatatgaatggtcatctgattggacttgttacaaggtacaaaaaagttatttggtcgtgtataagttactattggcgttattacttgtaaaacaaactgctttattctgtctctgccattcttatattcattcttcaaactcaagcaaccaatcctaagaatgcaaacttctctttgaattccaaattgaatccataagcagaaactgttaaggttttgagagaagagattggcttatctcacggaggatgaacttgtctattatttatttggtcaatttgtagatggaattgactctagctgataaaacatcccgtgctggtt

SEQ ID NO: 85759 - DNA, 770 bp, Cannabis sativa
tattgaatgaagaaggatcaaccccattattgagaatatctagaatagctttggtaaccaaatcacccactatatgccagtaattagtgtagaacattactgacataccatcaagaccaggactactatcatcactcatcgacttaagggtagagaagacttcttcaacagtgtatggttgagtaaggaactggttcatttcagctgtgatcgtgcattaaactgaggaaataatatgattgagagcttctaaatcaatttcacccgtagcataaatatcgctgaaatagttttcaattgttctaccaataccctaaagagaggattgttcattgccttgatcatcaatcagagattttatagtgttttaagagcgccttttatttgctttttgatggaaaaattatgtatttgagtcaccaaatttgagccaagaaactgaagaacgctgctgctaataatcttcttcctgagttagaagttcaactaagattgatgcactcaatttcaacaagtcaaagtgagtagggctagtatcatttgagttgttgagagaggccacttagtcttgagtaatcttgattttatttggaagatcaccaaatttagggcggtgccaggaagatagttgagaatcgcaagctgagatgattttgatgacttggtcaggaggagtcgagtttgaaaccgtccagaattctgcgataaaattagagaaagtagcttcttgcagccatattttttcaaacctgaatcgggattttgtcttc

SEQ ID NO: 85760 - DNA, 713 bp, Cannabis sativa
ttgaaggtgtttaattctatattctggagttatattagagctatgggaggtgttttaagctatgtttggtgcttgaattggtgtttgagtgaattttgagtttaagaactcaaatcttgtttcttaatggtgtttttaatttttgagccatttattgtgttctagtgcttgaattggttatgttggagtgtgtacaggtattctgaagaatattgagaagtttgggtgtgatttgaggtcttaaggatattttagaggttcccagcactgaactggtcgaccggttgatcctcaaggaaccgaaattctagttggggaaccggtctgctagttgggtcatttttagaaccctatttttgtcctgtttttgtgatctttagggtatcaccatcctatacatcaatatggatatttctagttttgattttatgttctcgaaaagtgttttagcgtgtctctcaccagaggtacaaatgttgtgttatagggccctgtaaaacgtcgagctgcgatttctctcaagctaacggacacacctgagctcggaaacgaggtaagatagtataaaatatatatgtgattgaatgcttgttattatttgtatacactactaacattgagaagtgatagttttaagagtgttagtacagtgtaaggttttaggatagttacagtgttacaaacacgaatactagagggtacgtcgtgcatgt

SEQ ID NO: 85761 - DNA, 793 bp, Cannabis sativa
aaaaaaaaaaaaaacttaaaaagaagcttaagaagctgaagaaaaatttgaagaagatggagatgagaagagcaagaactaatggtaaccacaattaaaaaaaacgtgggtcaatctttcaaacaaacgaaaaaaaaagcttaagaagaagaatcaaattttgaagatgatggagatgagaaaatcagtaagtaataggtttggggtaacatgtatttaactatttttttaaaaataaaataaaataaaataaaataaaatgtctcaaaagaacagaccagaacaactacagaacaaccgttagaaaacattaaaaatatgaatacaataaaaaataaaaaatacgaaatacattacaacaaaaaaatgagctaaagagtatcaaagaagaagaacgcataacatctacaacaaaaaagggaaaaaaaatcctaaaacaactaaaaaataacataaataccttcaccaatttggatatctcaaaatcttaatcatcaagtttgaaatcagaatctgaatcttcaatgatctgttttgaacgttttgattttctcttttctagagaatgaacaactaattttcttttggaagctatagaagatgtagggctaaggaggatttttttaaaatttttcttacccattgctaatttactaacaataataagagaaaaaaaggaagaagaagaatctaaaacaaaaataaatgatacaaagaaaaataaacaaaaactagaaacatgtgtgattttttaaacacaaaatataagaaaataaaaaaaaaaaatgaagaa

SEQ ID NO: 85762 - DNA, 601 bp, Cannabis sativa
tgtaattaaaatcataaaaatcgttaaagtatttaaaattcaatacaactgtatttttgtaattttttattattattatttttgtgtattggtgaaataaatccgtttttcctttttaaatagagtccaaaaagatcattttcaaaaatagcatagccctacagtaactttgaaaattactattttatcgaggacccaattcagtattaacattttatttaccattggcacattattaccactcagttttttacagtgggtaaaatatgcctcaacactattttaccatcttgtcataaccgttgttggattatacatcacacattttaagtttacagatatacaaagacacttttaacagattgatctatactctctctatactctattcaaaaaaacagtcataatatcattattatgttgttatcattattaacaactaagatcaatagtgatgcagtttttaactctgagttgggtaaatttgggggactgaaacggtattatgtgatgatactgatttcgtcttagtttttggtgtttagacttggaattgttgtttctctcttgacattgttgatgttttgagtatctattctgg

SEQ ID NO: 85763 - DNA, 530 bp, Cannabis sativa
agtcgcttcctgcttcaacttcttaatgttctcctgaagctggacattctgcttctttaaaagctcgatttccttggaaccaacaatgaaggccttcgaaaacatagttatgaactgcgaagccaactctgcagaacgaggcataagttcctcaaaaggagtcctctcaacctttgacataaactcctcgcccacgaacttctcctaaagagctagaaaatcgcgagctcgaacagttggattgatcacgactttcttccccttgtcttgtgagggcctcgccgatttcttggacgtatcagcagctggagtaatcacgacgtcacttttccttttctgaggaatgacaagagaagtcgttgctgttccagtcttcggcttgcgattgagaacaggagcttgcttcaggaaagtgatttatgcgaagacaagaaaagataagttaaaatataaacaatgactcatatgtatataccgcatatatgcgatgtgttacctaatgttggtcgagaggtctgtttagaaagacg

SEQ ID NO: 85764 - DNA, 971 bp, Cannabis sativa
tatatataggatggagtttagagttggtgatgaatcaacatgttcaagactctactcaacccttgtgggaattcaaacaggggttattgaagataagaaagggtggatagtggaagtagtttgagttggttcaactcaataaataaaatattattaggtattaattttataataattaattaattgtattatatattttaaagtgtgagataactatatatatatatatctacatatatgggaaaatgatacagaagttttgaatacttttgtgttgtttatgaagttatatatatacctaattacattattatacttataatccttgtaaatattgactaaaatgtaatacatatgtatcttgtaaataaataaatgagtattttttgtggtaattattggccttttgtgtcttagagatgagtcaaattaataaaactaaagagaataaaaccatttaattataaatataattttcaattaaagtatatgataagaaaataaggtttaggaatcataattcatatattaataatggtttatggtaaacttcttaaatcatgaattatattttatggtatgaagtttaattttgaatatcaaagattaaaagggaagatataagagtaaatgctatttttgaccttatgttttgtaaaagttataattggatcttctgttttgttaaatgacaaaatagatcttgtattttttaaaattgtataaatatgactctgaactaattttttgtaaaaataaaacttaataataatttgatctatagatgttatgacaaaactggttacatttttgtatctattcgtgttagaaattgtcttaaatttagtgatattaaaaaataaaattgttgaaagttaagtttaaagttctatttttaccattttgaaaaatataaggtctattttattatttaacaaaatagagagttcaatgttgggttttatgcccta

SEQ ID NO: 85765 - DNA, 1233 bp, Cannabis sativa
  modified_base (321)..(329): a, c, t, g, unknown or other
  modified_base (450)..(454): a, c, t, g, unknown or other
  modified_base (570)..(571): a, c, t, g, unknown or other
gggcataaaacccaacaaataattggttaaaataaagtggcaaaattgtaactcaaaagtggtcctttagtggcgagccactctagtgatttttgcttattttttattttttattttttaatccatataatttaactctaagccctagtttaaacactaaaaaagaaacatgatgctctttctgaactgttgccttcaaccaaatcaaatctagttttttctgttagacaactagtagatgagagacacattctatacagttttcaagcctctttcattgttcttcatagttggcttatagtgatagagtgtcatgcccannnnnnnnnagtcaagtactcaatcatagtgagtaagacggtggtaaccaacccgaaagagaaaaagagatctaggctcagatcttgataatactctgggacggaaaggaacaagaattagagatctgannnnnaggagtcatattattccgctacaaccaatgtaaggttttctaaactcttatatgtttaatttcattgttttagagatattcatatttaggatattaattcaacatacttgttagtnnatttagatcctggtaaaatattcccaacaactggcttcagagtcatggtaatgatttactttcatgaaatatagatttaaaacgatgaatatgttaattgtgttgatttggatgtgttcatgttaatttatgtattatttgatgattgaatgtgaattacgaaatttttcgttctgaaaataatttatttggactccttgtgaaaaattaagcaattttttcgcttttacagaactcaatttcaatgaaaaacaaatgagatatggtggtttgaaatttttggtgcattgagtgtcgagcactcgtgcacatgcgcgcagtctcgaacaaggaggggagatgcgcgcgtgcctcagacactttgtgtcagaagcttagccagctcctagttcagacatccatcccgcacgcgcatgaaggttgtgtgcagcctgttgcacgcctatgggtgattttcacctaaaaatccaattttttgtgatttttttttcacaatttttttggattttttttttatattttcaaaccgtgaaatcaaattaaaatattatttttaatttttaaacttaaatataaatattttaaattaataatatttaatttttgatagattattattaatttttgatattttgaggtttaaatttaaaatattgattatt

SEQ ID NO: 85766 - DNA, 1205 bp, Cannabis sativa
aggtgcatcttgttttctggtagctcatcacgaaagaactccacagttaagcgtgtttgacctgggataattttaggataagtgacctcttagaaagttttcctgagaagtgtgagagtaaggacaaagcacgctaaaaatacttgtgttgatttgtagggccagtcatcagcccagaaaacagtcagagtgatatactagtgtataagagtcatgatttcatgggagaaggtccaatggaggcttaaaggggaaacgttgcacatgcctcgtaagcttatgccagtttcgtgtcatgtcaagaaatttgactcatattcacagcactacttagtaccactacaatatgttatatgagtattgatataagtaaatatttgattctacatatttcaaattaaaagattattatacaaaaaaatattaattatttacaaaattccacttcgtagtagtattagatattactggtgcatgaatataagaacgctcaatatgttgcagtgtgagcaaagtcatatatatcatttgttgaaattcaatttgatacctctagttagggatgcatattttctccataacaatgaacccgtccctaatagggtagggatatttcttgtcttaatgaggaaccgggcaaggatgggaattcttatccccgaatattaaatagggcgggcacgacactccttgccccaacggggacctacttatatattatttatctttttattaatattttataatatatgtgtttgtatttttttagtatattagtatttttttaataatttttgaagttatgttttgtataataattagtatattgaataataaaataatgtataatattttaattttttatgtaatttaatattgttagacatttaaatttttcttaaaaaattatttttacatcaggggattcccgcttcgtacctgctccatcaagagatttttcgcccttttattctatatatagggagtaaacgaaaatgagaattaaaattcttaacgagaatggggacacgaggaacactcctcgctaatttcccgcccaatttacattcctacctctagtgctacaatattcttttacaaattgaatgggggacacatacaagtaaatggtaataaaaatttttggttaagaaagaaagaacgaagttgggtttaattgtcaaagggaaatttgaaaaaatatg

SEQ ID NO: 85767 - DNA, 1106 bp, Cannabis sativa
tgttaaatttaaagttaattcttttttgtgttaaatttaaagttaagttttggctttattggattttggttctttaattcacgtatttattttttcttattttatgaagaaatctcattttatttgttttgttatctaaatttaaataaatacaccactatattaatattacattattttatgaattaacggttaaaattaaagattatattatattttcttaggcaagagtgataatttctcattttgcaccaattggctcttatgcatatttacttataattagtattttcaggctgtacaattgctcaatcacccaagctaacatactatattttggtaattcaatggcaggaagaaaaataccaagtattattagatccaaaacaaccaatctaacaacagttgattttgaacgaaccaactcctcccgcatgcacaataacaactcaatcaaataatgaggttaatgggtagaacttcaacaaatatgtttgagatttccaaagtctatttgatatattatataacatgattagtattagtagagctcgaacataaatagtcgagattataatctcaactgcttttagtagagctcgaccaatgtagtctcaaaagtcttgaaatattagtgtatagctcgactatacggagtagagctcgcacattcatgggatgtagtctccaaatacttataatgttagtataaagctcaactatcttgagttgagctcaaccatttgtgggtaaaacttgactattatatttgtactcgattgatataatattacttctttttatttaaattagtaaatgggaaatgttgaagaacaatcagaaacaaatagagaagaaaaatcagaatcaagtggacaagaagaaacaatatcagatggagaagaacaaatagaatcggatggagaagaacaagcagaattggatggagaagaacaagcagaatctaatggagatgaacaagtagaatccgatggagaagagcaagaagaatctgatggagaaaaataattagagccttcatcagtgtcacgagacaggtattttttgaatttgttcattttattttattattatttttcttatgt

SEQ ID NO: 85768 - DNA, 571 bp, Cannabis sativa
acatggacatcaatatttgacacgtggcaagaaataaaattcccgaaattgagtagtcgtgagtcatagtagtcgacctgggagggttccctagccttgcgcttagaactctggaatgggtagtggatcctgctaagttatttctaactcaccatctttcattattctgaatcaagaagacaagaacaatcaagtacaaggcctaaaaattgaaaagagatgaaacaacaccccgaaagtaacgtagtcacctagggttttcacccaatgcccaagttgacttcctaactagggtttcagttttcaggttcttcatagtgcaaatgcctcaaactttctactttgacatgaatcagacttgtcacgaacatatttgaggtattagaattagaatcagacactttcaattttgagcacctagcactcaggtttacatattatcaacctggggtgcttccaatcacaatattgaagaagtatcctaagcattttattcgtctccatccaaaataaagaatcaagtgctttcgggaaagaaacaaatcgacttggagccagcttatgttaattt

SEQ ID NO: 85769 - DNA, 758 bp, Cannabis sativa
  modified_base (681)..(683): a, c, t, g, unknown or other
taaataattaaataaatttttaataaaaaataatttattataatcttttaatcaaaatagttttttctaaaagttgggttgtactagctttttcaaaaattcttcaataagttatttcttaactccttaccaaacatctttttgtcacaattttttgagaagcaacttttaacttttccaaaaactataacaaactggccctaaatcaactctagtctctaaatgttctacaatcttattatttcagtaataatatattctattaatgataatcctacaatcaaattaatatttattagttagcagtcttataatatgtatatatcaataaaaaattataaaaaatatttaatattagttaatacaattaattaacttaatatatctctcatattaaatgtgattatttaacgaaattattagtttaacaatttttttaagttaaacttaactgttttttttatatatatataaatattaatttaaatttgaattaaacgttaattcatttaattaatcatatttctctcttatattaaatgtaactatctaacggaaatattggtttaaattttttttttttcgtgaaagttaacggttaaaactaataccattaaatcaattaattaattatctttttttaagaaaaaaattacttttaaatatctaaatttaatttannnattaaaatataacttaaataattattttttatatataaatcttaatttaaatttgaattagacattaattcaatt

SEQ ID NO: 85770 - DNA, 941 bp, Cannabis sativa
gataattgttgtggggaaaataaatttagggttttcagttttgagttttgggactgagatttaatttgtgtatatatttgtgtgtgtttatttatttcttggatttgagtttgtttaaatttagtttaagtttggttttagtatttaatatttttgtgtgatatggatttgaaaaataagttgtggtggtagtttcgttagtggtgggtagtggtgtttacgatggttatggatggtggtagtttcagtagtggtgggtggtggtgtttacggtggctacggatgatggtggtttcagttgtgttggtggtggtgtttacagtaactttggatggtggtggtggactgaagaagaagaataaaagaaaaatattactatttttttttcagaaaaatatgttatggttgaaaaaaaaatatatatctttgtttagttttaattttaattcttttaatataattatttatgtgggccaataaaattgtgccacatgtaaactgtgtccacgtggacaatccaacctgacagttaacaactaaatttagctggaagttgtaatttgctaacaatattgtagttttgggggttttactgcccaaatttggattttggggttaattgcaagtaaaataaaactattggggggttttgccgccatttaccaatattattttttatactcttacttctaaaaacactctaatggtataacacctttcaagaatgctataattatgatgtcacaaattattatctaatatattatttgttttacttataaatattgtcacactatttatttacttttaattttttatttttttaaaaaaagagatagcatcaatttcatatagtggcatcaacatacttttctatgatagcaccaatttatctccaattgtatagcatctttgtattttattaaataagcattccacat

SEQ ID NO: 85771 - DNA, 2717 bp, Cannabis sativa
taaaaatgtttaaaattccgtacaaccgtatttttgtaaattttttttttgttatttttgtatatttgtgaaataattccaatttaatatctataagtaattgatttggattgattttgtccaaatctaatatatatgatcagggtcggccttaaaatttagtgggtcatagagaataaaaatatttttaagccctcatctagaaaaaagtgtgatatttttaaaaattgataaaaaaaatatgtaatttaaaaatgagataatttttcttttttggcccctgagctaggtgggcactaggcacaagcctagtccgtctatgctcaggaccgaccctatatatgatccaatgaacacttcctaacaaaaaatccttatattttttttttgtaacttttcttaaattttttgactattatataaaaatttctgatttaaattaacgtcaaaaaaaaatataggggcgtaattttgttggtgcatattttactccaaaaagttactaaccaataaaaaacgacagcggacaacattttagtcaactatgactatgagcgaataataatatgtgaatacatgtgggcacaggttctcaccgtcggtccaatcatcttgttactttatagttatggtatatgccacgtggcttaaggacaaagcatatgttcagaatcgcgcggatgttaacggtagcttaaactagcctcttttcaaagctccccacattatccacgtcaccaaacattatttattttttttttaaaaaaaaaattgaaaaacagtttatatattgttattcttacaattcacccaacggtcgaattttcatcgatctagagagagaaagagatgaggcagagaaaggtgcggcaagaggtctcagaaaccctagtaaaggaatctacagtaggcgatggagaaattaacaaagggttcttcgcttgctacctattggtctccctcaatcctcgtcacaaaagccacacctatattgggttagtagatgcaaagatttccttaaagtttttctggttttcttaatcttcaaatggcaagatctttttttttttttttgaaatgatgcagattcacagtgaatccacggcgtcgtatcaggcaacacaatggcgagatcggttgtggtgcattccgaaccaagaagaaacgtccttgggagatggtcttatgcatctatggtttcccaactaacgtttctgctttgcaggtttaattttttttttcttatcttctcttcttgattttaatttaactgtattggtgatgagggtagcttagtttgatttttctttttaatgtagtttagtagctctgaacccttaccagtaagtaagccttcttttatccattaagcctccattggagtaaatactgttcatggaaaattagtaatcattgagtgggtaatgaatctgtcattggtttctgtctagtcctttggatgaagttattattgagtgggtaagactgttcatggaaaatttgtaatcattgattgtttataggcattctactgatctgccaaatttggctgttaaaagagtatctctttacaattggttatttgctaatcatgagaaataaaccttgcagtttgagtgggcttggcagcacccgacagaatccttggcggtaaggaaggcggccgcaagctttaaatcactctctggaattgctaataagattaagcttgcatacacaatgcttacactcccatcttggcagaggtatgctttgaatgaatatcccaccttagtagtctagtcagtcatacattgcgccaattacactatttaatgttaaaaaatgaattgtttagtttaaatgatcagtatgaagaaaagatcatagttgaggaaattgttttttaatgaagaaaatgatttggtttgattctatttcagtatgaaactcactgtgaactttttctcgacaaagtacacaaaacattctgctggctgtccaagcttgccaggacacatgagggttaaggtttgccccatggatgagcttccttgctatgttgaatgggatggaagcttgaatggaaatgaagatgaatgggataatgaagaattggatggaggagcttgtgatgctactaaattttcagaggacacatcttcagattctatacaggaaaattcagaagaagataataataatgggtttgagaagattattagtgaactgtgtgaatctattaacgaaggagaaggtagtaaaaaacagtctagcttttcagaaatgactggaagaccatcctcaaatgttagcagtagctcatttacaagagaagatattggtgttgctgaagatacagtttcctctgggattaacaaacataagaattttgaactgaaacgaccagcaatggaacaatctgcacctgtagtgattgaggattatgatgaaccacctagaaagcgttacattgtgcccagcgaagtagaggtgatagatgtaaggactccgtctccagttgtgtgcagaagtagtttgtggggcagtaacttctgtcaaagagagaggaataaagaacgccatactactctacctagtgaaacagaggttatagatttaacgagtccatcacctctgtgtagaagtagtttatgggttagtttgattgactaagactttgcctaaaagtcattagattggaaacgaaaccttgtagaagagtaagataagagaaa

SEQ ID NO: 85772 - DNA, 1867 bp, Cannabis sativa
  modified_base (1118)..(1118): a, c, t, g, unknown or other
agggcataaaacccaacatcaggtacctagaagatttttttcttagtttgtttgcttcatttttgtcttatggaaaggctccaatttggaggtaagctgcgatatgtatcatccaagttggagcgtcatccaacatgtagacttcttcttggataataatgcttggttcctctaggaactatatgggcaccaagttttctttgtcaccaatggttctgcttgccaaacgggcaagtgcatctgctgtagcaagtgtacgtctctattaggagggtaaatcaagtgtaattctcctccttgttcttctctggcgtggaagaagttttaaacttccgcctttttccactgttcctcccaaagttgttcgtgctgcgcttgtttctagtgtttttaccacaaggggtttgggcagcattgttgttgcctacctgtatgcctaatgggtcatgaggctgctgggtgcctcgtgactgcctactattgacatggcctatctgggcttgtcgtatggcttcttcaagtttgatgaagttgtctgctctattgaggaactccttcatatcatttatggatatcctcttgacatctgtctagaagtctcttagtgggagtatgccttctagtatggttgtatatcgaccttcttcagtaaggcctttgactttggtagcctccaccataaatctctaaatataatcttttagaggtttcccctattgttgtttgacttcaacaaggtcttctagctgtaatggtacaagtctcgaggacaacaattgtgtatagaattctcgtgagagcttagcccaggagttgaatctccctgtggtgagtttaaagtgccactgttcggctgtctccaacagtgtggctgggaatatgcgatagttcacatcactagtgaccttctagaggttgagctgcatctcaaagtacttgacgtgacccaaaaagtcatctcgtccagtatacatcttccatactagcatttttaactttagcagaggtaggaaatttatatatgccgagaatggtgatcccctcgaccaatcaagttcaaggtgtgaaggctttgggccagctatgcccaagatcatgtccctgagttggtccaactntgattgcacagaaggatctgttgctatggggacttgattaactggccctccttggggaggctgcagattctgaaaagagaggggctggctggtcatacttataaatattattgaacgtgcattttgtggattctaatatcttaataatcttattttacacattttatttgaaaaccatctttaattttaaatcttttaattacttgtcttttatgtttttacaacaaaatatcattaaatatttcgaactaggttagaatattcttgctctagcctgggagtgcgcgagcctacaattggcaagcctcacctagacttaggagaagaccttgagttggccagactcagggaagctgtaggccacacagcctagttgaagaaccacgcgctactgattgtgatgtatttgctcagtagagatgcaaattcctgagatgaatggatgactaggagtacatccttcaatctcaccaagcagaattagatcgccgcaaccgggaggtcaatgatctaataagatggttcaatcagaaaactgactgaaaaggctaggatctccttagggatccactttaagaaagattaccgccaagttcttctggaactagggcgaatcttcccctgctagagggaggacaaacctttcgctaaatgtcaaatggcaagaactgtcatatcatagcaaccagcaactttgggggctatccagggatccttggctcaataacaaccccattgtgtagccactg

SEQ ID NO: 85773 - DNA, 817 bp, Cannabis sativa
attattattattattatatctaacatcaatagaagaatggatccccacaaaatgagaaaaaagaaagacttgtttttgtgtttttacaattttttttgataaatttgttttacaattttgtttataatttcttttcacaattatttttatatttattttaggaactttttttttgtcattttataattttttttactaaatttgttttacaatccttttttataatttcttttcacaatttttttttatatttttttgtactaaatttgtttcataattttttttcacaatttttttaacaattatttttttactaagtttctttttttttttttttgtctttttttgtcattttataattttttttctttttatatatattatttttactaaatttgtttgaaaattcttttttttttcttatatatatatagtttcttttcacaatttttttatatttttttttactaaatttgttttacaattttttacaattattttttatattttttcatttacaatttttttacaacaacatatgtgagtttttttgttatcttttgtggtacttgacactaataatagtatgtaattatttatagtatttagcacatcccttagtattttttttataaatgacaattttttacaacaatttctgtagggttttttttaattatcttatttctttttttttcttatgacagttttattaatatataattttttatacaatatttttttaggtgaattattttttttattattattaatagaacattattatttgaccccttaagatgtccaacattataca

SEQ ID NO: 85774 - DNA, 1234 bp, Cannabis sativa
gtgattatggccaatccagctcagtccatgaccaccccattggtcacctctggtagtttctattatattttgatttttaagagtatatatacatgtgggaattatttaatgatcaatactaatattgatttttttttttttttgtttgaaatatatttatctgattttggttctatacagtaaaatttgtcataaataaagcacattaatttattatttttatagcaataaatcatatgtaaattaagtccaaattgatagaagttatattattttttactgtatttaataataataataataattcaaattgatgattcatcaaaataataataataatagaaatttttatagtggataattttgtactaattatttttaaaatgtgtgtgttaagagatttcaaaaaattgtggtagggattaatttagagaaagatgtggtaaatactattttaaattttgtgttttataaaagttgctcatcaaatttttctatttttttaagtgacaaattagatcttatattttttccaaattgtacaaaataattttatggcttatttttgtaattttttttaatataaccaaccaaattaatcaatctagttactctaatgtaaggttattattatatatgtacatgttttatttgacaaaaattaagctcagggtatattattttatacattgaaaaattgtagagtctaaattgttatttaacaaaatagtgagttcaatcagcaatttttgtaaaacacaaagtctaaaataatatttacccaaaattccactgaaaaaagtttttcattgtcaaaggttcatgatgttggaacctctagagatgatggtacgttgttgaattttctttgaaattgggagcatgatgtcctttatgtgtcctcataagagttggaataaactagacactaaaagattttagaggaaattataccgacatccattttattttattttctagagtgtaaagacttccatagcaagttgttgatcttaggtcgatctctctctaagaagggaatgaaagtattggtgattcaaaaaccatgtattcttttgaaaagaacatccgttcaaggtaaattaaacaactgagaaaatgggatgcacaggaggtaatcccttccctttacagttaaggagatcgctctcagaacaacgatcactatttgctataaccatcgacaaaagacaaataagtgtgattaaaaaag

SEQ ID NO: 85775 - DNA, 541 bp, Cannabis sativa
ggctcaaaacttaaaatttctctattgataaataacatgaaaataccctaaatattgaggaaacaccaaaacagagacttcgaaaaacttgcctaaaaaatgaaaggtcgtttctataaaaatgacatgtcatttttctaggttatttccagcaaaaacagtagaccattttgagaaaatgctctgcaattttgtgttacagttttttcaaacatctcatttcaaactcaaatcaaccctaaatctcaaaccaagctcaagaatacctaattaaggtccaacaaacataacccaagtggtagcaataaatatagttcagaattacaaaaacaactactgttgagccaagtttgagttcttgaactcaaactttctcaacactacaaccgaacctcaaaatcatactaaataagctccaaacaacttaaatctaacccaaaaaacaaaccaaaagcatctagggtttgaatagaacctattttgaaaaatcatatgtttgaactaaacaaaactttcgatgagaaagggttctagggtctta

SEQ ID NO: 85776 - DNA, 1026 bp, Cannabis sativa
atccaaagcgtagggaggctgagttccaagttagggattttgtattcttccgagtttaacctttaaaggggattcatagatttgggaagaaaggaaagttaagccctagatttattagtccctttgagaacttgaagaaggtaggtcaggtagcctatcagttagcattacctcatgccttgtatggagtttacaacatgtttcatatatatctccatgctccaaaagtacgtgtctaattcgatacatgttcttagttatgatgatattgagcttcagacagtttttcatatgaagaacatctgtccaaatcttggatagaaaagagaaagtgttgcagaataagacgattctgttagttaaagtgctacgaagaaacaacaaagttgaggaagcgatttggaagttagagtcgcagatgcaggagcagcattccgagttattcaggtaaattttaatgacaaaattttcataagaagagaatagttgtaagatcccataaacttaattgtaattatttaaagaatattttatgaaatatagagtaatatgtctattaagggaataaatgagtaaggttataatcttactaagttaatattgtgaaagtagggttattattagaaatgagaaaaataagcgtaatatattaattacatagattttattagaatatatgggttatatgaatcctattttaaaaataaaataactgtgaaaattcgattggttcactaaaaatatcacagcggtattagtttcaaataaaatccaacaactcctagttaccatgaataagattttctgttaaaacgtgatgtcttatcctgtgttaaattataagtttagcatgttaattaattttttatttattaaaaaattaaaattttaaccgagtcaacaaaattagttaacatatttaatatagtttaaattggttatcaaaattttaagtgacaccactttttaacatagaatcttaattctaattaccatttggcataaaacgattgatgttggtctagc

SEQ ID NO: 85777 - DNA, 520 bp, Cannabis sativa
ctaggtttcttctaggtgttgatctaagaggctctaggtttcttctaggtgttgatcagtttgaataagagcagggctgacttgtatattggcttccaaagtcatctgcccgcgcgagtaggaggaagccttaaccaacttaactactttccttgccaagtaggattagtagtgatgacttggacaaaatgagtaagtggacttaatctccaacaatgttatacccataatgattgtgtaatagctcaaggaaatgttataatttatagtatgtgtatttgggatgtagaaatgttataacttgaacacatgaagaactgaataatcaaacaatgcagatgaaaaattaaacaattcaacacatgaaaatacgaggttcgaacagagtaattgttgtatcacctgcctattcctcggccagaacagccccagtggcttttgatctttatttagctaggatgaatcgattacaagttgttgtacacaatgtgttctcggacacaatctctcaatgaagcct

SEQ ID NO: 85778 - DNA, 654 bp, Cannabis sativa
ccaggttgactactatgactcgggtatacttaactccttgacgtcatccttcatgccacgtgtctaatattgatgtccacatcatgagtaaaagtgtccgagttcttaaataatatatttaaaatagtgtataacaatttattttaaaaatatattaaatataaaagtctcacatcttttataaataatatttttactgtgttatttttatctatccaaaaagtattttatttattggtaattgatcaatgtacttttgtctaataattttttttaatataataatttataatttattattaatattttttcatgacaataatcaaatttattgataatttaatagataaactaagttttatatatgtatagattaaattcatttattttttttttcaaattatgaattatacattaactaatttattatttttataatcatgattacatataaaaatcaagatacgaatttccataaataaatttaaaaaactaaaaaaaaatcaaacaataaattcaaaattaaaaaattaatatcatcccaaaatttacaccaaacattattgtgcaacactctgaattaacttctagtagtaataatatggattcataaatttaataaatccttagctttaaatttttcttaaggtttaa

SEQ ID NO: 85779 - DNA, 834 bp, Cannabis sativa
  modified_base (177)..(179): a, c, t, g, unknown or other
  modified_base (741)..(745): a, c, t, g, unknown or other
gtgtcaccatcatgtgatgccatgtcagagtgcaaatattgggataacaaaaatatttcaaacgaattgacaactaagtattggatacaaatatatgttgaccaagagaagatgaagactcgaagattcaaaaatttcaatgtatactctattaaagaagcaaaacaagaagaagtnnntaattcttcatcttaaattataaataacataaaactaatattttatgaattagaataacaatctaacgtaatattttgaaataattaaacatcttatctaaaaaatacagaacttaaaatttattgaatatgtaaaataatataatatgtaaatatataatgaaacacaacgtgccttacacgtagttgccgcctagtatatatatatgtattactctcactcaagacctaatttaatatactataactctacctttattttctttactaatgcatatgttaattcatccacttctctttctttaccttctactaatgaatcatttgttttcctcttttaattactaatgtctaaagactatatctaggtaatgactcttcaacaaggtatgaaagaatttccttttcaacttttgtttcataaatatttttttggtgataagggtggtatttaatactcttagactacaccaaatcaggtttctatacttgccttagtgctagaaagtctactgatgaggttgtgattactctggcgtgaagtagtgattttggagaagtnnnnnaacttatctgaagtctctaagtctaccagagagattgaatgttaaagttgcaggaaagatacttattcagtctcaggaaagttctatac

SEQ ID NO: 85780 - DNA, 695 bp, Cannabis sativa
agccataagcaaactattacgtattgtatttcgctcttcaattatactgttattgatgtaattaaatatcgggtctaatataacttaagaaaataacttttagagaatattgttaactaatcgtgaagcgtcacttatagaaagtgatggatactattggtgtccaatagcaatgctctaatatagaattactaaaagatattattagtgtgtaacatccttctttgaattataatgttattagtataattaagtattaggtctcaaataatttaaaaaatatcttttaggaaatatagttaacatatcgctaactattttaagggtgccaatcgtagtacccaatagcaatgctcactattataaggtataatattattagagcattctcttatatatccaatagtgttaaataattatattgttattggtgcaattaagtattaaatctcaaataatttaaaaataaatatcttttagagaatatagttaatatatagctaactattttaagggtgctaattgtgtacccaatagtaatactcactattataaagtataatattattagagcattgttattagaactaataatattttttaacaattttatatatgaaatttagtatttaattatattaatagtaaaatgacataaaacaaaatattaggcactaatattattttttaacaat

SEQ ID NO: 85781 - DNA, 556 bp, Cannabis sativa
taggaccggaaccaagataaaatcttgtgttgttctttgtttgatttcgggtttgattcattgtgttgattaattggtttatgttcattactattgttcaagtgttgaaattattacaggtttatgattgaatcctcaaagttatttccgctggaattacaacattataaatgaatagatttatagttttataaatggattttttttggtatggatggaaattacaaacgtatataatttctctaaatgtatctacaaaattattggcattgaactgtttttgtaattgttaaaattattggtcttttctattttttcacttcaaaagaattttttttgtatttttacggaattctacatcaaaactcaaatagtaaatttaaaaaaaagaattaaaaaaatagtatatgaaataattatcctttaatttttagttttaattttttttctttaaaaaaaaagtgaaggtattttgtaaataaattaagtgatccatatttatgggatgtctcgaaaggacccattttgaaacaaataagaattattaaaaccagcg

SEQ ID NO: 85782 - DNA, 796 bp, Cannabis sativa
  modified_base (143)..(151): a, c, t, g, unknown or other
agtttctaggtgatagaaatctcactataacatatcccatatactatttttttaacttttttttttttcaaatttacagtttgggtttctaaggtgattgcagtgcttgctgcaatatggttttctatacgattttttgttgnnnnnnnnnttgcagcgctagttgcaataggcgattctatgtacaattccgaaaaaaatacaagaaaaaaaaattgtttttaggtgtaaaaatgaaaaagccccttatattttttactatataaatatattttttttttgaatgaaagtaatctttattagacagaaacatccgctaatacaattggctgaagagcaatgggaacattgctctcagtaaaaacacgacctgaccaataacaagcatcacgtgccatacagtgcgcgactttgttagcagaccgtttaacatgatcaatagaaacattacttaaagaagataaaaaaattgacaatcttgaacaaataaacaaaaaacagaaggcatagagaccgaactaagaatagcttgaacaactaaaatgcaatccgtctctaaaatgacatttgacttgttattcctttttatcaaactaaatgccactttgacactttgaatttctgcaattttgggtcggcaactgacagaagaaatagttgaaaatgcctcaattattcgaccatcacagccgcgtgctacaaaaccaataacgatctcatttgtggcttcaaaaaccgccccatccacattaatttttaactatcgagcagccggtttggaccagtgttctcttgt

SEQ ID NO: 85783 - DNA, 1074 bp, Cannabis sativa
ccatgaagagtctaagagacctggaggccgagaggaaggtgttccggaaggaagcccagcagaggaaggcacaggcggagaggaggaaccaggaggcattgcaggccaaggcggaggagctgaaggcccgggacgaggtcgtggccaaagcgaggcgtgagcttagggaggccaaggaggctgtcgaggagctgactgtcaggttgaagtcaatggaggagctgcatcaggcagacttgcagtcgacgaccaatttgaccgttgaggtgaaagagctcagggatttcaaagatcaagccctgaagaaggctaaaagagatgagctcctagcccatgtcgtctgcaagcattgcactaagcgcttcgatgacggcgttttcatggccttgcaaactaatggccaaaacctcaagctcgacttctatcccaagcctgaggaagtccttgctcccttctgggagaagaagaagaggcttgatgccttgcttgaggagcgcaatgggccttgtcttccacctcgaattgattaagccaatccatcatccactactacttttattactatttttttttctcttttacatttacagtctattttccctttttttagataatttaatctttttctttaaggggagacaattttaaggcacgtccccagccccttaatatttttttagagcctgttacagggtccgaacatctttatatttatgcttaaatacatactttgctttaatttcgttaaacttttggcctgttttacatttgcccatgtggtatgccttattaccacctgagtggcatgaaaaattgtttttaaggcacttagcttcacaaatataaatttagaagttgcatatacttgtctggtacaaatttactttacagagcataagtttatatttcttgactattagtaatactttcggaggtgatcggcgttccaggccctaggtaccatggtcccgttaagcttgtaggtcttggagccgatttcgtcctcaattttatatggtccttcccaattaggcccaagtacccccactctgggttcttgagtggctgggaaga

SEQ ID NO: 85784 - DNA, 776 bp, Cannabis sativa
tggtaaattgaaacatgagttggaaacccatgcgttggtggaagaggaagaaataagaggtccaataatggaatgtgctaaagctggttgagaggtgtactaatgaaagtgttgaagagagacctaacatggtggaagttgcaaaagctctcattttaatcaaaaccaacaataccctttgatttgattaataccccaacaatattgttttccttgtttatggttgttatatgttatattttttatgagatgagattcaccagatattattccaacatgtaaactatgtagttatccactctattcttattctgtcgtttccttatctagttgtcgttttttcttttctttttgacaaaatttatttatctggtttttttccttctataaaacattttattgcgtacaaattaaattactatagactatggcttttgccaattaacttgttctatttctatatgtttttcatttgaaatacaccacttcaattatattttcaataatgatgatgtttgttctgggtaatttcttggaaggatcgtagaaacacttttattactttttttctccaattataaaaaaatgtgtagtcatgtcaatatcatatatgactttgttgtgtgaaatgaaattgaaaattttagcctttttcaatatctcactaataaattatatcttttttctccctgtttttgcaagagggaaagggatagcaataattatttccaagaataaattataaatttttcaaatctaattttggtagcataaat

SEQ ID NO: 85785 - DNA, 509 bp, Cannabis sativa
ctgtgtggatatatccttgtataaggtagagatctagactagatctactatgtaaatctttaatgtcttatattgagcattatcatcttttaattaaacaggaaagtcaaattgtattgctgttgaatgatacaactaccagctctgaaagctctggagatgcttgtatgatgattgtgcaagcagctgatcttccatttgcatcaatctcaacacccacttgtgtagatttttggaagttgcatgaactaaaggtaatctttatctttgccttctttgacatattactataaacgcataaaagaatattattttcttccctgttgagattctctctctctttctgtctatttttcccattttattagttcgttagcatgtcatcttcaataaattgcacatgctatttatcgtatcatgtccaatttttcgtctttcatcgaggtatcttagtgagagaacagaatttcctctgatgaattttctgtttctcttcgtttaaaaatatt

SEQ ID NO: 85786 - DNA, 684 bp, Cannabis sativa
tcctcttccaagtgttaacaaagcatatactgctattgtacaagaagaaagacagagaaacctcactagtggattcaataattcagcaaacagttccactgatattgataaaggagcatcaggaagcaacaatcaatttgctggagctgttcaacctttcagatctaagtataactgtactcattgtggaatgaatggtcactcgattgagaggtgtacaagctgaatggatatcctcctgcacataaataccatgggaaatttcctaaccgagatgcaaagggaaatactggaaaaccagcaggagttaacttctcaggagctgaagaaggaaaggctgatgaaccttcaatggaaagagatcttatctctagcttgtcaagtgtccaatgtcaaaagttgatggctattcttgctcaaaaggccactgagaacagcactcaaaatgcatctgaagatcagcctgttgtttcacatttttctggtatgaaaatctctactcctagctcatattggattattgacacgggtgccacacaccatgtgtgttatgatatttgtttatttaaaaccactgctgtcaataccagattaaaaaccgttttgatgcctaatggattgcatgctgagatttcttgcataggaacggttcaattgagtcatgaacttgtccttgaaaatgtc

SEQ ID NO: 85787 - DNA, 794 bp, Cannabis sativa
  modified_base (521)..(532): a, c, t, g, unknown or other
agtagagggtgcatcaatacattccttttaagggggtgcattgtagaatcaccctattttatatactagttagttacttactagggtaatatttaaatttaaagaaaaaaaaaacgaaaaaaaacccaaaaaaatattaatggaattacaataaatataataatttaggatattaaaaacactttatatagagtcattttttttagtccatataattttttttttaagtatgtgtgattattttattttatgttcatatttaatgttatttttttatttattaagaagagttatattagcaccttataaaataataagtactttataattaaaaaaaaataaataatttttttaacattactcttaatatttttttaaaattttttactcacattattttatgttaattttaatatttatttcgattttatttttatatgattttctaatcatgtatattttttttatttttttaagaaaatttatataattttttattttaattttttttgtcataatannnnnnnnnnnntttatttttgtttgataggtatatttattaagaatatgaattgtaataaaaagttaaaaaaaaatattagtacatgaggtgtttttacaaattttgaaagtataaataaaaattttctttatttattttttataattatttgttaaaaagagtatcacttttctcctcacttctctcttctttttctccctctctcactctctctaaaaagtacttaaaagttgttcctcacagaatccaaaactacaaaaaaaaaaaaaaa

SEQ ID NO: 85788 - DNA, 583 bp, Cannabis sativa
ctcggttagcttgttctaatttttgcaatagctactggtgtggtagtgttttgggattgtgccttcacaactgttgttgcctagttgccttgagccacttgtttgaataaagagttttgctttcaaaagaatatatatcatttagaattcctagattgggtgggtcatgtggaggcaattctaatctccctttactcccatatattattaagcattgttattgaacataagtggtacttagtattttttagacgtgtcattttatcattgattagcgatacttcttaaaagttattatatttaattatatgagacttgatacttaattacactaatagtgacatgacattatataaactatatgacacttgatatttaattgtactaataataatatttacacgtaaaaagataatagtgaacaataatatcatttagcatttgtccatattattacacgaaggtacaagtagtcaattggcgtaaatatataaatatagaggtagtaaattaatgtgtggtggaaagaagcacataaacaactcgttcacggcgcttttcagcaaaaaaaaaaaaaagaaaa

SEQ ID NO: 85789 - DNA, 681 bp, Cannabis sativa
tttttttctatttttacgttattattattttatactttctatttttataaaagtacttattttgcataaatataaattaataaagttttcactataggttttgactttgtgtaggttttgactggtgcgatggcaatggaacacctgttgttacatcgtcatagcctttcccggcggtatcttcttcttctccggcaccggcatcggagacggtaacaacagcaagggaataacttcggacactggaccagagtttgccttggaaaagctgcttttcttgaggaaagatctgtttcgttgttatgtacaagaatctggtcgaaggggttgtaaagactcaacctttagtcgaaacagtcagactccatgaactccgaccggtgccgccgctgtcggcaccggagaatgattagaaagagtttgagtaccttgatttggtggataatgatggttcgtgggttaaatataattatataataatatctttctttttaaaaattaaggtgatttattccttagtgttatataatttccttttttaatggttaattagtacatgtaaaatatatacttaaattttttccatttatatattacatgattatatcaaataggtatataccatcttttttttttgtgcttacagtctagtaggattagatgtgaaagtcttaaagttat

SEQ ID NO: 85790 - DNA, 1175 bp, Cannabis sativa
tattgtgattaaaaagttaccacgtatttttttttttttgtagtgggttattatataaatttgggttgtgatttaagttgctatgtgttattatgtgaatttcgtccgtaaaaataccaaaaaaaaaaaaaccgctttgaaatgtagaaaaaaaaatcctcactaaagtaaaaagtatatgtatctataggatccaatatcaaatttatatgtttgatgactattttttagaaaaattacaattaaatatttataattcgatatttacatttaatcgattaaaaagttaatattattataacccgactaaattgaaaaaatagttttatataaagtaatttgcggcataaatacttaaatttaattttcacttgtaaataaatacttaagtttaatttttaatagtaataatatctaaattattattttagaacttctataggtacatgccaccattaaattttaaggggggcaaaaatatattcatacatgcaattagatataatttaacatgagtgcttaatatatatatataatatatagcctacaaatatactactagaccgtttgttttaatgttctttgaaaattttttacattcattattatagttaattaaggggtagttagtaacatttgatagaaataaaactacatatatatagtaaaattaatgagaacaagatacctcagtattttgggtggggagctaaggctactactacaaaaaattttatttttaatcacaacaaaatttgtgactaaaagtaaaaaaaattgtaactaattataaatcatcatttctatgttgtgactaaaaagtccgtggttaaaagtattagtcacaaaaattacaatttattgtgactaaatgtgtttttagtcacaatacttgttgtgactaatattaaattagtgacaacttgtagctaaataccgtgttttagtcacaagtgataagcttataagtgctatagttttataactttcttatctaatcttatattttatgtaattttaaccttatataatagtaacaatttagttataattttgttacgtgctaaaaataaagaaatttctaccaatagagacaaaagtgatgtgtctatgatataacttttctatatattgttttagtgattatatatagtaaggtatatatacaacaatgg

SEQ ID NO: 85791 - DNA, 840 bp, Cannabis sativa
gtatatatcataaacagccatcttgcggatatgggatgagagaattgttgaggggagaggctttgtaaaagcatcagccaattgtaatgtagtgttgacagggatgagacgaatagttgaggccttaatcttttcccgaatgaaatgacaatcgagatcaatatgtttagttcgttcgtggaaagttgggttgttggcgatgtggatggcagactggttatcgcaatagatgaaggcaggagctggttggctgatttggaaatcagttagtagatattgaatccatgttatctcactgctggtgcttgcaaggggccgatattcggcctctgcagaacttttagaaacagtagtttgtttcttcgttttccacgatatgaggtagtcgcctataaatatgcaaaagccagtgacagagcgccttgttgtggggcaagcagcccagtctgagtccgagaaccctctgaggtggagtgatgagttggagttgtagagaaggccctgtccggggctgccttttaagtacctgagtaaatggtgcacgacttgcatatggggagtgcgaggagatgacataaattgacttaaagtattgacagcgaatgtaatgtcaggacgtgacaaagtcaagtataggagccttcctataagctgtctgtaagtagaggggtcatcgaggaggtgtccttcttgatcatcaagtttagttctcgggtccattggggttttggcaggcttactgcctgtgtagccagtgtcctcaaggagttgaagtgtgtatttgcgttgagacagaaaaactccctcttttgatcgagcaatttcaaatcctaggaaata

SEQ ID NO: 85792 - DNA, 620 bp, Cannabis sativa
atttcttatttggattgttggagccaaagttgtatttggtgagggagagtcattgttctcatgtatgatagacatgttaaggattgttattatttgttgaaaacatgcatattctggataacactcttatgatatgttgtgtctgcacacttgttgttacaagccagtggcttagtcttagtgctatgttcgagttgatccagatcagtagttatcattatgttttatgaatctcagatgtctcattatgcattatatttgtatcttgtcgatacaatatgatgcataattagttttacagatattagtgtttcttgatatttctgcatgttgacactattgcatagtgagagcacatatatgtgtaattatgtagtccaagtgagagaatgttagaatattttatgtggactaacataattaagtgttgctcacttagtgtcggtattagcatataatgataactatataatcggtaatgcatggtattaccatctggccataatgggatggatataacgtactaaaacacttggggcccatgaacacgctctaaaacgggggtaagttaaaaaataccacttttattaatcaactaatcaaatttacctctaatttta

SEQ ID NO: 85793 - DNA, 538 bp, Cannabis sativa
aaatggctaatggaataaattctgtactttcattttcacaattgtttttaggaaaatcgactctttaaagatcattattatatatacaacattgtctaacgcaggaattatcatcattctcataattgtcaaaattttatcaattgagttgagatggtcattttatttttttgaaagacaacaattttcatttgaaagttaaaatggattacgaccaataggttaaacatacagactagcacaaatctcgaatacaagtaatacacatcaacacaatacaataaaaattcaaacatgaatacttatgaaaaaaatcacgtctaaacattcaacaacacaaaccactagtgagctgtcattagaagaacacgattaggcaacggttttttttttttatttaagcgtttatatattacaaccatgcataatttgggactcgaacttaagacatccaacacacacgcaccctcctatcacgcacattcctatggccacttgagtgtgcctcaagtgattgattaggcaacaaccaactgaa

SEQ ID NO: 85794 - DNA, 1112 bp, Cannabis sativa
tactttcttagcaaagtacttcttttgtagaacatgatatctcgttcaagcttgatgagttccaatcagatgtagtattcttctttttccaacgcaaaaagaagtcttccgcatgattcatttggaagcgtttgcaactcacgtacgggggaaatattgattagaggatggatgcttcttatctacactaatatccaacatacgtgtatccatgtcatactttgtatcctccagctgtcgtaggatttgttccacaaatggtgtatcaatagaaatctgtatttatattgtagaaaaaaatggtgagtctgtgacactcaagagtccatctataaattaagatatcatttattatatcaaatttttattagagcaattcttcaacttcccatacattaattggcaagtttgattattttaatataaccttttttaaaataaagtatttttatactaattaataatgataaaattattaagattatttaagtagtaagtagtattcaattaaatatttatttaattactgatattaatgccaataataataattataatgaaatcatgtaagacatataatataatccagtatgctttatttaatcaaatggaaatctacatatgggacaatatttacttgtttgaagccacttaataatacaatgatcatgatatatgtgtgtgcaaggtagcatcctagattttagacaatcattaacattctcaaaataaattgaacatacaatttgatcatcttttatttccgctttttccaacctttccatggactcttcagtggctggacgaaattaattttgtcatcatcgatatcatattgatcatattcagtttcaccatcgtactctgcgtttccaagataaccaatagcgttggtgtaaacttttatcgcaaaattgcaactcgcatcaacccatttctcttttcgcgtacttaatgattgtatcagatatattaaaaaaaaaggagggagatggacacatcgaagcatctcttcaagtttatctttagccacaacgcttccattgtccattaatagcttacgtcgaaaaatgacattacttgaaaattccagtgtcggattgccgttgttc

SEQ ID NO: 85795 - DNA, 962 bp, Cannabis sativa
  modified_base (921)..(922): a, c, t, g, unknown or other
tgcaacattctcaacgttctcgtcatttgaagtttgtaccaagttcaaagctcctatgtggacaaaggaagatataatggaaaatcatgagcttactacttatttacaaagtaaggaatttggggagatacagcttagcaatttttatgaaaacaaggaagaattgagacaagtagtgggtaagtttgcgcttaatatcaattttgagtggatggggaagaagtcaacccccaatgtattgtacattacatgcaaggatccagattgtaaatggagattgagggggaggaagaagatacattcggacaactttgaggttactgtatttcacaacgaacacacatgtaacctgaatgtgagacgttcagatcaccgtcaagcagcaccatgggtggttggccaccttattaagggaaagtacacccaagatggaactaagtacaaggctaaagacttatagagggacatatttgacgcctatggtatctagatgagttatgtgaatgcgtggagattcagggagaaggcacttacgtatgctaggggtacgctggagttttcatacatgaagctacctagatacttgtacatgctggaatagaagaatccaggtaccattactgacttgtatttagaggatgagcggttcaagtactattttatatcactcggtgcatgtagaaggggatttactttctgtcgtcctattttgagtatcgatggcacattcttgaacacaaagtatggtagtataatgttagttgacgtggcatacgatgccaacaaacaattgttttcggtttcttttggtatcattgacagtgagaataacgactcttggatgtatttcttacagaagttaagggaagcaattggggtgattaaaaacttagtgtttatgtgtaaagaccgcttagtttnntttggaaattagcagttaatcatatttaattatggaaaat

SEQ ID NO: 85796 - DNA, 687 bp, Cannabis sativa
tagcaatcactagggatttaaaacacatactcatgcattaaaatccaacaataaacccccaattcagattgcataaaaatcacaaaattcatgcacaatcatggcaacacaaagctcttgaacaagagttcatttccaacaactcaaaccatttccagccatgaaaatatcccaaaaatacatgattcaatactagaaaataccctataatcagaatccatgctcaacaactcaaaccaagagattaacatgctcaaactaatcaaagaaaccattatcatgcaacctatcatcatcatcatcatcaagaacatactttttaatcataaaattcagcaattaatacaaggttaagatcatagaaagctatctcaaaatcaccacaagggaagaacaaagatttctcccaaaatttagcttccaatcaaaccaagaatcaagcaattccacatgaaactttgaaacttcaagaggttagagagagagagaaagtgtgatcgggtgagagggagacaaatccagaaaattcatcctttatccctcaaaatcaatttaattcaatgaaactcaaatatggtgaaataaccattttgcccctagggcttaaatacacacatacaccctcacaagggtaattttgtcaagtcatactcaaataattctaaataaatttcagattatcaccca

SEQ ID NO: 85797 - DNA, 807 bp, Cannabis sativa
atagtatttatgtggataattgagaattcatgtttaattagttataattttttaaatgaaaatatttttaaattattttccatttcaattttatattatattttttttatagtttgaaatttcgaataattttcaagttatgatgtttagttgagcttgacgtctaagattaaattgttaatttcaatttatagttctcatatgataaaaataatacttctattaattattttttatttttaacttacacatatactttatttgttttttattcaaaaaataataagcctaaacaaaactgcgcaaagtgcggtattattccctagttacataatagtcattaggggagttggaaattcctccagccagttacaatttgtgtttacctaagagcaaacttagccaacaagtgagcctcattattagcagatctataaacatgtgagatttgagctcatggaaaactagatacaagaaaattaatatcgtttaagatacaatgaaatgcagtaagataatgagcccatgaccttaaactttggactaccataagagaatttgtttcaataatatggactggtagttgaagagtgagcatccatttgagagcccaaacaatcgctaaagcttccatttcttcaggtttaacatgccctctcataggcttagccatagctacaattacatctccattagaattccttagcatagctcccaaactaaatttacatgctgaaatattaatcccagcatcagtatttaacttcagtcgcctagatggtggggcttgccatttcggttgagact

SEQ ID NO: 85798 - DNA, 943 bp, Cannabis sativa
ttgacatatactaaatcatgttccctgaactttcatccacgttagactttttttactaaaattaaacaaaagttcttaaattcaataatctcaatagtccaaggaacatttttaacgaccctaaaaattcaagcagcatgatttgatatatgtcaaagtttgggggtataaatcttaattagtcaaaaaaaaattatatatatattttgtcatatatttgctttattttttgagaaatttacgctgggagactaaaatttgaaactaatcccataaataacactgcctcttttatttaaaccataatgccgtggtattttaatttatttgaagaacgtgtatacaggccaaagataagcagcggcatcaatgcaaatgggttgatagtttggttttcgttttttctattttttatttttttgctccttttttaattttctaaatagaaatataaaattattaatagttttctttaatattaaaaaaaacttcctctattctttttttcttctaaaaaaatttaaaataccaactaatttaataagtttatattatttttatatataattatttcatatttaaatattactaaattatattttaatattataaaacactttttaaaagtttctaaaataacttatgaaaaaacaagatattaccttaaaaattctagaatagtgaattcaacatgtcaaattttaccctttaacgaaatttaatgtaccaactaatttcataggctgctaaaaagtattttattgtatactagataatatcaatatcaatatcaatatataaaggaaagcaccaaagaatttaagtgacattccctacatttttttattctatttttcttaatttttaaaagcttgacattttctccaacaaaataaaataagagatgtgttgcattaattttgcacattaattttgtaacatt

SEQ ID NO: 85799 - DNA, 727 bp, Cannabis sativa
aaaaaaatggcagaagaaggagaagagacgagcgggtgagggagagaaagattgagaattttgtttttgtttttttttttcttaattagttttctgggttttttatgggagtttctttggttttttttatgagagttttctgggttttatggcttatgaaaataatgatttgtgttgataagaatgaaatggaagtggaagggtttggttgaaattgggagagaagccattgttactaggttttttatttttctgggcatataaaagaacacgaagaagaagaggaaagagaaaagggaaaggaaaaaaaaaagataaaaaaaataatttttttatgatttttaaataatatattttattttttaaaaattattttaattaaaatataatttggaccaataaaatttcaacacgtggcatttttaaatgagtaccggctcagttaaaaaaaaggactaacggacttacgaaaagtgtcaccttgaggattattgtcgctattttttgacgttagggacttatttgcattaaactgaactttttagggactttttttttattaaactttttagggactgttgctatatataactttttttttttttttgaaaaagagtgttatgggattcgaactcatgtcattttatagtatgtcatacaccttaatcaactagtatatgaatatttgttatatacaatacacttaattttacttaaataaaagcct

SEQ ID NO: 85800 - DNA, 1106 bp, Cannabis sativa
ggctcacgggtgctctactgtgcaggagagggtaaagttgtttttgattagccatgagtatgggagttgaaaggggaacgtacatgtttgggccacactagaccaagcaggttagggtctaccagtgatgtattttgtgactctgttttgccgcttgcgtcggccaatggaaaaggactattgtaatagctttttgtaaatatttttgggatcccaacttttggaacttttaatttgcaaagtttaaattattagaagtttattttcattccgtttgttattaaagtttaatttctgcgctgattttattagtaatctcgtttagggtattagggttttgtaagtatctttggtagcgtgcatattatttagggtgttacaattattgacaatttgtaaaaggtttttctaagatttcgatgacattaataaaatttactaaagagaacagtttacatggtctgacaagtgtgaaacgagcttataggagttgatgcaatgactgatcacagcaccagtgttagctttaccatcagattaaccaaagtttgttgtttattatgattgataaagatagggtctaggattcaagctgacaaagtcatagcttatgcttctcggtagtttaaggattacgagtagcattttctttcacgtgactgagaacttgatgttgttgtgtttgccttaaatatatggcgacaatattcgcacggggagaagtgtgagatctatacagaccacaagagtctcaagtatttcttcacccaaaaagacttaaatatgagacagagatggtggttagaattactcaaggattttcactgtgagattttatatcatcctggaaaagccaatgtagtagtagacagtttgagcagacaagatctcgagtaggtttttaatactaaagtaatatcatctcacttggcgtcagacacggttaaagaatgaattgagttcatagttaggaaactacataacttgaaactttaatcaaatttgttaaaaggataagaaaactgcagtttgaagattctgagctggtcaagattcaagaggaagtattggcaggtcagcctaaggacttctcaatctcaaataat

SEQ ID NO: 85801 - DNA, 861 bp, Cannabis sativa
cgaggattttagctacttttatgacagaaaaagcattggtcaagataatggcttctactgttttagcaaatgggccaattttgagataaatggggtagaaggcacagtttccaatatgggggattggaagtcaaaattggttttatgcgtttaagatgttaggggtatggattgacttcaatcgctgacctcgtatgtcgcatacttttacacttagcttttattcttgttattttatagacactaatatctacttcacgcttgcaggtagacctactcgattgtattagacaaaagtcatgtggaaatcactgaagtgttaagtaatcttccagttcaagatcacgattgccatttgttgtgtacctctgcaaagttgcgagaacacaagttgattccacctgacgctaaacttcagcgagaaaaatatcaggtaatatgactcaacaattactgataatattatcttaaactttctcaaattcttacttttgtgtctctctttgcagatatgactttcttaaagtaggctccctcttttacccgcaaaccgaaggtcaacatcgcgactcctactacgacatctcaaaagaggaagagtgaagtcaccaaaactcctgtggtggatttgtcgaagaagcttcaaaaagttgcgcaagacaaaggaaaaaaaggttatgatggatcttgctaccaaagctcgcaccttcatggctttacaggagaagtttgtgagcgacgactttgttgccaaagtcaaaggggctcctactgaggaccttttatctcgttcagctgaacttgccttgcagatcatgacggtgtactcgcaggcccttggtgcgagtatcaaagatcttg

SEQ ID NO: 85802 - DNA, 2121 bp, Cannabis sativa
  modified_base (1097)..(1100): a, c, t, g, unknown or other
atgtggttgtggtctttgatgacttaggtttagttacaacaaagagttcttagaatagtccatgttggttctggtcacagaatacaaagctcataatccatacattaacatagagattagatccattgacagaaaagggatattaaacttgtgaaagttatactgtattatccaatgtattctggaaattgaaatttaaatttctgttgaaatataaaatttaaaatcaaatacttaaatttataccaaatattcattgagtagttattctttcttggaccaccacttctaatgtaactctaattttaagttgcttatagtaagcataaagaagtaggagattctttaagatcgaggatttatatcattttgggattgaatatttgaaatatagtcatctacaccatttaatttcattgaagaaaatagaattacatcataagcaaatgacttagaaaccatttatttaatgatataatatctaagcaatttcttagtgaaaaagctaataggaaaaatataggataatttcgattaaaataagaatccaacgatgtcctctttaggcaagagtcaaaattattcttattttttaaacttcttcattgtttcatattgtaaacaatagtctaagctgtcatctttcgatgtataactagatgtcgcatttacaaatattatctatcgagatctaacactactacgttgtttatcgaatgagaatcctctgggatttgtcaccttagaacaaccaaattaagttagaccaacaatgaagactcaaaatttataactacaataattaataataaaaaacaacatgaaggttcaatataaattcatacataatttagaaattatcatacatttagcacgtaactaagacatgtaaaaatacaaaactatcatatcttaaataatttcaaaggtttccaacaaactgatacagtgtcccgataggtaagagtcaaaaatatcattcattggatatagtagttagctcatctaaaaaggacatcattctagcaatcttttatttgatcaaataagaatccaatgttgtctcggtaggagagagtcaaggttattcttatttnnnnagcttccaccattgtttcatacctgtaaatttatctttaagtagtcagcgtaggggggagtctaataaagataaaaacttacaaaatacttatctttaaagatctttactttgttaaaatgctcaatgtaagaccatccatatggggggacgaagtctatagagcatctcgaaggtcccattgaaatattaaccatgtaagtctagttgagagtttgcatcgactcaccaacctgaacaaagaatgtccgaaagactgctttctgctaccaagaatcgaccagctcgtagatgccatgggtggccatgaagtcctgagttcatggacgcatatttaggttacaattagatcaagatgcatccactagattaggagcacactagcttcatgacgaacctaggcctttaatactacaaagtcatgccattcaggctgaaaaatgcaatggtcgcctatcaaaggctgatgaacatgatgttcacagatcttattggatgcaacatgaaggttcatgtggatgacatgcttgtcaagtccaaaaaggttgggggtcatgtggaggacctaagcaagtgcttcaaaatccttcacaactataacatgaagctcaacccccttaaatgctctattggcctaggctcaggaaaattacttggcttcatagttaacgccagaggaatagaagaaaatctagacaagatcaaagctcttgtggacatgaagtcacccacaactgtcgaggaagtataaagcccaacaggacgcattgctgcaatgagcagattggtgtccaagtctataaataattgcatacctttcttcaacattctaagatgcaacaaaaattcaagtagatagaggaatgctaaaacacattctaggagctgaagaaacaattggcccaaccactagtgttgtctaagcacctatacatgaagagctaggcgtgtatcttgcattcataaagcatgttgtgagtgttatcctcacaagagaagaagacagtgtacaacaccctgta

SEQ ID NO: 85803 - DNA, 925 bp, Cannabis sativa
actcaatgtccatatcagaattgtatttttttttttgccttattggatatgaacttgaacatagtatcacaaaaatttaattatttttccttttctcagcttttgcagatggttccacaatgataattctaactacaaatcactttacaattcatgtcacttacaggggcagtgaattttttgttggttttttactatagttaatgtagcggaaatatagtagtttcacacactgttggatttgcattcccaataactacgatctaaactcacttgttagccctcgagaacacttggcagtaatgccaattacacacacagtaaaacacagttttagatctaaaatatgaatgtatatagctctcttatttaatgtaaaagtatttacaaaaatgttagttttacactgatatagattggacctatttatagacataggcctaaggatacaatttagatagagcggttaagttagttcataactaacttaaccgccactatacataactaaaactacacgtgtaaagatgttccaatacatttgtagtcaacctaggaacctacaaatctccaccttgacttcaaatgtacctaggttgcaaaaaatttaacactttgatagcatagcagatccttgagtcttcactctgagatctgcaacagattaagacaatgttgaaacttatcctttggtaaagctttggtgagcatgtctgatggattatctttagttgagacttttaggagcttgatctttccatctgcaatagtgtcatcgatgaagtgatacctcacatctatatgtttggttcgttcatgaaacacttaattcttgctgagatgcaatgcactctgactgtcacagtatacttacactatctcatgttaaattccaagttctcttgtgatgcctttcatccataga

SEQ ID NO: 85804 - DNA, 744 bp, Cannabis sativa
attattattattattattttagtggaattcataatggaataaagcacatgaagtgtgtgcattcagttgctatggaggaattcgtaacttgtagtaagggtatatttggtagttcattataaaatagggtatatttcaattaaatttattttagaattatttttggtgaatgtgtaataaaaagaggtaattaccaatttatctcgagattttacgtgattcaagtgttaattaactttagtccacgactcaacgtattaggcagaattgctttgatgcattacaatggaatcttacaagttcaacaactctaacttcttgctatattttctcacttaggtttttttggcttagaggagaagagaacctaaagagatgtgaagtgaattgtctctcttgcatgaagatataaagggatatttataggctaggatccagatctgagcgtacccatgacccactaggtcgttttgtgcaaactagacccactattggggtaaatacatgatatattaattataagagtataattattaaatatttaaaaatttcttattcatatagagaaagtataatcttgtaaggatgtgcaagagaattaagattatacgatataaataaaataattcggtagtgtgttaaagttctaggaatcttcaatatggaacagctaagtacagtttactatacactatacttctagtgtgtgtgtgtgtgattttgattcgaatcacatatatagat

SEQ ID NO: 85805 - DNA, 968 bp, Cannabis sativa
caaatttaaaatttaaagaaaaatgctaaaatcatgtttagatgctaaaataatattttaatttttatgtagtttaatatttttatatattctcatcctgtcttcgtttctattcgagaattctttgttccatctctaataaagaataaatgaagatagaaattaaaatttttaacgaaaataaaaataggagaacatttccagacatgttgtgtccctagtcccaacctaaactttttgaaatatatattatcaactttttagtttggctcttctttcccaacaaaataaaacttttcatttgaatttgattattaaactactttacacacttgtactttcttgttgacttttttttttttttttgttttgcttttagagtgttcatttcttttagaaaaatttacaaaaatactaatttttgacttatttttagtaaaaatactgtcacacagcagaaataacttttatttaattttttttttcttatatactgtaaacacaaaaaaaaaaaaaaattagaccttcatcttccacactcacagacagaatcaccatcgaaacaccagaacaattggaaaacaaccatcaattctggtgagattgagaaaaaaacagtgaaatcgacgtcaaataaataatcatgacaaaacaactgtaaaacaacactaaaacaaatcaaacaaacaaataaaaaataattaaaaaaactaaaaatattctgcacagcttcaataccaaaatgcaataatgttaaaaaatctcacccgtatttatagcactaataatgagtggtttttattttaaaaaaatgagttaatgagaaataaaatctctattctctatcagtctttttttttttaaaaaaaaaacaaaaatataaagaatagtatgaaacgatcaggctaaaaaggaccaaatttttttagaacaaaaattctgaccacttttttaggcctacaaacagt

SEQ ID NO: 85806 - DNA, 1660 bp, Cannabis sativa
  modified_base (836)..(850): a, c, t, g, unknown or other
gtgcctcgaaatcatgaaccgccaaaattcaaaagcatgcaagttttaaaattgagttaagacaaatatacccttgtaatatttaaaaatttcattttatttaaaaaaaatttttaaggggcaattgttatacccaaaatttggctacactttagagggtgacacatgtcaattagtggaatatgaaccacttggtataataacgttatatcatttaatgcaaaaaggaataactcattaaatatagaattagtaaggtatatttataactcgctgactgtatagtcttaagcgagacaagaatataaaactattgatacatgtattgacgagacaccaggctgcctcagaatacacaaatccaaagacaagattcatttattttaaagaaataagtgaagttactcaaagcaaccgcagacaatatgtagtgaggcatccacctcgctattcataagaaagattaatgaggcaaatcagttgttaaacacttagcgtattttccacattacaataactaagtacaacaacttggaaatatgcaaaagacatgattgtccaatctgcgaggccttttggtcaaagatcagttcttaagtttgctcagtacactagtgctcatgccattgctggaaggtatataattgtccaattcagtattgatcatctacaagctaagcaaggtgctattatccaaatcaacatctaccatctttgaagataagaacaataaacagttatgcgattatcaattgtcatccacacgtgtttaaatgaaacgtgatcaattctcacgtttcatgaaacggttatgtattttgaatttaaatgtaaannnnnnnnnnnnnnnattcctataaataggggcagatctcactattaaagagggggacgaaggatctttgagagaaatacagaaatactatcaattgtatattgtattaaatactcaaaaagatctcgaataagatagactcgtggagtatgcagatttaactgcaaaaccacgtaaaatatctggtgttattactatacttattatagtttattaatttcttataatttctgtgttaaatttattacgaaaaaagtttattattggttaatgaaaatttgcgttaacactaacaaaaacaagagaaaaaaaaaggaagaagaagaagaaactcaaacaaaaatggaagatacaaagaaaaaaaaaattagaaacatgtgtgattttttaaacacaaaatataagaaaataaaaaagaaaaatgaagaagaagataaacagggaaggagaatggaaaaaaagctaatatatccacacatataaaatgcaaaatgagtaagagaggtaaacctcacttttaatcatcattaaaaaaaaaaaaaattaccacaggcgtgacataacctatcacctcaattatttttatactttttcatacaatataaatgtattgggagacacatagcaacaaaaaatgtaaagaaaacatttttttttaaacaaaatgtacatagtatttaaataagacagtaaattgtaattatacccgtgctacattaaaaatgaaaaaaaatgaaaaagtcagtatatagtgtaaaaactcattttattttatttaactgtttaattggtatatgacgtgtaaaaaaaataattaacactaat

SEQ ID NO: 85807 - DNA, 608 bp, Cannabis sativa
tgcttcgttgttggagacaagaaactcaaaacggatagcactttggagttgatgtccctgaggagatattatgataattcctgctccatctctttttttttttgtttgatgctccatcaacatagaccttccagactggaagttttgggactagctcgttcgagtgatcgttcattccagaacattctaccacaatgtcagctaaagcctgccacttgatcaaaacttgaggctgatactagacatcaaactggctaagttccatggcccatttcagtagtctttcggatgactctgacttttgcaacacttggcagagaaggtaatttgttaataccttgatgacaggggcttgaaagtagggtctcaaattttgtgaagcaattaggaagtaaaaggatatttttctatcatggggtaattggaattcgcgcccatcaatcttttcctgatctaatataccggtagttggactcatccttcttcttgcactagtgtggaacttatagcatgatcagacactgccaaatacaggtataacggcactccctcaactgacttagataaaattggagccttggtcaaatatgttggattatgttttacca

SEQ ID NO: 85808 - DNA, 1140 bp, Cannabis sativa
tatatactagtggggagcataattttatgtttacagttaataatttttagagcttaaaattattatccaatgatcaaaataagttactgtgaatatataaaatttcacatatatagttaatgatttgttatagcattaaaataattaaattatttgatattgtgtgtaggatcatttatttttgatattattttcttttacagtcttatattatttactgctattgtaaataattaattaaatatattagtataatatatttaagacgattatagttgattttaagaaacttaaatatagtgttcttataagtttattggtctgggcttatttcatatttagagattattttttgttcgtgaaataataattcgacgcttgaagttatttttattttatataattaattaatgatttaaaaataaattaattaattaataattaaaaaaatgaataattattttttggtgatcgatatatattcacttgttaagaaactcaatatatctgtacacataactatttaattgatttaatttaattatatttttattacttacaaaaagaatagctacttaaattaatataattagttaataattaattatgtaagtttatattaaatgattatatttttcttacatcaatggtcacgcataaagcataaagcaaagttcaagaaaataaaacatgagaatatatcaatggtttataaatatagggatatgattttgtcccgtgatgtgcttttacagaatgtattacgtggtacattagatgggtctcagggtacattaaatgagtgtcagggtatgtttctactttttaaccctaattactcctagattaatctcaatcgtcagatcaaataactctctcatctgacggttgtcgtacatcagggattataattcgtgaaagtacaaaaacaggacaaaatcgtactcctataaatatatgtatttacttatatataatatatattgtttgaatgaattgagtaataaatatatgttatttacttatattgagtaatagaattgaatacaaaatgggtgaatataaaagggaaatttgattttctatacttagaaaattttaaaaaattttccctaaaccaaaaatttaaaacctaaaaaa

SEQ ID NO: 85809 - DNA, 523 bp, Cannabis sativa
gaactcaatcatcacaaacaattcgaattcatataaaaatccaatcaaagcataacctagaacctaagaaatcaaagggaaagagtgaagaacttacctcaaaattggcacagcccctaaaattagtttatccagctaaaagattcttgaataaagatgaaaatcccttggttctacaactggctcctatggctcgaagggtaggggagagaaagaatgatatgttatgttttttttccttagtttttttttttctttgccttttcttcaaattaaccttaattatttatcactaacataaatctaatgactaacctaatattcagctagaaactactaagtaaccaaataaaacaaaatatttaatgcgtaataaaagactattttcccctttcatttatattaaagttaaaataaagcctatggatattttggtcgctttctaagtttcccaatttaacctacttcttaaaaatcttacctagtacggtataaatctaattcaactcatctcttattatcg

SEQ ID NO: 85810 - DNA, 981 bp, Cannabis sativa
gcagataatattagggtcaatccctatcatatctccatggttccaggcgaactgatcctggttcacccttaagaaacttattagctgctatttcaactgcttgtccaggttcctcccaatgtagatacactttgtgggatttcttgggtcgagaacaatttcctccaattcttcaattgcttttaatatgtttctttcatcttgaatctgaggatcaagatcttcatcctttttttctctttcctctgccaagactgccattaactggtgatcggcttttccgtgctgtagctttatgagataacaatcgcgagctagcatctgatcgcctcgcaccactcccacaccctctgatgtttgaaactttagggatagatgcttgatcgaactaactgcctttagtctgatcaatactggacgacccagtaaaatattgtaagcagatggcaggtcgacaaccagaaagtcttgcataattgtggcaaataggggcgcttcgcccaaggtcaatacgagctcgattataccttgactggtgatactgtcgccagtaaatccgcatagatttaccatgcaaagttttaatttagccttttcgagccccatcttctacagtgattccctgtaaaggatgttcactgaactcccgttatctatcagcattctttttatccttttattggcaagctggatagtaatcaccaacggatcgatgtgagggtacctcacgttcttctcatctttctccaaaaatatgattggaggttctttagtttttaccttcttggaaagttcttgagcaaatactgactgctcattttttttttattttcttcacatacctcttttgggcattgttgctttctcccgcaatgtgaggctctcccaaaataaccaggatatcctctccttcaacaggaggaggttgtaatccctagttgtttgggttgttgggcagattgggttggttatgtccattgc

SEQ ID NO: 85811 - DNA, 546 bp, Cannabis sativa
aagagttccgtttgtaatgaattcgtaaaccaagagaggtacttctgtctctaaacaacaacctaagagcctaaccacatttctgtgggttaatttgcatgagcagaattacttcattgatgaattgttcaatttgttcagatgggactatttgagctccaaatttggattttttatagcaaccaccttgttgtttgggaatattcctttataaactattccataacctccttccccaatgattctactttcatggtaattgtctgtggccatttctagctcttttgctgtgaagatttttgttgtctcaacaggtcctttctcagtacttgatagtttttgttgtaacatcagcccaccattttgttcaaagaacttctctttaagcattatcaattttctttttcttactccccaatatagcattatactaattgcaataagactgaggaggcctatacttacacctgcatagatatagaaaagataagatgcttaatttaattagatttattttaggggctttatcatttttatactttaaaa

SEQ ID NO: 85812 - DNA, 992 bp, Cannabis sativa
agatgagaagaaagaagaagatgaagagagaaagagaaagtgaatgagaatttctcaattgtttattccaatggggtatgaacgcctattgatacaaatacaagaaaaatggaaactaaaaaaaagagtaatgttgattacaattaatggtaataaatttttgacattcacataattattaatatttataacaatttttaattaattagcgatatttttataaaaattaaatttagatacttaattatattattaacatatgaaatcttagcagttaaatattacgggtgccctaaaaatttcctaaaatattaggggttattaataatacctcctccacaaattactgcgcacaaaatgtgataggcgcggggagcagctcccaccactggctttgcattgtatatgcgcacaaaattgataaaacatttagtacaacattcgaggttgttttcttatatgtctatgtgaaaatccatcgtatatatgcacacacacatttccattcatatatcttaaagaattatagggtagtgcgattattttatacaatacaatattggtgttctgtgccaatgacatagcatataggtactacttattgttacttatgcatacataatcacaagttatatatgggtctttgaaaaacaaaaagaaaaataaataaaatttacttatggggagaagaaagtagtacaattctagtacacgtttttattgctgcaaatcttgatataaaaggccacactagaatcaaagcatccatccatgcatgtacccgttcaaagtttgggccggggctccaccattcatttcagttgggcccatcgaattgctgtatctgtaagaagtaagagtaagcaatatcaattaaatcgacctgaattgttattaattttcgaataatgtggtgtaatgcaattttattaataataaaaataaaagcataattttaatattgtttcgtattttgttagttttattttttc

SEQ ID NO: 85813 - DNA, 852 bp, Cannabis sativa
atacactaagtgtttcatagtcgatatgcgtcgctttcgccttcccagatgtaacgtgtttgatgcctcgctttatgcatccaatgacatatggtttctcattaatacactaactaacagtttgtatatcttttcctcgcataagactttatagtcagcgagttacaagtatactctgttacttacgcaattaatgagttattccattaaaagtgattcgatccatattccctctatcttgacgcgtgtcctccacttaaatggtagtcgaattttgggtataacaattgccccttaaaaatttctgttttaataaaaagtgctttttaataattacagagggcattttcatcataatctactttggaaaaatgcgtcctttgattttggcagttgtacggtttcgagggtcattatgaatcattttttcatcttttgccgcactctcaaccgttagatttcccaacctttggccttcttgtcactggacttagagtataaaatggtggcttaagcttgccatattccacacacttttggtttttttttagcttcatcttgtgattggattgtcattctctcgctaatgtcccatctgagttcagaaacttacccctctaaattcataacaccagaatgcaccaaccacctctcttctccatacgttcccaagaacttcaaacttcaatttgaattggaaacgaaggattccaaggctaaggagcttttgatcaatcaaaaccaaggaaacgttgttgatcgttacgggcgatcctcataaaagattttgaaggtacgttccatcccttgtgaatggtggtttgaactggatcatgcatattattattatta

SEQ ID NO: 85814 - DNA, 551 bp, Cannabis sativa
aagttttattactttgactgttgtcagtctgttattttttcataacaataggatgtaccacaatagcatagtaagcaatggaaagttcctcactagctttaccaagtacaagtcctttccatgtagctagatgttttgatttataatgcctatcctatttctttcacacaacattcatttttaacatagacatgcttccaggttcccctctcttccccagaaagctgcttaacttggaaattacaattgatagataaatccttatgcaaaggttgaaaaacatttcaacagtagagacatatacatacatatgaataagaagagcttaccataggctgggggatttgcaatgattgcatctgctttaaaaggaattccagaatccatatcgggttctttacaagctggaagtagagagtatatgatttccttcatttgatttcgttgtacaggtatctcagatggtcctgatggcaagaaacctttatttttaaccatatctgcagaaagataaaattttaaaaatcaaactgagttgaagaatgaacata

SEQ ID NO: 85815 - DNA, 596 bp, Cannabis sativa
aattaaaaaatgtaaataaaaaaaatacaccaataaaatatttatataactatacaaaataatatatatatatccataataattaaactatatatatactcttttttacttaactaaatttcaaataaaaatcatttttattatctacatatatacataataagattatatatacatattcttcttatatatatatatatgtacttggttcggaaatggggtttttttgttttaaatttatttatgtttattatggccatcagtagcactattcggaaatggggtttttattatgtgcataataatcattttttgttttaatttgctatatttaaacaattatatatatatatatatatattacataatatatatatatatatatccacagtgtatatataaaccaaaataaaacaatatatatcaaaattatatatatatacagtggagtaaaaacacaaatagtatataaaacaataaaaacccaaatcaaaattatatatatacagtgaaaatatatacacaaataaatcaaaaaatacccatatcaaatatatatataaacagttaacatatatacacaaatacagattatt

SEQ ID NO: 85816 - DNA, 876 bp, Cannabis sativa
ttgatcacagaactaggagttagttacaacttcggttgtaactaacaactagttcttgatccactagaggcgaagccacctaggatctgatttctgttgtactctgtttgtaatttttttttttttttctcacttcatctgtaaaactgtaataataaaggttacagtgaggtctaaatttaacaaatacatcatcacaaaagctaaccaaatttaatgttaacaattttttaggcagacaaaatgcctatatttcttgtaaatatttttcccttgggatttaacaaataaatgttgtccccaagaatgatataaatgaatattaagaaattttcttacatgaaatttatgtgattggagtttggaacctgtgcacccttggtctttattcttttttggcacttttaaaaccaaaatattgcggaacaaattaaattcttgacatggaatatgtataatcagcaatatacataggattgagtgcatctgtcattgcttatcgtagttggggttctaatccttagtaattcaagtattcacaacaacaaggccttgaagactgagtaaagcttagctaactgtacatctctttatttctttcttttccaaactgaattttacaaaataaatgctgctttttatgtggttttggttgatttagactttgtggacaatggataatgatacttatcattagaagtttcaagagagaaacgagttcaatgaagggttcttcattgcaaggaattttgagagctccattgaatgatcaaatccaaattcttttttcagcttcccttagcaagtattggaatgatggctggttcaagaattatatgtaaacagatgttattcatgagtagactgcccaatttg

SEQ ID NO: 85817 - DNA, 810 bp, Cannabis sativa
atctttgagaaaccctcaacgaactgacgataatacccagctaagcccagaaagcttctaacttcagtagcccattgtggtgttggccaaccccaaacatcttcaatcttggtcggatctaccataatcccatctttatctactgtgtgccccatgaaagagacacgagataaatagaattcgcactttttgaatttagcatatagcttatgatcccgtaatcattgcaaaccctatctgagatgcagctcatgctcctgttctgattcggaatacatcaagatgtcatcgataaacacgatcacacatctatccaagtaatccttgaacacccaattcataagatccatgaatgccacgagggcattggggagtccaaaagacctcaaaagatattcataatatccataccgagtacgaaatgcagttttcgggatatcttcgtctcaaattctcaaattctcagttgattatagcctgatcgaagaccaatagaccaatcttggagaagaccgtcttccccttcaattgaccaaatagattgtcaattcgaggtaaaggatacttgttcttgatggtaagcttgttcaactcctggtagtcaatacacattcacagggatccatctttcttcttaacaaataataccggagcaccccaaggttagtagcttggtctaatgcatcccagattcaaaaactattgcaattgtatcttcaattctttcaattccactagagccattcgatatggtgcttttgatatgggattcgatccataaagcacctcaataagaaattcaatctcccg

SEQ ID NO: 85818 - DNA, 819 bp, Cannabis sativa
agtcaagagtattgataaaaaaaaaatagctgaaatacaagcaagcattcactattttttttttttttgttgagtatgatatataaattcaagataggtatgaatgtatgaagccaacaagccaaccacagattcaagaaaatagttaaaccatctcttcaatattgttatggagatcatatatgattaaattgagaattcagcaatccattatcaacaataaaagaacctttgtgcaaccaatgatctcaactgaattaaagttaaaagaaaatataattacaatggcataaagaagctcaaacactttatatggtggaatcaaatgatttaaaacataatatcaatatagatggaaacaaagaatattcataattgctaaacctgtttattaaaccatttaaacaaaaaaaaaaaaaaaccttagctaaaagtacaataatgttgaaagcatggtgagaagagaaaaaaaaattataaaaactaaccaagtcaaaggatatgttactgtgtatcaaagaaggacaaaaatgactctgcaatggtaaagaaaggcataaccataagcaaggctggaacatttccacgctagaaatcctgtaaagaaagaccaactaattactttgaagtttgaataaatagaaaaaaggcgaatgctgtagttaaaaacatcaagaaaaaagtttaagagagcaagcataagataaataaaaaatacaaacacgatcaaagtgagaaaggaaagcaagaaaaaaacagcagtcaatgtcatactgttagttatgtatgtaccggtaatccttcttctctgaaaatgtc

SEQ ID NO: 85819 - DNA, 1655 bp, Cannabis sativa
aaatggttgttcctatactgtattatttgactcgggagctactcactcttatgtgtcgagtagagtaattgaaagttttcataaaccatgtgatatttatgttgtggggtttggtaccctgttactttcgggagaccttatagtatccactaggtggatttgacctttgtctttttggattgacggatgtgaattaactgccaatctaatagagctgcaacagtctgattttgatataatcctgggatggattttctgtctaaatatggggcaacgaacgactgcaaatggaagatggtggtgtttgagccgatagtgctaacccgacagtgtttgtgggtaaagttcatgggacacgtatactaagaataacacttctgaaagaaaaggatctgatgagcagaggttgtctgggattcatagtcactgcagtggatatcaaccaacctgtgacatctggacctgagaacacaagattggtgcgagtttcttgacgtctttccagaagatttaccaggattgccacctacccaggagattgaatttgtaattgagttagtttcaagagcggaaccagtatcaaaagcaccgtatcgaatggctccagtagaattgaaagaattaaagatacaattgcaagagttattgaacttggggttcattagactgagctaccctccttggggtgcttcggtattatttgtgaagaagaaagacgagtcgctgcgaatgtgtattgattaccgagagttgaataagcttaccatcaagaacaagtatcatttacctcgaattgatgatcttttttatcaactaaaggggaagacggtcttctccaagatcaatctgtgcttaggttatcatcagatgagaattcgagaggaagatcttttgaaaactgcattccgtactcagtatggacattatgaatttctagtgatgtctttcggactcaccaatgccccagcgacattcatggatcttatgaatcgggtgttcaaggattacctggatagatgtgtgatcgtgtttattgatgacatcttagtttattctgaatcagaagaggaacatgagtttcatcttagatctgtattgcaacggttacgagaccacaagttgtatgctaagttcaaaaagtgtgaattctggttgtcttgtgtctctttcttagggcatatagtagataaagatgggatcatggctgatccgaccaagattgaagttgttcgagattggccaacactgaagtcggctactgaagttagaagctttctggacttagctgggtattattgttggttcgttgagggtttctcaaagattgttatacccttaacaaagctgaaccaaaagaacttgaagtttgtttggactgatcggtgtgagaaaagttttctggagttaaaatagtgcttgattactgctccagtgctaactcttcctttagataaggaaaagtttattgtttactgtgatgcctcgagacagggtctgggttgtgttcttatgcaacctggaaaggtaatagcctatgcctctcagtagttaaaggagtaaaagcagaggtaccctactcacgacttagaactcgaagtagtagtatttgcgctaaagatttggcggcattacttatatggcgagaaatgtgagat

SEQ ID NO: 85820 - DNA, 873 bp, Cannabis sativa
agccaagaggtgaatgtaaagaagataaaaatttatcataatccagacatgttcactaaaccaatcactcaagctaagttcaagcattgcttgaacttggtgaatatcagaaaagatgattaggcccctttgtgagacatacaggaacaactcaatttggtgttattgttcaactcactcaagtgtcaagctactagatctagatggatttgtggtattgtgatcaagttacttgccacctcagcagccaacccaacactcggataagaaggaagttaagttagttgtctagttatttttccttctctcttatggtttgtaccaaggcctatataaggcttgtcttaactaatgtgaaggcttaatcccattattaaaaaacatagagagtttgtgagttgttgagagctccaagaactaagtgttttgattgtaaagtttttggaaaaactttgtgctggttttacaaagattgaacaaagattatcaaagcatgtgtgactttgaaagctcttttacagtggactaaatctgggttcaaaagaatgtggttgaaccacttaaaatccttagagatactctatttttaactccgtttttaatctctgatttgttggtttattttctattttttttttttacggtgattgagtcttgatgtttggtgatgatattttatcacaatttactattacaaattataagtaaatagattctgaacttatgcaagaattttaaatattgaaaccataagaaatttaaatagattagttctaatattttgattagattattataaatttttatatataaaaaatggctatctaattatttttgttggtttaacgaaatatactttaaaaataaaacaat

SEQ ID NO: 85821 - DNA, 855 bp, Cannabis sativa
tgtgagagttaaaacactttatgaaaactcaacagagaatctcgtctcgactgtattgtacctattcttgttcaatctataaaggaattttacggtggtgttctagaactggagtagaaccatagttcacaacgatctataggacttgaaccagtatatatcttggtgttgatttctttattttatacatttactattttctagttttagattctcagtttgtcattactaatcgtttgattatttagaattttattgatttgattctgcacatttagtcacaattttctcacataatttaatataataacttctaaaaaacatcactaatcaatcttaagatgtcatctctaaaaaaaatttgttatacatatgtacaataccaatactctttaatatataatacaagttctttcttatgttttaatctacagtatgtggccacgtttctctattttattggcaatgtataaaacctttcaaagttagccacgtggcaaaatttaaatggaaccaacaacagcgttccatagcaagccagccacatcaattttgtcctttctgcattaaaattaattgttttcttttttgtttttgtttctttcaacgataattaagtaataaatttaataataataattattgtttttttttccttttgataattataataattattgttattaagagatttatatgcctccatatatttttttttttttttttcaaaaaccttcttgtttcttgttcaccaacttcatcacaagtatttgaataagctagctttaattttgaaggttgacattttttttagttttgttttttttggtttttttgtcttgtttggctccaata

SEQ ID NO: 85822 - DNA, 730 bp, Cannabis sativa
ccttccggagcagtgttcatagatagactatgacatagtcgctgtttcatcccttcctctgtgttggcactaaagaatatggatgattttgtaaaattgacttgttggcccgaagcattctcaaacttgtgtagcacttccttgattcgagaggcttcatcttcagttgctttacagtacaaatagctgtcatccgcgaacagcatatgtgaaattcgtggcgctccgtttgcaactttgcaaccatggatccaacctctctgctcatacttctttagaatggccgatagtccctccgcacaaaggataaaaagataaggagaaagtgggtctccttgtcttattcctcttgtcggaataattgggccaacttcatgattcccatacactaccttgtatcttgctgaagtgacacaacgcaacacaagttgaacccatttttcttgaaagcccatcttacggagcatagcttcaagaaaagaccactcaactctgtcataagccttgctcatatcgagcttaagtgccatgtatccgtctttacctttcctctttcgcttaaggtaatgcaagatttcaaaagaaaccataacattatcagagattaatcgtcccggaataaaagcactctgattttctgctatcaatgaattcataaaaggcttcattcgattcaccataacctttgtaatgatcttatacaatacattacaaagagctataggtctca

SEQ ID NO: 85823 - DNA, 557 bp, Cannabis sativa
caaaattttaatacaatttatgttctattatttaatacataacaaatagtccgtcttaacttgtattataatatttacaaatgattcagggttaaccccaatctccaagccaggcccagactcgggactcgaacccgaatccaaactcggacccgaacccagacctcgactcgggagctggatcgggacccaaaccctgacctgggacacgggacctaaacccggacccggacccaaacccgaacctagaactaaaaccagacccggacccgagttcgggttcgggacgagactcgggacctgggatcgggaccccgacccggacccaagacctaggagccagacccagactcaagactcggaccccgaccgagactgggacccgggactgagactcggacctggacctagacacgaacccaaacccagactcgaaccctagacccgaacccagacccaggacttggacctaaacccgagactcggactcggtcccggaacttgacccaggacttggacctagacctagactcggatcgagacccagatccagaccc

SEQ ID NO: 85824 - DNA, 647 bp, Cannabis sativa
gcttcactcatgttaaacttaagaatcatgaatctttttttcctggcattttcaacttaaaataattcatgacctaaataaaaccattatattatcagaattcaaacgtcttgaaataaatgcactttgagagaccgatatcaccatattaagcacattcttcattcgatttgctaacaccttcgatcccactttattaaaaacattacataaggaggagataggtcgcgaatctcccatatgaattggactcttctttttgagtaattggcgttgaaactcttttatgttttaatttttatacacttaatctcttttttttttgggaattttacattggatgctgttttttttaattgtttcattttacacgcttaaaattatatttactgtacactttatatattgtatactgtgtctagtaaaaaattgttaattttcttcctttatgctatttgtatttgtaggatgtgttttgttttatttttcttttttaaaaaattagtaaaagctgatttaaaaagagatttacatatgtgataattttttttaataataacaatcaaattaaaaaaagagtgataaataagactctctttactgtcattgttcttccttcttcactgccattgttctttccttcttct

SEQ ID NO: 85825 - DNA, 5825 bp, Cannabis sativa
catggttttaaagtcctgctattataaatcttatgtgtgttgatgacacttttttgttttttgtttttgtaatgaaaagctttggttgaggaaggtggaggggtttcaaattgtcttcaaaaatattgtttatggaaaggtgagggtgttggctgtgattttgatggaaacctgctgtagagtactcaaaccagtagcaatgacagcaggaaacaatagaacagtgacaagaaaatagtagaaaattatggaagattgatattgaatgtatgagaaaacccatttacaaactgatgggagctcttaggcccctttgatgcaaatagtgatttactcaattcattgcatattttctatgttctcttactcacttatatatagtaagtaaagctttggttgaggaagctgaaggggtttcaaattgtcttcaaaagtgttgtttgtggtgtggacagctgctaaatgtgaggtagtcggctgtgattttttattcaaatacaagtctttgtacaaagaattctattatggcttttttaggtttctgtgagttagatcggagagacaacttcttgggaaatcgtattcttttttttttttcttcaaacagtagaattaaggattataggatcttctctgaaactcataggattactttgatctaaaatagtctactctccttcttctgaagagcagatctgttgcgactctcttgataagctcgtctagaaatttggtggattggcaattcgaacaaaaccaagttcttagcgttgacaaattgggactccctttgttccccaaaagggtttggaggtcttggtctcaagaagtttatggatattaattaagcttggttggaagcttgctgtgaatcattaatctctttggtgtaaggttttgagatcgaaatatttgaaatatgatgactccctttggtcagtttcaatcccctactctgcttcttggatggcgaagggcattctttctaatttctatactcgacggacctttgaaattctccttggatagcatggtcgagttgggattagtatttggctaccttaaatccttgatgtgaaagaaatggttgctatgagggatcggtgctctttgatcgcatgacagttgggagtttgatgaattgaacatttggtttgttcctagtttggtttggcgagctcgataaaccttgctaaaagattacctagaaaggccactgatgtgcttttttaaaaaggttcatttgacaacagttttactattaaagaggcgtagagctctaattagacttcatacaaaataagactttaggcaacgtttggttaaagggaataaaaatatagaaataggaatgtaaatgagaatagatatagaaatagaatggaattaaatttaaaatgcataaaaaaattattaaatttgttctcatattgtattggaatgatctttcattccatttcaaaatagaataaccattttatcaaaatgatagaaaagtcattttattggagtgacattcaaatactttatgaaatgcaacaaaataaagaaaaataaaaattattttatttccattccattttattacctccaaccaaacaccacctcagtgtttggaaagaggtgtggaagctacttgttgtatagaggatcaatttaattgtttggaaagtggggagagacatctttgcatttggagcttgcctccaacagctcttggacaatgttgttaattatgctttgtgtcacaataatgaggattccttccttttatctattttttagctattaggagtgatgcttatcgttgatcctcctttccttctaaaccgaaaggaatctttggctgctggtgacagggttgttaacttatggtgattgagactttcactatcaagtctcaagttggcaatcttcttgtagtagaatgtagaagcctatgctcttcttcatgctgttgcacttgctgattcgagggatcgggcctgtccaatcattctttctgattgcaagcagctggttaaggggagccgaagcctcatttagtctttgatgaagccttgaatgaagtatgaagtgtatccaccgaaatgaagatcaagtagccaactactaggttgccttttgcttcgtctacaagaagaagagttgatgtgaatgaaatagattttggcaaaattacagcaggcatcgaaaccaagatagtgaggcagttgctgttgattctctatggatacataacacactattttccagtgaagtagaacacaacttctactatggtttaggtcttgtctttcttttttaagataagtatttagatttcaagtaacttcagtggaacgtgtaatataattttttattattactatttttttagcctttttatttaatttcaacaaatcagttctcttctaggcccttcactcataattacttctcttaaatttcatctgtatcttaaacaagcacaactataagcagccacattgaccaaccagattagacacaatttactttctaagtgagtaaagctagtgtaatgacaacacacctttttatgacagtactataagtattgatcatctaaaaagctgtgaacacttgctttgtattggtattccctcctaatcccaaaaaagaaaaaataatattaattttgaattttgaaaagactactacaatatttattttttagaattgtatttgagtgataccagctctattcaaagggatcagcaattaagattctctaaatgagtgatttttaattcacgatggtttcctagattgatctttgctgataagagataagtctctaacagatactttgctcatattaaaatctcttagaggaggtggagtaggctatacattaaggctgaactagtataaatttggttatgatttgtcaatttcttttattttgttttctgcattatttgttattgtttttctaagatataatctaccaaattttgatttgattgtgttgtgtgcttacaaaatatttcttagatttctctaaaagtatcacttttaatacatagaataaatagtggtatgagagttcagacatctaaatgcaacctaaagtcttaaaaaaagtattacataggttatacacaaatttggtgataaaagattacttatttgtgagaaatactataaggcacttgtaatgtctaaatatgattcgaatcaaactataacataaatatatctcaaaatcttgagggagatatcattattgttcattgcacctctatctctacatagacatatacttttcttgacccctcactcacatgctttttcctcttaaattgcatctgcatcttaagcaagcacaactataagcaaccaaatttgagtaaagttagtgtaatgatcacacaccttttcttttcatgacactactattcattacaggcttgaattaatggttgggcaagggtagatttctcaaaattgtccaccttatctttatttgacattgaaggaagtttcattctctcttgggcaaactttctttcctcattctttccccaaaccactaagtaaagacccgtagcaaccaacactgcgccgataatgctgcaatccaagaaaaacactaagtttcaatacataaaacttaaagaagaagacaataagaaagaatcaagttggaatggttagaacctaccctcccaagtgaaattcttctcctaaaacaatggaggccaatatggccacaagtaaggtctgtaaaggcatgtacaaggaaacaaacacagggccacttttgccagtaacccatatctgtattgcaaatgccatgcctgaagctaccagaccctgcaaccacccccaccaatgcatataagttaaaacaaaaataaaccaagctaattttcctcattgagtaaaaactaactaaccgagtagaaaagaatgaagagttcactactagagctaaattgccaagcttggaaatctggttcaaatgatactgcaattacaaaaaattgcagtatactgaagaagcaagtatatgaggtgactgagagccttgccgggtatttcttcaataatggggcttgtaacacaaaccaactggaccaacataggcaacggcagaggagaatgacacaacccaatgcccagttcttatcttgatcatcttcaagtgtggacattaattgagagtggtggatctgtaaagttggtttatagatagttggtcctctatagagtgttataactgaagctccagctactgaagacatagttccaagcaccttagctataccatcttttctgttcaagtgaacctgttctaatctacaacccaaactcaattgtaagttattctgttctatttcaagctttaagagattaaattttctatgtaataacttgcctgaatatggttgccatgataaatgttatagcaggaatagcattatccattgcacaagcaaaagttggtgatgttttctccattcccaagaggtacaatccttgatttaatgtaattctgctcagaaaacaaaaatttccaaaacttcagatttttccaaaataaaaaagattgtttcttgtctttggggaaaaagatcaaacacataacgtacccaactagtccatggataaaaaattgaatcaggaaggaaaagctcaagggtggcctatctttcctataacataaaaacaaaatatttaattgaagagaaaaataagaacccagaaactaaaaatcaagaattttcatgaaagaaattgtgggaagtactttattataataaaacttcatacttctctaaaatatatgcaaagggcatcaagacagagaaggcaatgatattcctataaagtgggaaaactagcttgctcacacccatgttaagggcagttttaagcaatacatggttcccagcatgtcccacctggaacaaaatggaggccaagtgaacttgggcactttcaggcacatggcaaagccacctatgtgccatggaattaaagatcagagctttattccaatgatgggttagtagaacagtagtactcagttgatgaagctccaagattgatgagaattgtattggtcactcactatatgtagaatgtagatgccttttccaaaccattaaaagtcaagggtcagacacaaatatcttaattaagaattacaagtttgttttttttttatgtgaaagtgactacttttacagttacaggtattcattttcagtgatattttggtttttacttttagctcaagtaagttgatatttgattactgttggttagaactggaaacattttaatatttaaatatgtttaataattaatatacaaaatatggcttaaacttaaacatatgtctaattgtatagatcattgttattgggcatgcctactaaagtggtgctctatggtaatgatgttaagttaaatgagatttaatacttaattacacattgaagagggtacttatcatttcttaattatatattattgtgattgattgatagtgtattagatatgaaaagctgtaaacactagccttggatgtggtatacttcttaacatgatttttgttcttggagtaaaaatatgtaataaaaattgtagtagcataggtcagcaatgacaatgagtcattattgtttagtttgaggacaaaacaaaacagtgaaacataacataagttattgtcattttctatctaaggaaagaggcatcttattttactacattattaaaccaaactaaactattctattgtataaaacgacagctttgttggagggtggttctgtttttttttttttttt

SEQ ID NO: 85826 - DNA, 534 bp, Cannabis sativa
  modified_base (116)..(118): a, c, t, g, unknown or other
gattgtacatgttgatcttcggaagacaacctgtcggctctgataccaaattgtaacaccctactagtttatgcgtgttatcgtgatttttgattaactgtgcagctcgttgctannnaacgagtttattgaaaatcgtgagtaatactttttttttaaatacttataatatcaaaataaataacatatatataatcgagatcccctatataaaacatttgcaactgattcaagtacttgatacaaaagttgtcacctagcgactatacaaaatataaccagctgtcccaaagatcgtacgctccaagcctaaccgccccgacatatacaatctttatccgctcgctctcgcggttactcacccttagctttgcctatacctacacatgcaaataatacctgtgattccacaaactaagtagggaaagtataatcataatcataaatataactcaggtgataattaggctcccatacacccaactataaccctatctttgtgtccaacatgttactgagtctagaatgttcata

SEQ ID NO: 85827 - DNA, 650 bp, Cannabis sativa
ctcggttatctttggaacagcaagtgagattgattcgaccctttactattcaagatgttaaaaaagttatgttctttattccttacataaaaattctaggttcgaacgggtatggatcaagattttttaagagcacgtggaaggaattgggccaagaaactggcttttctattctaaattttttcaatatggtctctgaggtaattaaatgaaacccttcttatgcgcattccgaaggtggagaatccatccaaggttgtggattaccaaacgatagcttgctgcaaaaccttatacaaatgcatctccaagatggtttgcacaagactgtttgatgtactttcggggctggtgagtgatcatcaaggtgcattcattaaaactcaatcacttgctcacaatattctaatattacaagatttgtttaagggctatcaaaggaaaactatcattcattgatgtttgatgaaaaattatttaagcaaggcttatcacacaattgattgggacttcttgaaaaaattactaaaaacttgttgttttcgagacaaactatagaccgaaaaatggtttgtgttcgtaagttcaattacttacttgtgctgaatgagaaagttcaagtatatttcaaaggagctaaaggtccaagg

SEQ ID NO: 85828 - DNA, 1139 bp, Cannabis sativa
agataagattagtataatgatatggatatgtgattacatgtttaccgtacatgtttcttagattacattagaatagcggtatcaacatatttggtattatattggatattgatgaatgtctgttggcttaagtactatttcataatatcacatccataagactagagtatgactagcgtgccgagtataggcagatattatggtcaatagtactgtcgtttgaacgttatagatttagtactttgttggacatggggataagttattgttgggtgtatgggcatctaatcataattcgggttatagttatgatatttattatgcttttcttattgagtctgtcgtctcatagatattgttttcatgtgtaggtaagggaaaggttaaggttgagcatctatgagagtgagcgaatgagatgtccatgtcggggcggttaggcccggagcgtatggtctttgtgggatagctagttgtattttgtatagtcggtaggcgaccacttttgcagtacatactttgtaacagttgtaaatattttgtactcgggatcccgattatatatatatgttattttggtgttgataagtatttaaataaagttttaattaatcacattttcaataaactcgttgattagcaataagctacacaactaagttaaaatcacgataacatgcctaaactagtagggtgttacaatttggtatcagagctgtcaggttcttctaagatcgacatgtacaatcatcatcaacaataagctcgactcacggttcagtaatcctttactactttagtagtttattttattagtatgttatcaaaaagtttgataggaagcatattagtagcctgattgctgaataagcgcacattttaatttccaaaataagcggtaattagtaaattcttcttgatcgcgaactgaccaggcaagctctttgtttcacaggttgttctaatagaatgaatgacaggcgaaacacgaggagccagtgtaacttggtcagatctagtggcggttagggagttcagattccctcgaatgtacgtggttcaagcaggtagggcatgttggaaattattttaccaggatcttagatctactcactagtatgtttattaacaccctaaat

SEQ ID NO: 85829 - DNA, 697 bp, Cannabis sativa
tttttctcttttttaggtaatttacagttaaactcgctacacttttaaattttgtacaatttaactcttatattggaaaaattatggctaaagcctctaatctctaccatcgtcttggtcagtactccttctgtcaactttggtctattaagtgttaaagtggtctgtcacagtgtacaaaaattatacatggtaaatttttattggtccacttaatattaataattaaaaaaataaattaaaatatttaaaaatttagaaaaaaaattaaaaaaatagaaaaaaatcaaaaataatttatttttctcttctttcttcttcctaaactcatctctttctttcatctctaattttagatccatacctgcaagtagtttccacgacactagagcaacaaggatttatctttccatttgcttcttaattttttcaaaaattctccctaaattataaaaattgttgtaaataacccatgtatacgtagttgaattttagtcatttatttaaataatttgtttatataccactaacataatgttaatatatttcagtttaagagttcagataaaatataactacatatataactatctaatgataaattataagagtatgtatgtgtatttttaaagttattgtttgtatgtttaatgtaaataaactgaattttaggtagtttaaaattattaaataagtt

SEQ ID NO: 85830 - DNA, 612 bp, Cannabis sativa
  modified_base (546)..(573): a, c, t, g, unknown or other
cgacgagtagatcacacccatgccgactgtttgtcaaaacagcacacgatgtcaccggaaagtcgccggaaaggggcggagctacaaaagtgtcaccagataaagtagcgaactgggtgaaatagcttagtgtaggttgttctcctcaacgagctgagtctagtggtgaagaccgctcgtcaaacggacaccgaaggtgactggaaaatacgttcaaaaattgtaccaccaaactttgacttgcgatcccaagctaacagcggcgaaaggagcggcgccgcttgggggtgagatggccatcatttggggtttcgttttgttcagcgtgtggggctaggtggtggctagagatgggtcgccggagagtggtggtgatggaggtttgtgggttttctttttatgttttgaagagagagaaaatgagagagatagatagagagagagagagagagggggagagagagagagagagacgatagggggtttctgctatattttttttttgtttctttttttatatatatacattgttgggttttatgcccnnnnnnnnnnnnnnnnnnnnnnnnnnnnatttacttattaatatagatcataaataacatttaatgt

SEQ ID NO: 85831 - DNA, 1270 bp, Cannabis sativa
aaaatcaataaaaataaatttattccaatttcagtaattttaactttaaaaatagatgctatcaaaaaaaactttaaaaatagaaagtactcaaaaatttgatgaatttagacttttgaattactcaatttggacttaccaaataaaagatatgccaaaaataaaattaggaaacaaagaaaaagagaaaccaaagtttccatggctaggcacccatgtccgtgcgcacgcaagccttgggcgtggcccaaaaatcttggcccttgatgcatccgcgcacgcgcatgcacttggtgtcacccaagtgtgtggcaaccaaagtttcccattttcaaaaatttataactttctcaattcttattgaaattaagatctgtaaaaaaattacataatttttcctaaatttttagaaaaaataatttcaaacacaaattacaattattttatacaaaaaaattgtaatttatcaatctttcaaataattcataatccactttatatataacatctaaatctcataaacatgtaacaaacaccaattaaaattatttttatccagtttaacatgaatagtaaaatcttaccatgactctcatactacttgttggaaaacatatttaattaggatcttattttactatttaagtatgttgattattttgaatctaacttcctaaatatggaaccttaaattaattcaacttaaacacataaaagtttatgaaaatcttatagtgattgcagcggaattaaatatatcattccatttgaattaattattgttcctttcagtcacagagtattaacaaaaattcaaacttggatcttcatctccttcgattgtgttcatgacagtcttccataatttcctcggtatcactcatgactagtttgggctgtgtctcaactcactaacgacatgtatctcaataatatcatggaggaagagatatgaaaaattttaaattctataatgcatagcatatgttgaaattaaaaataaagagaagagaaaagatgagacatatgtatttttgtagcttctaagtcatttaattaattaaaataataatataaattattttgagtggctgagattaaatctttcttaaagcctaattcaaatcaccatacatctaaatatatacctaatatattttttttaaataaaataaagattattattaattaattatataatataaatataatatatataataagttaggtaagtttttatattttcaaaaaaactttttataatattata

SEQ ID NO: 85832 - DNA, 873 bp, Cannabis sativa
  modified_base (34)..(66): a, c, t, g, unknown or other
ttttagaaagtttatatttagggtgttaatcaannnnnnnnnnnnnnnnnnnnnnnnnnnnnnnnnataatttccaacaaaaatttgtttaagtaattacaaagtcttctttagaattacttgaggggcatatatatgtgtatatcaactagaatttatctagaattacaatatgttgcaaacccacccattttaaaaaataattgattaaaaattgaaccttttctttagaaaggaaaatcgaagtagtagtagtaaatgagattaactcataaaacaacctaaagctacacgcgaagctcaatagttaacaacttgcattattaaggcatgtattataaacaaggcatagaaatgtcttaaaataatactaaacctaaaatatgaatagaaggcctaactattcatatgagtaattgaaaaaatacaaaatagttcctggagtgaattattcgaaatatttttttaagtttgctttaaatataaatatgttatattcggcaaactaaaactgtttacacaatgtttggtagattataaactaattgtgtataacaaggcagatcataactgctcgcataaaataaagcatatcagaactgctctcgaattgaaattatatgcaaattataattgctcgcatacatacatagtagattaatcactacttaaagaatatcaaaggaaaagtgagatcaatggaaatgctttctaaaaatatcttaagttggatcaaaatataattgtttagattgtgcataaaaacgcaatgaacaaatatattaaattcaagtataaggtacgaggcattataaaacaaagatagatagaaaagcaaagttggccatcaaacattgtaaaattgtctttaca

SEQ ID NO: 85833 - DNA, 1053 bp, Cannabis sativa
taatttcttttgtaaaaccaaaatttataataaacatgtttagaccagaaaaaaataaaacaaaatctactactccaaccctctatacatatttcaaaggaggagttacaaagagatatttctggaaaaaatgaaaagataaaaaaaaaaagtttagatcccttttgtccgtccaataccaagcctctgccctccgacaacgatgaacccaaagatccacgacgaaattcaacgacaaccacctgcacatacattttcttgagaatttttcttttccttagcagatttgaaagtttaagatagatctacgcaagttaaaatgagaaaaaaaaaatatatcaaataatgaaataaccagataaccactactgttttgactccaaaaaatcaaatatatatatgtatatatacacaaatgagaataaataggtgaagaaacccgccgattctaactggagcaccaccaccacgttctctatttaaaaaaagacatcaaaacaaagaaagagagatatacctgaaaaatggagctctaagggtcaaacacgaagccctcgtcgaacacgaatggtcgagaactactggtcgcaagagcaacaaccccccgtcgcccgctatcattccagtgtggtatagtaaggaggtaagatacagaaagagatggaaaagttagaaaaataaattatggtttttttgatataatggtggtggtggcatatagtaaagaggcggcagagagttagaaagtctgaaaattaattagggttttgatataaagaagataaatagagagagaaattggttttatattcaatactaatttcttataaaaaaaaattctttttcgattacatcaatcagcataatttttttaatgtatattagaaatcatttcaaatttccatgcgtgggtagtgataattaatatatcagtatatattaataaatttattaattaaaattttaaaggcatgggtatatataaaataattgattatttttctaaaaagttagcatatagtgacgcgccaggtgagtcgggacacgtgtatg

SEQ ID NO: 85834 - DNA, 1240 bp, Cannabis sativa
  modified_base (37)..(39): a, c, t, g, unknown or other
taacatacatgtaatcataattcacttctaaattgannnctaatcagattgtaatgagttttttttagggcataaaacccaacacacaccgcacgtgcaaattatatatgtacctggaaagttgttagaggtcgccgaggctacgggaatacaagccatccaaattagaccgactagcaaaaaaaaaaactatggaaagaaaaaggacaacaaccaagtcctaagaagttatcaactatctatgtcaaaaatggaatcgattgtagcttcagtctctcctagttatttttgcgcacatgagttagtatttttacgatttcataaacgcttaagatcacctgcaattttcttgactgagtttataaatctaaagtgttattacaagtgctcctccatttggaagaagaacgctacatctagcaaatattttctccctgattgcaggaaaccctcttggagtgggatgctacaccagttgtagtcttcctttgattgttaaactcctcctaagtatgggacactatacttagcacgagtttactcccatctttcttttttcttttccctcccttggattttttttcttttaagtctctaatgaggttctatgagttaaaatcatcaacaaaggtcctctaataacctttgattttacccttatactagatttggctgatattcccacattactcttcagtagtgattcatcatgcttttgctgatggatgggacttatgcttgaacactagaggcacattctataactcattgtgttggaaattaatttattaggatctagatttactaacatgtatgttgattataattttataatctaacatcctaaatatgaaattcctaaaaaagataaataaacacataggagattaagaaatccttacagtgatggcagcataataatatgacttattccctttagatctctaacccttgattcctatctgtagcagagtattatcaaaattttaactgggatcttcttctccttcgattgtgtacatcacggtcttccacaaaggcctgagtatcaccttgaatagtgtgggttgatactcaaacacctttagaataatatttttaagagagaaacttagcagttttgaaaaataatgaagaaagaagagaagagagttgtctggcattgaaactcacaccgtattccaaatcaatccaccacatacaaataatagtgtgtgctataaggataaagtgtattata

SEQ ID NO: 85835 - DNA, 660 bp, Cannabis sativa
tatttagaccctaaagaacatatcaaaagcaacaaaaccgagcttcatgcataaaatcaaaaatcaccattaaagctccaagctttgagttcaaaactcaaacttggttcaacaccactaacatggatccaaacctggtttaaactactcaatcaaacataaaataactgcagaaatcattccaaaactcaaacaacatgcacagaaactaaatcaacactatgagcaaagtttgagttcaaaactccaaaacttggtccaacaacataacaaccactaaactaagcataaatcaacatgaaaactcataaacaaacctctgaattcaacaataaacacctacaacaaccacagcaagtacaacttaaaacatgcaaaattccatttccttaaaacccaagaaatcaagaacaaaagcaagagagacttaccaagagttgaaatcacaagaatcttgatacaatcagctagaaaacacacaaagaatccccgccaaccctagctactcaaggccaaaagagagaaaggaagagagaaaaagaggtttttgtttaacttttccaattttcacaaaaatgagaaaataattgtttttccttagttacaacattacttcagccaactaattaattaaaaacaataataatcacttaattgatt

SEQ ID NO: 85836 - DNA, 907 bp, Cannabis sativa
ggtgaaaattctcaaataagacatgatttatttttaaattctaattgacttcttgaatcaattaattgagtctacaagacgatattattccagacaatgtggggatcatgtatctatgtagccaagctcccaataagtagatctaaaatttgctaagtaaatttcctagcttattaatttctcttgcctctactatagattcgaaattgcactctagattacatagaacactatatataccaaatacatgtacgctatgaacaatccattgtttcaatctaaacaattattgatcctctaagacagtttacattgagtaggaacaaatttattgttttatctattggtgtattttatccttaaaatacttagctacttataaatgatattttagtaaattaatataatattgaaataagagattttctatttatgtcgttttagccaagttctaaggaaaccattgtttcacttttaaatagttatagtagttatagattccatatctatgagtaacactctcacttaattacactacataattcccagatgtaagtatgggctagtacgtcctatgggtaagctggtaacaaacaagttaaagaacccgtatagtacaaataagctagaatatagccatatcaggattgagatcaattgacctacaatcaactaagtgaactcaacttagaaaagacataacggtaagtttataatatctttttcactatcaatatcagtccagttcaatgtataactcatacatctaatacaagtttactttgccaatccttggataagacattccacttatccaagtataagtaaaccacgtcgctaattatcacgtcaatataaatctagtgcatttataattcgtgtgattaaatagtttgaaacatataat

SEQ ID NO: 85837 - DNA, 917 bp, Cannabis sativa
gttgataatattacactatcaaatcatggtaattattatggatcaatcaggtacacgtacctaattcttgtataattattattgtgtattagattatatacaaatttttatcttgtattgttaattttctaacaattcaatatttgacagccggttctaattagatcactcagttgtaattggattgaattaatttatgcacagctctatttgataccttaaccaattggtatctcaaactttcaactaaaataaaatttaccaaatatttcatttttattatttcatatttaaaagtacttagattttattttacatatctttatttaatttataaaacacttttgaaaggtttctaaaataacttacaaagagatttaattgtatcttaaacaacatcataacttgtaaaatgagacagtattgtaaacatcatatgagatagtattgtaaacatcatagaaagaaataaaaaataaacaatactaattttactaataaactatatgataatattttgtactttttagattttactgcaacttactttctaacatatgttttcaattaacataaaagttattaaaatagaagtaacgtacgtcaaagtattacaaagaacgataaaataatataatatatataatttaaaaattaaaaactaaaaaataaaacaaaacttataattttaaagttaactaatcaaactaaataattaaatatgcatgagatacaattattttttaaataagtttttagataaaagtaaccattttgatattttatttgtattaaaaactctattttttttaaaaaaaataatctgatatttgtgtaaataaaattattgagggtatgttgtaaataaaattattattattttttatatataaaattgaatctccttcccccccccc

SEQ ID NO: 85838 - DNA, 861 bp, Cannabis sativa
gtattgattataccataactttcttgcttgttttcactaaagattcatccagaattattatggatttagttgcgcaccatcttctagtgattgcctcacatggaagcatcaccctttaggcattcttattgttagcttaacctatcatttagcaaaatcaaagtctatttctcatgctccttcaacttctaaccctgcaagctatcaaagctggtggaaaatcgtttggactgctagaatccctcctaagattagatattttttttggaaggccttcaattatgctctaccgtgtggcctaaatctttataataggaaaattttagacactcccatttgtcccttttattccagaaatgaagagaccatcactcatgcctttcttgagtgttccaaaaataaactggtgtggaaagaaactttttttaaggagcttcattgcatgaacaaaaattatgatattaaggaattttttctcaagagtttcgaatctttatcaaaagataagcttgaactgtgttttggtatcatgtggatgatttggaacaataaaaattacgccatattcactaaaaaatattgttttaatatgaatgtagcatgttatgttgtaaagctgttgtaggactatgttgaagcccaaaagagttaattcactccctaatcctcttactgctggtaggagtggggaagataacttggagaaccaaaaaaataaagacggattaccttccccaaggtactataaattgaatgttgatgcggcattaactaaacaaaagaaagggaaaatcagacataggggctgtggtgagggactgtcacaacaatgtttctgttgtccttgctaccccaagaatt

SEQ ID NO: 85839 - DNA, 607 bp, Cannabis sativa
ctacgaaagagcaaaaaaatacatctgtatggaggagggagacgaagtcttaagaggaagtaccagtgagtgttcattggggagctcatcaaattcctacatggtctactaggcgacattcccaacacccttaacccggaacatccgagtaaaacctcctattacccacaaaaatcccacatttgagatactcctcaaagtgaagttccactatgcgggaacgtgctcctagcaataaaaaaaaaactcttaggactgcaaggatggactacacccaactgtccaagaagagagtacaagcctgaaggtagttccacaagaaagggccctcacaatgatgaggaggtggctcttcaaagttagccctgaagcatgctcaaggaaacgaataaaagttaaataagcaaaagattgaatcggttcatgaaaccttcatctcccttaaatatgtcaacaacaaaaggtcgaatcgattcatgaaaccatcatcttccttaaaaacatcaaaaacaaatgaaataacggaaaataacattgtgtagtaaaaacaaaccacgttgcttttacatacgtcaaaacaatatttttttcgaaaataataaaaaaa

SEQ ID NO: 85840 - DNA, 996 bp, Cannabis sativa
tcttcttgaaaccttctacatgtgcatgttttctcttgaatattgattatatatgttcctctttcttcaataacttctgagaaaaaagtgttgcattgtctcacctttcaaacatatgtaaaataacaataaaaaaaaggtattacaaataatatcacctagtacaaatttttttcagtataataatgtatcaggttactttatttcagttttcaaaatatagtattaatcaattaaaagcaaacaagatacctcaaatttcgtagattttagatagttctctctcagtatagcttctgcttttgatgatatctctgtaaaagtttcattcgcttcattaccattagtccaaacttatttttgtacaacacttcaacacttcttatgcattccaacattaaggttattggtaaattccttactgctttatttgctgcattgatagactctgttatattttatgtcatcatggtatatctcctttttggtgagtgagatcttgcccatgaatggtaacctactttttccaagtaaggccttatacgggcatatattttgtcaagagcagccatatagtactcaaactcaaccaatgtatatgattttaatgctttaacaaagtttatagtcaaatcatctccatggatatgaagattggccttaatgttgttaagtagatgaaaaatgcatgctccacggaagacattagggtacactgtttaaacaacatttttgatgctttgatgtctatcagatatgattactagatctgcaagaacaattttagtgttaggattttactgttaacaacatgaccaaaataataattttattcaaaaagtaaaagtaacctggtacaacaaaatttaaataggtgacgttttataagaattagaaacaaaaattagataaatacaatagattacctttacgttctccatatgtttctttgagctttatgaagaaatatatccaagcttcatcattctttgaatc

SEQ ID NO: 85841 - DNA, 505 bp, Cannabis sativa
ttcaaagcttggattcttatcccaacctattagagctcggggtggtactttgatagtgtgggacactagaagcatcacgattttagactcgatggacggtgatttttcgatttcaacttcgattcaagttgatggcaagagccttggtggttttgaggggtctatgggccttgttcttataagattagagttgatttttgggatgaattggcagggattgagttcaatatgtggcgaattatggtatttaggtgggggggattttaatgtggtcagaagagttgaagaaaaaatgaatagtacctctagtactaaaagtatgagaatgttggatgagttagtacttcaagagttgaggcttatggatccaaaagtaaacaacaaaaagttcacttggacgaactttagatcgttacccatttggagcagattggatcgattcttattcagtaataaatggaagatcatgtttccttttgtcagacaagaaatgatggtgagatta

SEQ ID NO: 85842 - DNA, 518 bp, Cannabis sativa
gtagacaatggcatcaaataatcaacggaagctgttttgggagacaacttgcagagaagcaaaacttgaagaaaggtgtagtccaacaacccatgctcttaattttctatcctaatcataacccttcttctgatgatgatcatcatcgtatccttaaccctaaccctaaccctaataataaggatgaaagggttttggagattgatttgaacctatttccatggcctaattggcattcgaacaataacaaggacccattattgtttgagagttgtgccaatggtatattttgcttcacaagaaactcatcttgcactaaatcctatttggttaaccctttgagaaaagagattttagaattaccacctctgaatatagaaccgccaccgcgattgaaataccgctattgttattacggattagggtttgataaattaaaaagaaagtacaaaattgtatgtgctgttatcgattgttataaagattcgataatctttactttttacacactcaaagaa

SEQ ID NO: 85843 - DNA, 723 bp, Cannabis sativa
gtaattgccttgcagttttcttttagattcacttttgtggtgcttggcaaatttccttgggcttgattagtcatttgagtagccaactaccccatttgaatctcaatgattttaatagaagatcgagtttcagccatgaattggcttattgcatcaaattggtgctcagagtttccacctaaaaattgttattattgattagctggttaaaaattttgctattgttgtggcttatttcttaactcgaggaaaccttgttgtggctggttatacaactgcccttgatagtactgacggcttccatccacaaaagtatactcactatcttttgagtatccaatggcttaatcttgctccatcagtaaactattcacatcaacttggcaactgtcataagggtgaagtcctccacataactcacaaatcacttgagcatgttgcacttgagttgtcatcatcttggtcaaagcttctaattgggcttttaacttacggatggcagcaacttcatgtaaactcaccattctctttgattgacttctctcacttggccattgttgattagtcatggccatgtcctcaagtaattcataagccttgttagcacttttcctcctaagagccccaccagaagcaacatttatgattgtgcggttattgctagttaacccattgtaaaagttgtagacttgcatccatttctcaatcccatgatggggatac

SEQ ID NO: 85844 - DNA, 3098 bp, Cannabis sativa
atatttatcagcaattgaaaattaaacttaaaatatttacactgaaaattaatttatattagatgtaatattgttataattttctctactccaattcacacaaacttataatcaattcttttgtttgtttaaattagtttagataatttatttattaagaaaaatattttttctctttactaaagttttttgatgtttagtagatgaaattaagtggaatgcctaatattacaatcactataacttttcatatgattggttcattttcatgaacaagaatatttcattgattatgtatatggaacactgaaagtaaaatgcataatatgtttttataatttagttggattttccagtcaaaccattatcattaataattaatattggtttaatttaattaattagaatatttcatcttattcttattcttattgttttattttatttaattagttggttcacattcacaatatagtcaactattgattatcttgatgatcactttattgaaccaatggctagaaattatggggatttaattagatagataacataataatagcatatttaagggatgacccaactagtcatttaatgatattgattagtataattatgaaaaatcgagtattagtagtgcctacgattggttagcgatattttttaaaacgtattttgttttttttgaaacagttcttgtattaccaaacaacattacacaggattcggcacatcaagcaaaacagcttgatgagcacaaggaggaatgaccccaatccatatggcactagccttgtgaaccaaagcataattggctaattcatgagcaactcggttggcctcgcgaaatacaaatgagattaatagtaatataacattaagaatgatattaaacactaataatatcttttagtaattctctaaaaaatctcaagtagaacaccacttttttttttttaatatggaccttctcttttatttttacctcagtatatagagatattataatttaattatttttatatcacaatatacatcgtaattataataaatatctaattgttttggaacaattctacaatggaattccaacaatcaattacactcatatatgttttttctagttatataataatttaattttttttaaaataataatatatataataattataataagtatcgtgactcttttgattttttttaaataatttaaagtgctaataataaaattccaacattgcactcttatttattttttctatacacgtacagtttgaaaattttcaactagtgacacaatatattctttctagcaagacttttatctttcaattacccaaagaaaagatatattttgacttaatacatctctttttatgattctcaccacttgatctctatacttagaattaattaagtatttcctaataataattatatattattaactaaacctaacatgacatgagatgataatcaattggattggatcaatatggtaaaaagattagatgaaatggggccatctgtgagtgtttagttgagagagattgaccatcattagtgaaataagatgccttaaccaattattattaaataaatatcaattttcataatcttcaaacattacttataattcacactatataattaaggccttttttttttaaatcagcactaatacactgcactgctctttttaaagattaatagtctaatcagtagtacttagaataatttcaacacccaattaaaaatagtaagattttcacttttgtaacatcactaagagcatttatatttctaccatttagaaaaaaattaatgtaagcattccattttattttattttattttttgttttgataatttatgaacaatatacaatacaaaaaaaaaaacatatttcaaaattataaatttcacagcacaaaataaatgcgcttcggtattttaagcgtgctttgttttcacacacttttagagttcagcaagcttaattttagagttctttaagtgtgggctataagcttataaacttttcaaatgtacccatcaatcattttaagtttctttaattgtgtagtctcgtattaatataattttaaaatcatcacacttaactttttccaaacgatgtaggattgtacagcttatttaatattctttattacggatcacgagactactgattattacatagcaattgaggcgaaagtaatggcttaccataaaagtatagttgttgtaaaaagagctgctagtatacattctgttttgaccaatatttaacagcaaacaattatgccatgcagaaatgatgaaagccaatctgtcaagtgattttctcagctgtattatcaagaaaatgctttaattgaaagaaaaaaacagaaccaatttcactaaatgacatgaagaagaagattaagaaggcatacaagaattttattattcactcggattcataaccttttttttaattcagtgaacaacttcaagctcacaacagcagaaatttcaatgaaataattaacaaggaaaaatgaaaaataatataaatgagagagagaattccaaagctcatgaaatggaagaaaaacctcaagccgaaatttaataaaaaaataataataataataaaaacttcttcaaccctatacatgatgatgatgttgatgatgatgatctatgttacataatgtgcactttgtaagaagaaatcaatgtgaagtgaacctttccctctttcttttttctttcttaaattctaaaccccaagccgggccacctctttgtgacctctttcttagtctttttcgaggtgggatcgatgaggttttcgagtgattttgcttttctgtctcgagtttttcctgcttcttttagaagctctgctagccttctcttctcgtcttcgaaatcaggatttgctattccaagcttttcttcgcgcaatttaagaacatactctagaatctcaattgcatcttgaactctgaagagaaaaaaattccaaatttcagttcatatgcatagacaacagagcaaattacaaagcatgagaagcaaaatttcatgacagaaacattagt

SEQ ID NO: 85845 - DNA, 661 bp, Cannabis sativa
  modified_base (585)..(590): a, c, t, g, unknown or other
aatcaagggctagagatctgagcggaaggagtcaaattattttgctgccatcaatgtaaggttttctaaactttatatgtatttaatttcattatcttagagaattcatatttagggtgttaatcaaacatacatgttagtagatctagatcctagtaaaataagttccaacactatactatagaccactgtttaaaactgtcgcctatagtttacgtgaagatttcaaactgtggcctatatctcgactatagtcgacggttttaaacctttatactaacatttttctactgtcgcctattctacacagtatttgcgacgttctataggtgacagttttatagaccgttaggaattctttactcgactgtgtaaaactgtcaagaattctaggttttttagtagtgctggctggatctcttaggtttgtaggcgtctgcacgcttggatctatagctattggatcagttggaccagtctaatttcccctccgtgtttgcataattatcatgtgtcctaaaaaagacttaagacaaaaacttgtatgtctttgctctcaacgaaagcaccaaaatattgacctcnnnnnnagccaacgacagtgagtcaaattaaagcgattgggaataattaaataacagaatataaataatataaagta

SEQ ID NO: 85846 - DNA, 1074 bp, Cannabis sativa
taaaatattatttataaataataaaataaaaataaaacaaatcttattaatatttgaactgatatttgatcataattattagagagtcagaacattctttaagtttcctattaaaaaaataacagttttttgcatgtagtttggttggttatttgatggcacagagccaatgaaggcagtgatcaccattgatgttctgtgaagagctagagctgatgttactgttgcttttgtggagaaggagcttcgtgttgatgcttgtcatggtgctaataatcatcgctgatacttaggattaccgattatggagaacaaggaatcttcgtactcactctacctgtatgtattatctactttgattatttattttgattgtttggatgacgagaaaatttcgtgttgttgtcgaattgaggcttttcacttatcagttttggttttgcttgatgtcttcagtaatttcgattttgttgatcgacatttgattgagattgtgtcgatggtgccaaagtgaaacttatacaatactcagatttcaaattatttttgttgttatcgttttgcaatttgaggtgtgtttctgtgaaaatagtcattataaaaattttattaacaacaaaaattacacttatgtgaccataaatttagactattatggtcacagtataaatttaatgtgtggaaaaatattatagaataccttatgctgtgtactaattcaggaactggaaccagagaatgttacaaagattataggataccttcttttaaacgactatgatgaccagcagtttctacggttggcttctgctcaagaacattttgttcatcaaatcatatcaaaggctaaaactgaactccaactattagcttctaattcagtctcaaatcctttgtcaccttccataaacccaacttcaggtttctctccattctcttctactgctatttcaaggcctaaattgttttcaattttcaaataccatctccttattgggatccacagcttgttaagaattagaactctgagattttacaaatggaattctatgactcacccttggaacatgaaaa

SEQ ID NO: 85847 - DNA, 1142 bp, Cannabis sativa
taaatcacgtacgcagtggaatagattctattatttgattgtcattgtaccatatcacaatagatcttcagatttgtgtacattaaatcaaaatataaatttatcaagtttataatatatctcttgaagactatcaagatattctcgaaacttctcgtatgttgtatcccttaatccaaataatgaagatgatggaattagactcacaccagtgtcttccaaatcgttccactacacacaaggaatactgtaggctattagaataaagttcatagatttgttcttgttgagttctcaacacatgagcaagaacaaatgagagaaaaatcaaagtcatttttctctctataattttgaaaattaagtgtcagggaagtgttctgatttctcaaatctgtcttgtatttatagtaattaaatttcattaattgaatcatatttaattgtttaaataaatagatactaataaccgaatttggttactattatttatgagagaatatctcgacaaccttgaaatatctataaccactttttaaattcgatatttatctaattgagttaataaaataattaattaacccaaaaagacaaatagggacagcacatcagcttaggcgcctaccttatttttaggacaaggtttgtgtcttttgtcctgacaacttttgtcttaacaaatcttgtctcgacaaattttgtcttaataatttttgtcatttttctatttaattaatttgaaaaattatttatttattactattttaccaattcaaaataaattttttcgaacatctttatatcgctcattatctctacccttgacagtgtttttaagtggcgattcagggaccatgaacttataattcaaagctctaataaactagattatttactggatatcatcaactaaataattcgtgtttattaattccatgattactctactaaaaatatagaattgaactcttactaattgtagaattatatctattgagtttaactgctgtgtctattaatataatcaattctaatgattagacatccatgtgttggttcataattagttttggtcaaattaacatttcacccttctaattacttcttcatcatttaataccattaattcattagtggaagta

SEQ ID NO: 85848 - DNA, 741 bp, Cannabis sativa
gccattaatctcatgagaaggctgattattttgttgggcattataccaatcaataaaattcagctttgctaatgttacaacatcacttacctccggttgtttagcattccaaaccagttcatttcgatgcttccatatcgaccaacacagcattgaagcctccaaccgctcggccatggtccacctgtctagcccttcctcgaaccatgctgtaaatgtcatagcagcagccgctacaacagggacccgagactaaaaatacgataatataatattgttcacctaacataatatattaatacgataatattattcacctaacataatattgttcacctaacataatatattaatacgatatttcagtacatatactaaaaatagagaattgttcattaaaaacgtagtcataaccataatattgctaaaaaaaatatatggctaaataaatatattagtctctaaaattgtaatttcttgtggcttgtgagaagagagttgtaaggcttgggcgattgttcaaactcttgggtataaaaggatttttttggtttctctgttaaaataatattcaagtaagagcattataatcactataatcaaatattatacaatgatgctcttataactatcgaagatccaagcatttatttagagcattaatggttaagaaaacatacctcccatattgctcatcccatcatattgagccattgttgaatatccaagtccaaaacacac
